United States Patent Application Publication US 2026/0256945 A1 - sequence listing, part 2

SEQ ID NO: 1082 - protein, 2094 aa, synthetic construct
MPAAKRVKLDGGDKKYSIGLDIGTNSVGWAVITDEYKVPSKKFKVLGNTDRHSIKKNLIGALLFDSGETAEATRLKRTARRRYTRRKNRICYLQEIFSNEMAKVDDSFFHRLEESFLVEEDKKHERHPIFGNIVDEVAYHEKYPTIYHLRKKLVDSTDKADLRLIYLALAHMIKFRGHFLIEGDLNPDNSDVDKLFIQLVQTYNQLFEENPINASGVDAKAILSARLSKSRRLENLIAQLPGEKKNGLFGNLIALSLGLTPNFKSNFDLAEDAKLQLSKDTYDDDLDNLLAQIGDQYADLFLAAKNLSDAILLSDILRVNTEITKAPLSASMIKRYDEHHQDLTLLKALVRQQLPEKYKEIFFDQSKNGYAGYIDGGASQEEFYKFIKPILEKMDGTEELLVKLNREDLLRKQRTFDNGSIPHQIHLGELHAILRRQEDFYPFLKDNREKIEKILTFRIPYYVGPLARGNSRFAWMTRKSEETITPWNFEEVVDKGASAQSFIERMTNFDKNLPNEKVLPKHSLLYEYFTVYNELTKVKYVTEGMRKPAFLSGEQKKAIVDLLFKTNRKVTVKQLKEDYFKKIECFDSVEISGVEDRFNASLGTYHDLLKIIKDKDFLDNEENEDILEDIVLTLTLFEDREMIEERLKTYAHLFDDKVMKQLKRRRYTGWGRLSRKLINGIRDKQSGKTILDFLKSDGFANRNFMQLIHDDSLTFKEDIQKAQVSGQGDSLHEHIANLAGSPAIKKGILQTVKVVDELVKVMGRHKPENIVIEMARENQTTQKGQKNSRERMKRIEEGIKELGSQILKEHPVENTQLQNEKLYLYYLQNGRDMYVDQELDINRLSDYDVDHIVPQSFLKDDSIDNKVLTRSDKARGKSDNVPSEEVVKKMKNYWRQLLNAKLITQRKFDNLTKAERGGLSELDKAGFIKRQLVETRQITKHVAQILDSRMNTKYDENDKLIREVKVITLKSKLVSDFRKDFQFYKVREINNYHHAHDAYLNAVVGTALIKKYPKLESEFVYGDYKVYDVRKMIAKSEQEIGKATAKYFFYSNIMNFFKTEITLANGEIRKRPLIETNGETGEIVWDKGRDFATVRKVLSMPQVNIVKKTEVQTGGFSKESILPKRNSDKLIARKKDWDPKKYGGFDSPTVAYSVLVVAKVEKGKSKKLKSVKELLGITIMERSSFEKNPIDFLEAKGYKEVKKDLIIKLPKYSLFELENGRKRMLASAGELQKGNELALPSKYVNFLYLASHYEKLKGSPEDNEQKQLFVEQHKHYLDEIIEQISEFSKRVILADANLDKVLSAYNKHRDKPIREQAENIIHLFTLTNLGAPAAFKYFDTTIDRKRYTSTKEVLDATLIHQSITGLYETRIDLSQLGGDGGGSSGGSGGGGGTLNIEDEYRLHETSKEPDVPLGSTWLSDFPQAWAETGGMGLAVRQAPLIIPLKATSTPVSIKQYPMSQEARLGIKPHIQRLLDQGILVPCQSPWNTPLLPVKKPGTNDYRPVQDLREVNKRVEDIHPTVPNPYNLLSGLPPSHQWYTVLDLKDAFFCLRLHPTSQPLFAFEWRDPEMGISGQLTWTRLPQGFKNSPTLFNEALHRDLADFRIQHPDLILLQYVDDLLLAATSEQDCQRGTRALLQTLGNLGYRASAKKAQICQKQVKYLGYLLKEGQRWLTEARKETVMGQPTPKTPRQLREFLGKAGFCRLFIPGFAEMAAPLYPLTKPGTLFNWGPDQQKAYQEIKQALLTAPALGLPDLTKPFELFVDEKQGYAKGVLTQKLGPWRRPVAYLSKKLDPVAAGWPPCLRMVAAIAVLTKDAGKLTMGQPLVILAPHAVEALVKQPPDRWLSNARMTHYQAMLLDTDRVQFGPVVALNPATLLPLPEKEAPHDCLEILAETHGTRPDLTDQPIPDADYTWYTDGSSFLQEGQRRAGAAVTTETEVIWARALPAGTSAQRAELIALTQALKMAEGKKLNVYTDSRYAFATAHVHGEIYRRRGWLTSEGREIKNKNEILALLKALFLPKRLSIIHCPGHQKGNSAEARGNRMADQAAREAAMKAVLETSTLLAGKRTADGSEFEKRTADGSEFESPKKKAKVE

SEQ ID NO: 1083 - protein, 2093 aa, synthetic construct
MPAAKRVKLDGGDKKYSIGLDIGTNSVGWAVITDEYKVPSKKFKVLGNTDRHSIKKNLIGALLFDSGETAEATRLKRTARRRYTRRKNRICYLQEIFSNEMAKVDDSFFHRLEESFLVEEDKKHERHPIFGNIVDEVAYHEKYPTIYHLRKKLVDSTDKADLRLIYLALAHMIKFRGHFLIEGDLNPDNSDVDKLFIQLVQTYNQLFEENPINASGVDAKAILSARLSKSRRLENLIAQLPGEKKNGLFGNLIALSLGLTPNFKSNFDLAEDAKLQLSKDTYDDDLDNLLAQIGDQYADLFLAAKNLSDAILLSDILRVNTEITKAPLSASMIKRYDEHHQDLTLLKALVRQQLPEKYKEIFFDQSKNGYAGYIDGGASQEEFYKFIKPILEKMDGTEELLVKLNREDLLRKQRTFDNGSIPHQIHLGELHAILRRQEDFYPFLKDNREKIEKILTFRIPYYVGPLARGNSRFAWMTRKSEETITPWNFEEVVDKGASAQSFIERMTNFDKNLPNEKVLPKHSLLYEYFTVYNELTKVKYVTEGMRKPAFLSGEQKKAIVDLLFKTNRKVTVKQLKEDYFKKIECFDSVEISGVEDRFNASLGTYHDLLKIIKDKDFLDNEENEDILEDIVLTLTLFEDREMIEERLKTYAHLFDDKVMKQLKRRRYTGWGRLSRKLINGIRDKQSGKTILDFLKSDGFANRNFMQLIHDDSLTFKEDIQKAQVSGQGDSLHEHIANLAGSPAIKKGILQTVKVVDELVKVMGRHKPENIVIEMARENQTTQKGQKNSRERMKRIEEGIKELGSQILKEHPVENTQLQNEKLYLYYLQNGRDMYVDQELDINRLSDYDVDHIVPQSFLKDDSIDNKVLTRSDKARGKSDNVPSEEVVKKMKNYWRQLLNAKLITQRKFDNLTKAERGGLSELDKAGFIKRQLVETRQITKHVAQILDSRMNTKYDENDKLIREVKVITLKSKLVSDFRKDFQFYKVREINNYHHAHDAYLNAVVGTALIKKYPKLESEFVYGDYKVYDVRKMIAKSEQEIGKATAKYFFYSNIMNFFKTEITLANGEIRKRPLIETNGETGEIVWDKGRDFATVRKVLSMPQVNIVKKTEVQTGGFSKESILPKRNSDKLIARKKDWDPKKYGGFDSPTVAYSVLVVAKVEKGKSKKLKSVKELLGITIMERSSFEKNPIDFLEAKGYKEVKKDLIIKLPKYSLFELENGRKRMLASAGELQKGNELALPSKYVNFLYLASHYEKLKGSPEDNEQKQLFVEQHKHYLDEIIEQISEFSKRVILADANLDKVLSAYNKHRDKPIREQAENIIHLFTLTNLGAPAAFKYFDTTIDRKRYTSTKEVLDATLIHQSITGLYETRIDLSQLGGDGGGGSEAAAKGGTLNIEDEYRLHETSKEPDVPLGSTWLSDFPQAWAETGGMGLAVRQAPLIIPLKATSTPVSIKQYPMSQEARLGIKPHIQRLLDQGILVPCQSPWNTPLLPVKKPGTNDYRPVQDLREVNKRVEDIHPTVPNPYNLLSGLPPSHQWYTVLDLKDAFFCLRLHPTSQPLFAFEWRDPEMGISGQLTWTRLPQGFKNSPTLFNEALHRDLADFRIQHPDLILLQYVDDLLLAATSEQDCQRGTRALLQTLGNLGYRASAKKAQICQKQVKYLGYLLKEGQRWLTEARKETVMGQPTPKTPRQLREFLGKAGFCRLFIPGFAEMAAPLYPLTKPGTLFNWGPDQQKAYQEIKQALLTAPALGLPDLTKPFELFVDEKQGYAKGVLTQKLGPWRRPVAYLSKKLDPVAAGWPPCLRMVAAIAVLTKDAGKLTMGQPLVILAPHAVEALVKQPPDRWLSNARMTHYQAMLLDTDRVQFGPVVALNPATLLPLPEKEAPHDCLEILAETHGTRPDLTDQPIPDADYTWYTDGSSFLQEGQRRAGAAVTTETEVIWARALPAGTSAQRAELIALTQALKMAEGKKLNVYTDSRYAFATAHVHGEIYRRRGWLTSEGREIKNKNEILALLKALFLPKRLSIIHCPGHQKGNSAEARGNRMADQAAREAAMKAVLETSTLLAGKRTADGSEFEKRTADGSEFESPKKKAKVE

SEQ ID NO: 1084 - protein, 2094 aa, synthetic construct
MPAAKRVKLDGGDKKYSIGLDIGTNSVGWAVITDEYKVPSKKFKVLGNTDRHSIKKNLIGALLFDSGETAEATRLKRTARRRYTRRKNRICYLQEIFSNEMAKVDDSFFHRLEESFLVEEDKKHERHPIFGNIVDEVAYHEKYPTIYHLRKKLVDSTDKADLRLIYLALAHMIKFRGHFLIEGDLNPDNSDVDKLFIQLVQTYNQLFEENPINASGVDAKAILSARLSKSRRLENLIAQLPGEKKNGLFGNLIALSLGLTPNFKSNFDLAEDAKLQLSKDTYDDDLDNLLAQIGDQYADLFLAAKNLSDAILLSDILRVNTEITKAPLSASMIKRYDEHHQDLTLLKALVRQQLPEKYKEIFFDQSKNGYAGYIDGGASQEEFYKFIKPILEKMDGTEELLVKLNREDLLRKQRTFDNGSIPHQIHLGELHAILRRQEDFYPFLKDNREKIEKILTFRIPYYVGPLARGNSRFAWMTRKSEETITPWNFEEVVDKGASAQSFIERMTNFDKNLPNEKVLPKHSLLYEYFTVYNELTKVKYVTEGMRKPAFLSGEQKKAIVDLLFKTNRKVTVKQLKEDYFKKIECFDSVEISGVEDRFNASLGTYHDLLKIIKDKDFLDNEENEDILEDIVLTLTLFEDREMIEERLKTYAHLFDDKVMKQLKRRRYTGWGRLSRKLINGIRDKQSGKTILDFLKSDGFANRNFMQLIHDDSLTFKEDIQKAQVSGQGDSLHEHIANLAGSPAIKKGILQTVKVVDELVKVMGRHKPENIVIEMARENQTTQKGQKNSRERMKRIEEGIKELGSQILKEHPVENTQLQNEKLYLYYLQNGRDMYVDQELDINRLSDYDVDHIVPQSFLKDDSIDNKVLTRSDKARGKSDNVPSEEVVKKMKNYWRQLLNAKLITQRKFDNLTKAERGGLSELDKAGFIKRQLVETRQITKHVAQILDSRMNTKYDENDKLIREVKVITLKSKLVSDFRKDFQFYKVREINNYHHAHDAYLNAVVGTALIKKYPKLESEFVYGDYKVYDVRKMIAKSEQEIGKATAKYFFYSNIMNFFKTEITLANGEIRKRPLIETNGETGEIVWDKGRDFATVRKVLSMPQVNIVKKTEVQTGGFSKESILPKRNSDKLIARKKDWDPKKYGGFDSPTVAYSVLVVAKVEKGKSKKLKSVKELLGITIMERSSFEKNPIDFLEAKGYKEVKKDLIIKLPKYSLFELENGRKRMLASAGELQKGNELALPSKYVNFLYLASHYEKLKGSPEDNEQKQLFVEQHKHYLDEIIEQISEFSKRVILADANLDKVLSAYNKHRDKPIREQAENIIHLFTLTNLGAPAAFKYFDTTIDRKRYTSTKEVLDATLIHQSITGLYETRIDLSQLGGDGGGSSGGGPAPGGTLNIEDEYRLHETSKEPDVPLGSTWLSDFPQAWAETGGMGLAVRQAPLIIPLKATSTPVSIKQYPMSQEARLGIKPHIQRLLDQGILVPCQSPWNTPLLPVKKPGTNDYRPVQDLREVNKRVEDIHPTVPNPYNLLSGLPPSHQWYTVLDLKDAFFCLRLHPTSQPLFAFEWRDPEMGISGQLTWTRLPQGFKNSPTLFNEALHRDLADFRIQHPDLILLQYVDDLLLAATSEQDCQRGTRALLQTLGNLGYRASAKKAQICQKQVKYLGYLLKEGQRWLTEARKETVMGQPTPKTPRQLREFLGKAGFCRLFIPGFAEMAAPLYPLTKPGTLFNWGPDQQKAYQEIKQALLTAPALGLPDLTKPFELFVDEKQGYAKGVLTQKLGPWRRPVAYLSKKLDPVAAGWPPCLRMVAAIAVLTKDAGKLTMGQPLVILAPHAVEALVKQPPDRWLSNARMTHYQAMLLDTDRVQFGPVVALNPATLLPLPEKEAPHDCLEILAETHGTRPDLTDQPIPDADYTWYTDGSSFLQEGQRRAGAAVTTETEVIWARALPAGTSAQRAELIALTQALKMAEGKKLNVYTDSRYAFATAHVHGEIYRRRGWLTSEGREIKNKNEILALLKALFLPKRLSIIHCPGHQKGNSAEARGNRMADQAAREAAMKAVLETSTLLAGKRTADGSEFEKRTADGSEFESPKKKAKVE

SEQ ID NO: 1085 - protein, 2094 aa, synthetic construct
MPAAKRVKLDGGDKKYSIGLDIGTNSVGWAVITDEYKVPSKKFKVLGNTDRHSIKKNLIGALLFDSGETAEATRLKRTARRRYTRRKNRICYLQEIFSNEMAKVDDSFFHRLEESFLVEEDKKHERHPIFGNIVDEVAYHEKYPTIYHLRKKLVDSTDKADLRLIYLALAHMIKFRGHFLIEGDLNPDNSDVDKLFIQLVQTYNQLFEENPINASGVDAKAILSARLSKSRRLENLIAQLPGEKKNGLFGNLIALSLGLTPNFKSNFDLAEDAKLQLSKDTYDDDLDNLLAQIGDQYADLFLAAKNLSDAILLSDILRVNTEITKAPLSASMIKRYDEHHQDLTLLKALVRQQLPEKYKEIFFDQSKNGYAGYIDGGASQEEFYKFIKPILEKMDGTEELLVKLNREDLLRKQRTFDNGSIPHQIHLGELHAILRRQEDFYPFLKDNREKIEKILTFRIPYYVGPLARGNSRFAWMTRKSEETITPWNFEEVVDKGASAQSFIERMTNFDKNLPNEKVLPKHSLLYEYFTVYNELTKVKYVTEGMRKPAFLSGEQKKAIVDLLFKTNRKVTVKQLKEDYFKKIECFDSVEISGVEDRFNASLGTYHDLLKIIKDKDFLDNEENEDILEDIVLTLTLFEDREMIEERLKTYAHLFDDKVMKQLKRRRYTGWGRLSRKLINGIRDKQSGKTILDFLKSDGFANRNFMQLIHDDSLTFKEDIQKAQVSGQGDSLHEHIANLAGSPAIKKGILQTVKVVDELVKVMGRHKPENIVIEMARENQTTQKGQKNSRERMKRIEEGIKELGSQILKEHPVENTQLQNEKLYLYYLQNGRDMYVDQELDINRLSDYDVDHIVPQSFLKDDSIDNKVLTRSDKARGKSDNVPSEEVVKKMKNYWRQLLNAKLITQRKFDNLTKAERGGLSELDKAGFIKRQLVETRQITKHVAQILDSRMNTKYDENDKLIREVKVITLKSKLVSDFRKDFQFYKVREINNYHHAHDAYLNAVVGTALIKKYPKLESEFVYGDYKVYDVRKMIAKSEQEIGKATAKYFFYSNIMNFFKTEITLANGEIRKRPLIETNGETGEIVWDKGRDFATVRKVLSMPQVNIVKKTEVQTGGFSKESILPKRNSDKLIARKKDWDPKKYGGFDSPTVAYSVLVVAKVEKGKSKKLKSVKELLGITIMERSSFEKNPIDFLEAKGYKEVKKDLIIKLPKYSLFELENGRKRMLASAGELQKGNELALPSKYVNFLYLASHYEKLKGSPEDNEQKQLFVEQHKHYLDEIIEQISEFSKRVILADANLDKVLSAYNKHRDKPIREQAENIIHLFTLTNLGAPAAFKYFDTTIDRKRYTSTKEVLDATLIHQSITGLYETRIDLSQLGGDGGGGSGGGPAPGGTLNIEDEYRLHETSKEPDVPLGSTWLSDFPQAWAETGGMGLAVRQAPLIIPLKATSTPVSIKQYPMSQEARLGIKPHIQRLLDQGILVPCQSPWNTPLLPVKKPGTNDYRPVQDLREVNKRVEDIHPTVPNPYNLLSGLPPSHQWYTVLDLKDAFFCLRLHPTSQPLFAFEWRDPEMGISGQLTWTRLPQGFKNSPTLFNEALHRDLADFRIQHPDLILLQYVDDLLLAATSEQDCQRGTRALLQTLGNLGYRASAKKAQICQKQVKYLGYLLKEGQRWLTEARKETVMGQPTPKTPRQLREFLGKAGFCRLFIPGFAEMAAPLYPLTKPGTLFNWGPDQQKAYQEIKQALLTAPALGLPDLTKPFELFVDEKQGYAKGVLTQKLGPWRRPVAYLSKKLDPVAAGWPPCLRMVAAIAVLTKDAGKLTMGQPLVILAPHAVEALVKQPPDRWLSNARMTHYQAMLLDTDRVQFGPVVALNPATLLPLPEKEAPHDCLEILAETHGTRPDLTDQPIPDADYTWYTDGSSFLQEGQRRAGAAVTTETEVIWARALPAGTSAQRAELIALTQALKMAEGKKLNVYTDSRYAFATAHVHGEIYRRRGWLTSEGREIKNKNEILALLKALFLPKRLSIIHCPGHQKGNSAEARGNRMADQAAREAAMKAVLETSTLLAGKRTADGSEFEKRTADGSEFESPKKKAKVE

SEQ ID NO: 1086 - protein, 2091 aa, synthetic construct
MPAAKRVKLDGGDKKYSIGLDIGTNSVGWAVITDEYKVPSKKFKVLGNTDRHSIKKNLIGALLFDSGETAEATRLKRTARRRYTRRKNRICYLQEIFSNEMAKVDDSFFHRLEESFLVEEDKKHERHPIFGNIVDEVAYHEKYPTIYHLRKKLVDSTDKADLRLIYLALAHMIKFRGHFLIEGDLNPDNSDVDKLFIQLVQTYNQLFEENPINASGVDAKAILSARLSKSRRLENLIAQLPGEKKNGLFGNLIALSLGLTPNFKSNFDLAEDAKLQLSKDTYDDDLDNLLAQIGDQYADLFLAAKNLSDAILLSDILRVNTEITKAPLSASMIKRYDEHHQDLTLLKALVRQQLPEKYKEIFFDQSKNGYAGYIDGGASQEEFYKFIKPILEKMDGTEELLVKLNREDLLRKQRTFDNGSIPHQIHLGELHAILRRQEDFYPFLKDNREKIEKILTFRIPYYVGPLARGNSRFAWMTRKSEETITPWNFEEVVDKGASAQSFIERMTNFDKNLPNEKVLPKHSLLYEYFTVYNELTKVKYVTEGMRKPAFLSGEQKKAIVDLLFKTNRKVTVKQLKEDYFKKIECFDSVEISGVEDRFNASLGTYHDLLKIIKDKDFLDNEENEDILEDIVLTLTLFEDREMIEERLKTYAHLFDDKVMKQLKRRRYTGWGRLSRKLINGIRDKQSGKTILDFLKSDGFANRNFMQLIHDDSLTFKEDIQKAQVSGQGDSLHEHIANLAGSPAIKKGILQTVKVVDELVKVMGRHKPENIVIEMARENQTTQKGQKNSRERMKRIEEGIKELGSQILKEHPVENTQLQNEKLYLYYLQNGRDMYVDQELDINRLSDYDVDHIVPQSFLKDDSIDNKVLTRSDKARGKSDNVPSEEVVKKMKNYWRQLLNAKLITQRKFDNLTKAERGGLSELDKAGFIKRQLVETRQITKHVAQILDSRMNTKYDENDKLIREVKVITLKSKLVSDFRKDFQFYKVREINNYHHAHDAYLNAVVGTALIKKYPKLESEFVYGDYKVYDVRKMIAKSEQEIGKATAKYFFYSNIMNFFKTEITLANGEIRKRPLIETNGETGEIVWDKGRDFATVRKVLSMPQVNIVKKTEVQTGGFSKESILPKRNSDKLIARKKDWDPKKYGGFDSPTVAYSVLVVAKVEKGKSKKLKSVKELLGITIMERSSFEKNPIDFLEAKGYKEVKKDLIIKLPKYSLFELENGRKRMLASAGELQKGNELALPSKYVNFLYLASHYEKLKGSPEDNEQKQLFVEQHKHYLDEIIEQISEFSKRVILADANLDKVLSAYNKHRDKPIREQAENIIHLFTLTNLGAPAAFKYFDTTIDRKRYTSTKEVLDATLIHQSITGLYETRIDLSQLGGDGGGSSPAPGGTLNIEDEYRLHETSKEPDVPLGSTWLSDFPQAWAETGGMGLAVRQAPLIIPLKATSTPVSIKQYPMSQEARLGIKPHIQRLLDQGILVPCQSPWNTPLLPVKKPGTNDYRPVQDLREVNKRVEDIHPTVPNPYNLLSGLPPSHQWYTVLDLKDAFFCLRLHPTSQPLFAFEWRDPEMGISGQLTWTRLPQGFKNSPTLFNEALHRDLADFRIQHPDLILLQYVDDLLLAATSEQDCQRGTRALLQTLGNLGYRASAKKAQICQKQVKYLGYLLKEGQRWLTEARKETVMGQPTPKTPRQLREFLGKAGFCRLFIPGFAEMAAPLYPLTKPGTLFNWGPDQQKAYQEIKQALLTAPALGLPDLTKPFELFVDEKQGYAKGVLTQKLGPWRRPVAYLSKKLDPVAAGWPPCLRMVAAIAVLTKDAGKLTMGQPLVILAPHAVEALVKQPPDRWLSNARMTHYQAMLLDTDRVQFGPVVALNPATLLPLPEKEAPHDCLEILAETHGTRPDLTDQPIPDADYTWYTDGSSFLQEGQRRAGAAVTTETEVIWARALPAGTSAQRAELIALTQALKMAEGKKLNVYTDSRYAFATAHVHGEIYRRRGWLTSEGREIKNKNEILALLKALFLPKRLSIIHCPGHQKGNSAEARGNRMADQAAREAAMKAVLETSTLLAGKRTADGSEFEKRTADGSEFESPKKKAKVE

SEQ ID NO: 1087 - protein, 2094 aa, synthetic construct
MPAAKRVKLDGGDKKYSIGLDIGTNSVGWAVITDEYKVPSKKFKVLGNTDRHSIKKNLIGALLFDSGETAEATRLKRTARRRYTRRKNRICYLQEIFSNEMAKVDDSFFHRLEESFLVEEDKKHERHPIFGNIVDEVAYHEKYPTIYHLRKKLVDSTDKADLRLIYLALAHMIKFRGHFLIEGDLNPDNSDVDKLFIQLVQTYNQLFEENPINASGVDAKAILSARLSKSRRLENLIAQLPGEKKNGLFGNLIALSLGLTPNFKSNFDLAEDAKLQLSKDTYDDDLDNLLAQIGDQYADLFLAAKNLSDAILLSDILRVNTEITKAPLSASMIKRYDEHHQDLTLLKALVRQQLPEKYKEIFFDQSKNGYAGYIDGGASQEEFYKFIKPILEKMDGTEELLVKLNREDLLRKQRTFDNGSIPHQIHLGELHAILRRQEDFYPFLKDNREKIEKILTFRIPYYVGPLARGNSRFAWMTRKSEETITPWNFEEVVDKGASAQSFIERMTNFDKNLPNEKVLPKHSLLYEYFTVYNELTKVKYVTEGMRKPAFLSGEQKKAIVDLLFKTNRKVTVKQLKEDYFKKIECFDSVEISGVEDRFNASLGTYHDLLKIIKDKDFLDNEENEDILEDIVLTLTLFEDREMIEERLKTYAHLFDDKVMKQLKRRRYTGWGRLSRKLINGIRDKQSGKTILDFLKSDGFANRNFMQLIHDDSLTFKEDIQKAQVSGQGDSLHEHIANLAGSPAIKKGILQTVKVVDELVKVMGRHKPENIVIEMARENQTTQKGQKNSRERMKRIEEGIKELGSQILKEHPVENTQLQNEKLYLYYLQNGRDMYVDQELDINRLSDYDVDHIVPQSFLKDDSIDNKVLTRSDKARGKSDNVPSEEVVKKMKNYWRQLLNAKLITQRKFDNLTKAERGGLSELDKAGFIKRQLVETRQITKHVAQILDSRMNTKYDENDKLIREVKVITLKSKLVSDFRKDFQFYKVREINNYHHAHDAYLNAVVGTALIKKYPKLESEFVYGDYKVYDVRKMIAKSEQEIGKATAKYFFYSNIMNFFKTEITLANGEIRKRPLIETNGETGEIVWDKGRDFATVRKVLSMPQVNIVKKTEVQTGGFSKESILPKRNSDKLIARKKDWDPKKYGGFDSPTVAYSVLVVAKVEKGKSKKLKSVKELLGITIMERSSFEKNPIDFLEAKGYKEVKKDLIIKLPKYSLFELENGRKRMLASAGELQKGNELALPSKYVNFLYLASHYEKLKGSPEDNEQKQLFVEQHKHYLDEIIEQISEFSKRVILADANLDKVLSAYNKHRDKPIREQAENIIHLFTLTNLGAPAAFKYFDTTIDRKRYTSTKEVLDATLIHQSITGLYETRIDLSQLGGDGGGGGGSSGGSGGTLNIEDEYRLHETSKEPDVPLGSTWLSDFPQAWAETGGMGLAVRQAPLIIPLKATSTPVSIKQYPMSQEARLGIKPHIQRLLDQGILVPCQSPWNTPLLPVKKPGTNDYRPVQDLREVNKRVEDIHPTVPNPYNLLSGLPPSHQWYTVLDLKDAFFCLRLHPTSQPLFAFEWRDPEMGISGQLTWTRLPQGFKNSPTLFNEALHRDLADFRIQHPDLILLQYVDDLLLAATSEQDCQRGTRALLQTLGNLGYRASAKKAQICQKQVKYLGYLLKEGQRWLTEARKETVMGQPTPKTPRQLREFLGKAGFCRLFIPGFAEMAAPLYPLTKPGTLFNWGPDQQKAYQEIKQALLTAPALGLPDLTKPFELFVDEKQGYAKGVLTQKLGPWRRPVAYLSKKLDPVAAGWPPCLRMVAAIAVLTKDAGKLTMGQPLVILAPHAVEALVKQPPDRWLSNARMTHYQAMLLDTDRVQFGPVVALNPATLLPLPEKEAPHDCLEILAETHGTRPDLTDQPIPDADYTWYTDGSSFLQEGQRRAGAAVTTETEVIWARALPAGTSAQRAELIALTQALKMAEGKKLNVYTDSRYAFATAHVHGEIYRRRGWLTSEGREIKNKNEILALLKALFLPKRLSIIHCPGHQKGNSAEARGNRMADQAAREAAMKAVLETSTLLAGKRTADGSEFEKRTADGSEFESPKKKAKVE

SEQ ID NO: 1088 - protein, 2096 aa, synthetic construct
MPAAKRVKLDGGDKKYSIGLDIGTNSVGWAVITDEYKVPSKKFKVLGNTDRHSIKKNLIGALLFDSGETAEATRLKRTARRRYTRRKNRICYLQEIFSNEMAKVDDSFFHRLEESFLVEEDKKHERHPIFGNIVDEVAYHEKYPTIYHLRKKLVDSTDKADLRLIYLALAHMIKFRGHFLIEGDLNPDNSDVDKLFIQLVQTYNQLFEENPINASGVDAKAILSARLSKSRRLENLIAQLPGEKKNGLFGNLIALSLGLTPNFKSNFDLAEDAKLQLSKDTYDDDLDNLLAQIGDQYADLFLAAKNLSDAILLSDILRVNTEITKAPLSASMIKRYDEHHQDLTLLKALVRQQLPEKYKEIFFDQSKNGYAGYIDGGASQEEFYKFIKPILEKMDGTEELLVKLNREDLLRKQRTFDNGSIPHQIHLGELHAILRRQEDFYPFLKDNREKIEKILTFRIPYYVGPLARGNSRFAWMTRKSEETITPWNFEEVVDKGASAQSFIERMTNFDKNLPNEKVLPKHSLLYEYFTVYNELTKVKYVTEGMRKPAFLSGEQKKAIVDLLFKTNRKVTVKQLKEDYFKKIECFDSVEISGVEDRFNASLGTYHDLLKIIKDKDFLDNEENEDILEDIVLTLTLFEDREMIEERLKTYAHLFDDKVMKQLKRRRYTGWGRLSRKLINGIRDKQSGKTILDFLKSDGFANRNFMQLIHDDSLTFKEDIQKAQVSGQGDSLHEHIANLAGSPAIKKGILQTVKVVDELVKVMGRHKPENIVIEMARENQTTQKGQKNSRERMKRIEEGIKELGSQILKEHPVENTQLQNEKLYLYYLQNGRDMYVDQELDINRLSDYDVDHIVPQSFLKDDSIDNKVLTRSDKARGKSDNVPSEEVVKKMKNYWRQLLNAKLITQRKFDNLTKAERGGLSELDKAGFIKRQLVETRQITKHVAQILDSRMNTKYDENDKLIREVKVITLKSKLVSDFRKDFQFYKVREINNYHHAHDAYLNAVVGTALIKKYPKLESEFVYGDYKVYDVRKMIAKSEQEIGKATAKYFFYSNIMNFFKTEITLANGEIRKRPLIETNGETGEIVWDKGRDFATVRKVLSMPQVNIVKKTEVQTGGFSKESILPKRNSDKLIARKKDWDPKKYGGFDSPTVAYSVLVVAKVEKGKSKKLKSVKELLGITIMERSSFEKNPIDFLEAKGYKEVKKDLIIKLPKYSLFELENGRKRMLASAGELQKGNELALPSKYVNFLYLASHYEKLKGSPEDNEQKQLFVEQHKHYLDEIIEQISEFSKRVILADANLDKVLSAYNKHRDKPIREQAENIIHLFTLTNLGAPAAFKYFDTTIDRKRYTSTKEVLDATLIHQSITGLYETRIDLSQLGGDGGGGGEAAAKGSSGGTLNIEDEYRLHETSKEPDVPLGSTWLSDFPQAWAETGGMGLAVRQAPLIIPLKATSTPVSIKQYPMSQEARLGIKPHIQRLLDQGILVPCQSPWNTPLLPVKKPGTNDYRPVQDLREVNKRVEDIHPTVPNPYNLLSGLPPSHQWYTVLDLKDAFFCLRLHPTSQPLFAFEWRDPEMGISGQLTWTRLPQGFKNSPTLFNEALHRDLADFRIQHPDLILLQYVDDLLLAATSEQDCQRGTRALLQTLGNLGYRASAKKAQICQKQVKYLGYLLKEGQRWLTEARKETVMGQPTPKTPRQLREFLGKAGFCRLFIPGFAEMAAPLYPLTKPGTLFNWGPDQQKAYQEIKQALLTAPALGLPDLTKPFELFVDEKQGYAKGVLTQKLGPWRRPVAYLSKKLDPVAAGWPPCLRMVAAIAVLTKDAGKLTMGQPLVILAPHAVEALVKQPPDRWLSNARMTHYQAMLLDTDRVQFGPVVALNPATLLPLPEKEAPHDCLEILAETHGTRPDLTDQPIPDADYTWYTDGSSFLQEGQRRAGAAVTTETEVIWARALPAGTSAQRAELIALTQALKMAEGKKLNVYTDSRYAFATAHVHGEIYRRRGWLTSEGREIKNKNEILALLKALFLPKRLSIIHCPGHQKGNSAEARGNRMADQAAREAAMKAVLETSTLLAGKRTADGSEFEKRTADGSEFESPKKKAKVE

SEQ ID NO: 1089 - protein, 2094 aa, synthetic construct
MPAAKRVKLDGGDKKYSIGLDIGTNSVGWAVITDEYKVPSKKFKVLGNTDRHSIKKNLIGALLFDSGETAEATRLKRTARRRYTRRKNRICYLQEIFSNEMAKVDDSFFHRLEESFLVEEDKKHERHPIFGNIVDEVAYHEKYPTIYHLRKKLVDSTDKADLRLIYLALAHMIKFRGHFLIEGDLNPDNSDVDKLFIQLVQTYNQLFEENPINASGVDAKAILSARLSKSRRLENLIAQLPGEKKNGLFGNLIALSLGLTPNFKSNFDLAEDAKLQLSKDTYDDDLDNLLAQIGDQYADLFLAAKNLSDAILLSDILRVNTEITKAPLSASMIKRYDEHHQDLTLLKALVRQQLPEKYKEIFFDQSKNGYAGYIDGGASQEEFYKFIKPILEKMDGTEELLVKLNREDLLRKQRTFDNGSIPHQIHLGELHAILRRQEDFYPFLKDNREKIEKILTFRIPYYVGPLARGNSRFAWMTRKSEETITPWNFEEVVDKGASAQSFIERMTNFDKNLPNEKVLPKHSLLYEYFTVYNELTKVKYVTEGMRKPAFLSGEQKKAIVDLLFKTNRKVTVKQLKEDYFKKIECFDSVEISGVEDRFNASLGTYHDLLKIIKDKDFLDNEENEDILEDIVLTLTLFEDREMIEERLKTYAHLFDDKVMKQLKRRRYTGWGRLSRKLINGIRDKQSGKTILDFLKSDGFANRNFMQLIHDDSLTFKEDIQKAQVSGQGDSLHEHIANLAGSPAIKKGILQTVKVVDELVKVMGRHKPENIVIEMARENQTTQKGQKNSRERMKRIEEGIKELGSQILKEHPVENTQLQNEKLYLYYLQNGRDMYVDQELDINRLSDYDVDHIVPQSFLKDDSIDNKVLTRSDKARGKSDNVPSEEVVKKMKNYWRQLLNAKLITQRKFDNLTKAERGGLSELDKAGFIKRQLVETRQITKHVAQILDSRMNTKYDENDKLIREVKVITLKSKLVSDFRKDFQFYKVREINNYHHAHDAYLNAVVGTALIKKYPKLESEFVYGDYKVYDVRKMIAKSEQEIGKATAKYFFYSNIMNFFKTEITLANGEIRKRPLIETNGETGEIVWDKGRDFATVRKVLSMPQVNIVKKTEVQTGGFSKESILPKRNSDKLIARKKDWDPKKYGGFDSPTVAYSVLVVAKVEKGKSKKLKSVKELLGITIMERSSFEKNPIDFLEAKGYKEVKKDLIIKLPKYSLFELENGRKRMLASAGELQKGNELALPSKYVNFLYLASHYEKLKGSPEDNEQKQLFVEQHKHYLDEIIEQISEFSKRVILADANLDKVLSAYNKHRDKPIREQAENIIHLFTLTNLGAPAAFKYFDTTIDRKRYTSTKEVLDATLIHQSITGLYETRIDLSQLGGDGGGSSGSSGSSGGTLNIEDEYRLHETSKEPDVPLGSTWLSDFPQAWAETGGMGLAVRQAPLIIPLKATSTPVSIKQYPMSQEARLGIKPHIQRLLDQGILVPCQSPWNTPLLPVKKPGTNDYRPVQDLREVNKRVEDIHPTVPNPYNLLSGLPPSHQWYTVLDLKDAFFCLRLHPTSQPLFAFEWRDPEMGISGQLTWTRLPQGFKNSPTLFNEALHRDLADFRIQHPDLILLQYVDDLLLAATSEQDCQRGTRALLQTLGNLGYRASAKKAQICQKQVKYLGYLLKEGQRWLTEARKETVMGQPTPKTPRQLREFLGKAGFCRLFIPGFAEMAAPLYPLTKPGTLFNWGPDQQKAYQEIKQALLTAPALGLPDLTKPFELFVDEKQGYAKGVLTQKLGPWRRPVAYLSKKLDPVAAGWPPCLRMVAAIAVLTKDAGKLTMGQPLVILAPHAVEALVKQPPDRWLSNARMTHYQAMLLDTDRVQFGPVVALNPATLLPLPEKEAPHDCLEILAETHGTRPDLTDQPIPDADYTWYTDGSSFLQEGQRRAGAAVTTETEVIWARALPAGTSAQRAELIALTQALKMAEGKKLNVYTDSRYAFATAHVHGEIYRRRGWLTSEGREIKNKNEILALLKALFLPKRLSIIHCPGHQKGNSAEARGNRMADQAAREAAMKAVLETSTLLAGKRTADGSEFEKRTADGSEFESPKKKAKVE

SEQ ID NO: 1090 - protein, 2096 aa, synthetic construct
MPAAKRVKLDGGDKKYSIGLDIGTNSVGWAVITDEYKVPSKKFKVLGNTDRHSIKKNLIGALLFDSGETAEATRLKRTARRRYTRRKNRICYLQEIFSNEMAKVDDSFFHRLEESFLVEEDKKHERHPIFGNIVDEVAYHEKYPTIYHLRKKLVDSTDKADLRLIYLALAHMIKFRGHFLIEGDLNPDNSDVDKLFIQLVQTYNQLFEENPINASGVDAKAILSARLSKSRRLENLIAQLPGEKKNGLFGNLIALSLGLTPNFKSNFDLAEDAKLQLSKDTYDDDLDNLLAQIGDQYADLFLAAKNLSDAILLSDILRVNTEITKAPLSASMIKRYDEHHQDLTLLKALVRQQLPEKYKEIFFDQSKNGYAGYIDGGASQEEFYKFIKPILEKMDGTEELLVKLNREDLLRKQRTFDNGSIPHQIHLGELHAILRRQEDFYPFLKDNREKIEKILTFRIPYYVGPLARGNSRFAWMTRKSEETITPWNFEEVVDKGASAQSFIERMTNFDKNLPNEKVLPKHSLLYEYFTVYNELTKVKYVTEGMRKPAFLSGEQKKAIVDLLFKTNRKVTVKQLKEDYFKKIECFDSVEISGVEDRFNASLGTYHDLLKIIKDKDFLDNEENEDILEDIVLTLTLFEDREMIEERLKTYAHLFDDKVMKQLKRRRYTGWGRLSRKLINGIRDKQSGKTILDFLKSDGFANRNFMQLIHDDSLTFKEDIQKAQVSGQGDSLHEHIANLAGSPAIKKGILQTVKVVDELVKVMGRHKPENIVIEMARENQTTQKGQKNSRERMKRIEEGIKELGSQILKEHPVENTQLQNEKLYLYYLQNGRDMYVDQELDINRLSDYDVDHIVPQSFLKDDSIDNKVLTRSDKARGKSDNVPSEEVVKKMKNYWRQLLNAKLITQRKFDNLTKAERGGLSELDKAGFIKRQLVETRQITKHVAQILDSRMNTKYDENDKLIREVKVITLKSKLVSDFRKDFQFYKVREINNYHHAHDAYLNAVVGTALIKKYPKLESEFVYGDYKVYDVRKMIAKSEQEIGKATAKYFFYSNIMNFFKTEITLANGEIRKRPLIETNGETGEIVWDKGRDFATVRKVLSMPQVNIVKKTEVQTGGFSKESILPKRNSDKLIARKKDWDPKKYGGFDSPTVAYSVLVVAKVEKGKSKKLKSVKELLGITIMERSSFEKNPIDFLEAKGYKEVKKDLIIKLPKYSLFELENGRKRMLASAGELQKGNELALPSKYVNFLYLASHYEKLKGSPEDNEQKQLFVEQHKHYLDEIIEQISEFSKRVILADANLDKVLSAYNKHRDKPIREQAENIIHLFTLTNLGAPAAFKYFDTTIDRKRYTSTKEVLDATLIHQSITGLYETRIDLSQLGGDGGGGSPAPEAAAKGGTLNIEDEYRLHETSKEPDVPLGSTWLSDFPQAWAETGGMGLAVRQAPLIIPLKATSTPVSIKQYPMSQEARLGIKPHIQRLLDQGILVPCQSPWNTPLLPVKKPGTNDYRPVQDLREVNKRVEDIHPTVPNPYNLLSGLPPSHQWYTVLDLKDAFFCLRLHPTSQPLFAFEWRDPEMGISGQLTWTRLPQGFKNSPTLFNEALHRDLADFRIQHPDLILLQYVDDLLLAATSEQDCQRGTRALLQTLGNLGYRASAKKAQICQKQVKYLGYLLKEGQRWLTEARKETVMGQPTPKTPRQLREFLGKAGFCRLFIPGFAEMAAPLYPLTKPGTLFNWGPDQQKAYQEIKQALLTAPALGLPDLTKPFELFVDEKQGYAKGVLTQKLGPWRRPVAYLSKKLDPVAAGWPPCLRMVAAIAVLTKDAGKLTMGQPLVILAPHAVEALVKQPPDRWLSNARMTHYQAMLLDTDRVQFGPVVALNPATLLPLPEKEAPHDCLEILAETHGTRPDLTDQPIPDADYTWYTDGSSFLQEGQRRAGAAVTTETEVIWARALPAGTSAQRAELIALTQALKMAEGKKLNVYTDSRYAFATAHVHGEIYRRRGWLTSEGREIKNKNEILALLKALFLPKRLSIIHCPGHQKGNSAEARGNRMADQAAREAAMKAVLETSTLLAGKRTADGSEFEKRTADGSEFESPKKKAKVE

SEQ ID NO: 1091 - protein, 2096 aa, synthetic construct
MPAAKRVKLDGGDKKYSIGLDIGTNSVGWAVITDEYKVPSKKFKVLGNTDRHSIKKNLIGALLFDSGETAEATRLKRTARRRYTRRKNRICYLQEIFSNEMAKVDDSFFHRLEESFLVEEDKKHERHPIFGNIVDEVAYHEKYPTIYHLRKKLVDSTDKADLRLIYLALAHMIKFRGHFLIEGDLNPDNSDVDKLFIQLVQTYNQLFEENPINASGVDAKAILSARLSKSRRLENLIAQLPGEKKNGLFGNLIALSLGLTPNFKSNFDLAEDAKLQLSKDTYDDDLDNLLAQIGDQYADLFLAAKNLSDAILLSDILRVNTEITKAPLSASMIKRYDEHHQDLTLLKALVRQQLPEKYKEIFFDQSKNGYAGYIDGGASQEEFYKFIKPILEKMDGTEELLVKLNREDLLRKQRTFDNGSIPHQIHLGELHAILRRQEDFYPFLKDNREKIEKILTFRIPYYVGPLARGNSRFAWMTRKSEETITPWNFEEVVDKGASAQSFIERMTNFDKNLPNEKVLPKHSLLYEYFTVYNELTKVKYVTEGMRKPAFLSGEQKKAIVDLLFKTNRKVTVKQLKEDYFKKIECFDSVEISGVEDRFNASLGTYHDLLKIIKDKDFLDNEENEDILEDIVLTLTLFEDREMIEERLKTYAHLFDDKVMKQLKRRRYTGWGRLSRKLINGIRDKQSGKTILDFLKSDGFANRNFMQLIHDDSLTFKEDIQKAQVSGQGDSLHEHIANLAGSPAIKKGILQTVKVVDELVKVMGRHKPENIVIEMARENQTTQKGQKNSRERMKRIEEGIKELGSQILKEHPVENTQLQNEKLYLYYLQNGRDMYVDQELDINRLSDYDVDHIVPQSFLKDDSIDNKVLTRSDKARGKSDNVPSEEVVKKMKNYWRQLLNAKLITQRKFDNLTKAERGGLSELDKAGFIKRQLVETRQITKHVAQILDSRMNTKYDENDKLIREVKVITLKSKLVSDFRKDFQFYKVREINNYHHAHDAYLNAVVGTALIKKYPKLESEFVYGDYKVYDVRKMIAKSEQEIGKATAKYFFYSNIMNFFKTEITLANGEIRKRPLIETNGETGEIVWDKGRDFATVRKVLSMPQVNIVKKTEVQTGGFSKESILPKRNSDKLIARKKDWDPKKYGGFDSPTVAYSVLVVAKVEKGKSKKLKSVKELLGITIMERSSFEKNPIDFLEAKGYKEVKKDLIIKLPKYSLFELENGRKRMLASAGELQKGNELALPSKYVNFLYLASHYEKLKGSPEDNEQKQLFVEQHKHYLDEIIEQISEFSKRVILADANLDKVLSAYNKHRDKPIREQAENIIHLFTLTNLGAPAAFKYFDTTIDRKRYTSTKEVLDATLIHQSITGLYETRIDLSQLGGDGGEAAAKGGGGGSGGTLNIEDEYRLHETSKEPDVPLGSTWLSDFPQAWAETGGMGLAVRQAPLIIPLKATSTPVSIKQYPMSQEARLGIKPHIQRLLDQGILVPCQSPWNTPLLPVKKPGTNDYRPVQDLREVNKRVEDIHPTVPNPYNLLSGLPPSHQWYTVLDLKDAFFCLRLHPTSQPLFAFEWRDPEMGISGQLTWTRLPQGFKNSPTLFNEALHRDLADFRIQHPDLILLQYVDDLLLAATSEQDCQRGTRALLQTLGNLGYRASAKKAQICQKQVKYLGYLLKEGQRWLTEARKETVMGQPTPKTPRQLREFLGKAGFCRLFIPGFAEMAAPLYPLTKPGTLFNWGPDQQKAYQEIKQALLTAPALGLPDLTKPFELFVDEKQGYAKGVLTQKLGPWRRPVAYLSKKLDPVAAGWPPCLRMVAAIAVLTKDAGKLTMGQPLVILAPHAVEALVKQPPDRWLSNARMTHYQAMLLDTDRVQFGPVVALNPATLLPLPEKEAPHDCLEILAETHGTRPDLTDQPIPDADYTWYTDGSSFLQEGQRRAGAAVTTETEVIWARALPAGTSAQRAELIALTQALKMAEGKKLNVYTDSRYAFATAHVHGEIYRRRGWLTSEGREIKNKNEILALLKALFLPKRLSIIHCPGHQKGNSAEARGNRMADQAAREAAMKAVLETSTLLAGKRTADGSEFEKRTADGSEFESPKKKAKVE

SEQ ID NO: 1092 - protein, 2109 aa, synthetic construct
MPAAKRVKLDGGDKKYSIGLDIGTNSVGWAVITDEYKVPSKKFKVLGNTDRHSIKKNLIGALLFDSGETAEATRLKRTARRRYTRRKNRICYLQEIFSNEMAKVDDSFFHRLEESFLVEEDKKHERHPIFGNIVDEVAYHEKYPTIYHLRKKLVDSTDKADLRLIYLALAHMIKFRGHFLIEGDLNPDNSDVDKLFIQLVQTYNQLFEENPINASGVDAKAILSARLSKSRRLENLIAQLPGEKKNGLFGNLIALSLGLTPNFKSNFDLAEDAKLQLSKDTYDDDLDNLLAQIGDQYADLFLAAKNLSDAILLSDILRVNTEITKAPLSASMIKRYDEHHQDLTLLKALVRQQLPEKYKEIFFDQSKNGYAGYIDGGASQEEFYKFIKPILEKMDGTEELLVKLNREDLLRKQRTFDNGSIPHQIHLGELHAILRRQEDFYPFLKDNREKIEKILTFRIPYYVGPLARGNSRFAWMTRKSEETITPWNFEEVVDKGASAQSFIERMTNFDKNLPNEKVLPKHSLLYEYFTVYNELTKVKYVTEGMRKPAFLSGEQKKAIVDLLFKTNRKVTVKQLKEDYFKKIECFDSVEISGVEDRFNASLGTYHDLLKIIKDKDFLDNEENEDILEDIVLTLTLFEDREMIEERLKTYAHLFDDKVMKQLKRRRYTGWGRLSRKLINGIRDKQSGKTILDFLKSDGFANRNFMQLIHDDSLTFKEDIQKAQVSGQGDSLHEHIANLAGSPAIKKGILQTVKVVDELVKVMGRHKPENIVIEMARENQTTQKGQKNSRERMKRIEEGIKELGSQILKEHPVENTQLQNEKLYLYYLQNGRDMYVDQELDINRLSDYDVDHIVPQSFLKDDSIDNKVLTRSDKARGKSDNVPSEEVVKKMKNYWRQLLNAKLITQRKFDNLTKAERGGLSELDKAGFIKRQLVETRQITKHVAQILDSRMNTKYDENDKLIREVKVITLKSKLVSDFRKDFQFYKVREINNYHHAHDAYLNAVVGTALIKKYPKLESEFVYGDYKVYDVRKMIAKSEQEIGKATAKYFFYSNIMNFFKTEITLANGEIRKRPLIETNGETGEIVWDKGRDFATVRKVLSMPQVNIVKKTEVQTGGFSKESILPKRNSDKLIARKKDWDPKKYGGFDSPTVAYSVLVVAKVEKGKSKKLKSVKELLGITIMERSSFEKNPIDFLEAKGYKEVKKDLIIKLPKYSLFELENGRKRMLASAGELQKGNELALPSKYVNFLYLASHYEKLKGSPEDNEQKQLFVEQHKHYLDEIIEQISEFSKRVILADANLDKVLSAYNKHRDKPIREQAENIIHLFTLTNLGAPAAFKYFDTTIDRKRYTSTKEVLDATLIHQSITGLYETRIDLSQLGGDGGSGGSSGGSSGSETPGTSESATPESSGGSSGGSSGGVPWILKKPLELTIKLDLEEQQGTLLNNSILSKKGKEELKQLFEKYSALWQSWENQVGHRRIRPHKIATGTVKPTPQKQYHINPKAKPDIQIVINDLLKQGVLIQKESTMNTPVYPVPKPNGRWRMVLDYRAVNKVTPLIAVQNQHSYGILGSLFKGRYKTTIDLSNGFWAHPIVPEDYWITAFTWQGKQYCWTVLPQGFLNSPGLFNGDVVDLLQGIPNVEVYVDDVYISHDSEKEHLEYLDILFNRLKEAGYIISLKKSNIANSIVDFLGFQITNEGRGLTDTFKEKLENITAPTTLKQLQSILGLLNFARNFIPDFTELIAPLYALIPKSPKNYVPWQIEHSTTLETLITKLNGAEYLQGRKGDKTLIMKVNASYTTGYIRYYNEGEKKPISYVSIVFSKTELKFTELEKLLTTVHKGLLKALDLSMGQNIHVYSPIVSMQNIQKTPQTAKKALASRWLSWLSYLEDPRIRFFYDPQMPALKDLPAVDTGKDNKKHPSNFQHIFYTDGSAITSPTKEGHLNAGMGIVYFINKDGNLQKQQEWSISLGNHTAQFAEIAAFEFALKKCLPLGGNILVVTDSNYVAKAYNEELDVWASNGFVNNRKKPLKHISKWKSVADLKRLRPDVVVTHEPGHQKLDSSPHAYGNNLADQLATQASFKVHAGKRTADGSEFEKRTADGSEFESPKKKAKVE

SEQ ID NO: 1093 - protein, 2122 aa, synthetic construct
MPAAKRVKLDGGDKKYSIGLDIGTNSVGWAVITDEYKVPSKKFKVLGNTDRHSIKKNLIGALLFDSGETAEATRLKRTARRRYTRRKNRICYLQEIFSNEMAKVDDSFFHRLEESFLVEEDKKHERHPIFGNIVDEVAYHEKYPTIYHLRKKLVDSTDKADLRLIYLALAHMIKFRGHFLIEGDLNPDNSDVDKLFIQLVQTYNQLFEENPINASGVDAKAILSARLSKSRRLENLIAQLPGEKKNGLFGNLIALSLGLTPNFKSNFDLAEDAKLQLSKDTYDDDLDNLLAQIGDQYADLFLAAKNLSDAILLSDILRVNTEITKAPLSASMIKRYDEHHQDLTLLKALVRQQLPEKYKEIFFDQSKNGYAGYIDGGASQEEFYKFIKPILEKMDGTEELLVKLNREDLLRKQRTFDNGSIPHQIHLGELHAILRRQEDFYPFLKDNREKIEKILTFRIPYYVGPLARGNSRFAWMTRKSEETITPWNFEEVVDKGASAQSFIERMTNFDKNLPNEKVLPKHSLLYEYFTVYNELTKVKYVTEGMRKPAFLSGEQKKAIVDLLFKTNRKVTVKQLKEDYFKKIECFDSVEISGVEDRFNASLGTYHDLLKIIKDKDFLDNEENEDILEDIVLTLTLFEDREMIEERLKTYAHLFDDKVMKQLKRRRYTGWGRLSRKLINGIRDKQSGKTILDFLKSDGFANRNFMQLIHDDSLTFKEDIQKAQVSGQGDSLHEHIANLAGSPAIKKGILQTVKVVDELVKVMGRHKPENIVIEMARENQTTQKGQKNSRERMKRIEEGIKELGSQILKEHPVENTQLQNEKLYLYYLQNGRDMYVDQELDINRLSDYDVDHIVPQSFLKDDSIDNKVLTRSDKARGKSDNVPSEEVVKKMKNYWRQLLNAKLITQRKFDNLTKAERGGLSELDKAGFIKRQLVETRQITKHVAQILDSRMNTKYDENDKLIREVKVITLKSKLVSDFRKDFQFYKVREINNYHHAHDAYLNAVVGTALIKKYPKLESEFVYGDYKVYDVRKMIAKSEQEIGKATAKYFFYSNIMNFFKTEITLANGEIRKRPLIETNGETGEIVWDKGRDFATVRKVLSMPQVNIVKKTEVQTGGFSKESILPKRNSDKLIARKKDWDPKKYGGFDSPTVAYSVLVVAKVEKGKSKKLKSVKELLGITIMERSSFEKNPIDFLEAKGYKEVKKDLIIKLPKYSLFELENGRKRMLASAGELQKGNELALPSKYVNFLYLASHYEKLKGSPEDNEQKQLFVEQHKHYLDEIIEQISEFSKRVILADANLDKVLSAYNKHRDKPIREQAENIIHLFTLTNLGAPAAFKYFDTTIDRKRYTSTKEVLDATLIHQSITGLYETRIDLSQLGGDGGAEAAAKEAAAKEAAAKEAAAKALEAEAAAKEAAAKEAAAKEAAAKAGGVPWILKKPLELTIKLDLEEQQGTLLNNSILSKKGKEELKQLFEKYSALWQSWENQVGHRRIRPHKIATGTVKPTPQKQYHINPKAKPDIQIVINDLLKQGVLIQKESTMNTPVYPVPKPNGRWRMVLDYRAVNKVTPLIAVQNQHSYGILGSLFKGRYKTTIDLSNGFWAHPIVPEDYWITAFTWQGKQYCWTVLPQGFLNSPGLFNGDVVDLLQGIPNVEVYVDDVYISHDSEKEHLEYLDILFNRLKEAGYIISLKKSNIANSIVDFLGFQITNEGRGLTDTFKEKLENITAPTTLKQLQSILGLLNFARNFIPDFTELIAPLYALIPKSPKNYVPWQIEHSTTLETLITKLNGAEYLQGRKGDKTLIMKVNASYTTGYIRYYNEGEKKPISYVSIVFSKTELKFTELEKLLTTVHKGLLKALDLSMGQNIHVYSPIVSMQNIQKTPQTAKKALASRWLSWLSYLEDPRIRFFYDPQMPALKDLPAVDTGKDNKKHPSNFQHIFYTDGSAITSPTKEGHLNAGMGIVYFINKDGNLQKQQEWSISLGNHTAQFAEIAAFEFALKKCLPLGGNILVVTDSNYVAKAYNEELDVWASNGFVNNRKKPLKHISKWKSVADLKRLRPDVVVTHEPGHQKLDSSPHAYGNNLADQLATQASFKVHAGKRTADGSEFEKRTADGSEFESPKKKAKVE

SEQ ID NO: 1094 - protein, 2106 aa, synthetic construct
MPAAKRVKLDGGDKKYSIGLDIGTNSVGWAVITDEYKVPSKKFKVLGNTDRHSIKKNLIGALLFDSGETAEATRLKRTARRRYTRRKNRICYLQEIFSNEMAKVDDSFFHRLEESFLVEEDKKHERHPIFGNIVDEVAYHEKYPTIYHLRKKLVDSTDKADLRLIYLALAHMIKFRGHFLIEGDLNPDNSDVDKLFIQLVQTYNQLFEENPINASGVDAKAILSARLSKSRRLENLIAQLPGEKKNGLFGNLIALSLGLTPNFKSNFDLAEDAKLQLSKDTYDDDLDNLLAQIGDQYADLFLAAKNLSDAILLSDILRVNTEITKAPLSASMIKRYDEHHQDLTLLKALVRQQLPEKYKEIFFDQSKNGYAGYIDGGASQEEFYKFIKPILEKMDGTEELLVKLNREDLLRKQRTFDNGSIPHQIHLGELHAILRRQEDFYPFLKDNREKIEKILTFRIPYYVGPLARGNSRFAWMTRKSEETITPWNFEEVVDKGASAQSFIERMTNFDKNLPNEKVLPKHSLLYEYFTVYNELTKVKYVTEGMRKPAFLSGEQKKAIVDLLFKTNRKVTVKQLKEDYFKKIECFDSVEISGVEDRFNASLGTYHDLLKIIKDKDFLDNEENEDILEDIVLTLTLFEDREMIEERLKTYAHLFDDKVMKQLKRRRYTGWGRLSRKLINGIRDKQSGKTILDFLKSDGFANRNFMQLIHDDSLTFKEDIQKAQVSGQGDSLHEHIANLAGSPAIKKGILQTVKVVDELVKVMGRHKPENIVIEMARENQTTQKGQKNSRERMKRIEEGIKELGSQILKEHPVENTQLQNEKLYLYYLQNGRDMYVDQELDINRLSDYDVDHIVPQSFLKDDSIDNKVLTRSDKARGKSDNVPSEEVVKKMKNYWRQLLNAKLITQRKFDNLTKAERGGLSELDKAGFIKRQLVETRQITKHVAQILDSRMNTKYDENDKLIREVKVITLKSKLVSDFRKDFQFYKVREINNYHHAHDAYLNAVVGTALIKKYPKLESEFVYGDYKVYDVRKMIAKSEQEIGKATAKYFFYSNIMNFFKTEITLANGEIRKRPLIETNGETGEIVWDKGRDFATVRKVLSMPQVNIVKKTEVQTGGFSKESILPKRNSDKLIARKKDWDPKKYGGFDSPTVAYSVLVVAKVEKGKSKKLKSVKELLGITIMERSSFEKNPIDFLEAKGYKEVKKDLIIKLPKYSLFELENGRKRMLASAGELQKGNELALPSKYVNFLYLASHYEKLKGSPEDNEQKQLFVEQHKHYLDEIIEQISEFSKRVILADANLDKVLSAYNKHRDKPIREQAENIIHLFTLTNLGAPAAFKYFDTTIDRKRYTSTKEVLDATLIHQSITGLYETRIDLSQLGGDGGEAAAKEAAAKEAAAKEAAAKEAAAKEAAAKGGVPWILKKPLELTIKLDLEEQQGTLLNNSILSKKGKEELKQLFEKYSALWQSWENQVGHRRIRPHKIATGTVKPTPQKQYHINPKAKPDIQIVINDLLKQGVLIQKESTMNTPVYPVPKPNGRWRMVLDYRAVNKVTPLIAVQNQHSYGILGSLFKGRYKTTIDLSNGFWAHPIVPEDYWITAFTWQGKQYCWTVLPQGFLNSPGLFNGDVVDLLQGIPNVEVYVDDVYISHDSEKEHLEYLDILFNRLKEAGYIISLKKSNIANSIVDFLGFQITNEGRGLTDTFKEKLENITAPTTLKQLQSILGLLNFARNFIPDFTELIAPLYALIPKSPKNYVPWQIEHSTTLETLITKLNGAEYLQGRKGDKTLIMKVNASYTTGYIRYYNEGEKKPISYVSIVFSKTELKFTELEKLLTTVHKGLLKALDLSMGQNIHVYSPIVSMQNIQKTPQTAKKALASRWLSWLSYLEDPRIRFFYDPQMPALKDLPAVDTGKDNKKHPSNFQHIFYTDGSAITSPTKEGHLNAGMGIVYFINKDGNLQKQQEWSISLGNHTAQFAEIAAFEFALKKCLPLGGNILVVTDSNYVAKAYNEELDVWASNGFVNNRKKPLKHISKWKSVADLKRLRPDVVVTHEPGHQKLDSSPHAYGNNLADQLATQASFKVHAGKRTADGSEFEKRTADGSEFESPKKKAKVE

SEQ ID NO: 1095 - protein, 2094 aa, synthetic construct
MPAAKRVKLDGGDKKYSIGLDIGTNSVGWAVITDEYKVPSKKFKVLGNTDRHSIKKNLIGALLFDSGETAEATRLKRTARRRYTRRKNRICYLQEIFSNEMAKVDDSFFHRLEESFLVEEDKKHERHPIFGNIVDEVAYHEKYPTIYHLRKKLVDSTDKADLRLIYLALAHMIKFRGHFLIEGDLNPDNSDVDKLFIQLVQTYNQLFEENPINASGVDAKAILSARLSKSRRLENLIAQLPGEKKNGLFGNLIALSLGLTPNFKSNFDLAEDAKLQLSKDTYDDDLDNLLAQIGDQYADLFLAAKNLSDAILLSDILRVNTEITKAPLSASMIKRYDEHHQDLTLLKALVRQQLPEKYKEIFFDQSKNGYAGYIDGGASQEEFYKFIKPILEKMDGTEELLVKLNREDLLRKQRTFDNGSIPHQIHLGELHAILRRQEDFYPFLKDNREKIEKILTFRIPYYVGPLARGNSRFAWMTRKSEETITPWNFEEVVDKGASAQSFIERMTNFDKNLPNEKVLPKHSLLYEYFTVYNELTKVKYVTEGMRKPAFLSGEQKKAIVDLLFKTNRKVTVKQLKEDYFKKIECFDSVEISGVEDRFNASLGTYHDLLKIIKDKDFLDNEENEDILEDIVLTLTLFEDREMIEERLKTYAHLFDDKVMKQLKRRRYTGWGRLSRKLINGIRDKQSGKTILDFLKSDGFANRNFMQLIHDDSLTFKEDIQKAQVSGQGDSLHEHIANLAGSPAIKKGILQTVKVVDELVKVMGRHKPENIVIEMARENQTTQKGQKNSRERMKRIEEGIKELGSQILKEHPVENTQLQNEKLYLYYLQNGRDMYVDQELDINRLSDYDVDHIVPQSFLKDDSIDNKVLTRSDKARGKSDNVPSEEVVKKMKNYWRQLLNAKLITQRKFDNLTKAERGGLSELDKAGFIKRQLVETRQITKHVAQILDSRMNTKYDENDKLIREVKVITLKSKLVSDFRKDFQFYKVREINNYHHAHDAYLNAVVGTALIKKYPKLESEFVYGDYKVYDVRKMIAKSEQEIGKATAKYFFYSNIMNFFKTEITLANGEIRKRPLIETNGETGEIVWDKGRDFATVRKVLSMPQVNIVKKTEVQTGGFSKESILPKRNSDKLIARKKDWDPKKYGGFDSPTVAYSVLVVAKVEKGKSKKLKSVKELLGITIMERSSFEKNPIDFLEAKGYKEVKKDLIIKLPKYSLFELENGRKRMLASAGELQKGNELALPSKYVNFLYLASHYEKLKGSPEDNEQKQLFVEQHKHYLDEIIEQISEFSKRVILADANLDKVLSAYNKHRDKPIREQAENIIHLFTLTNLGAPAAFKYFDTTIDRKRYTSTKEVLDATLIHQSITGLYETRIDLSQLGGDGGGSSGSSGSSGSSGSSGSSGGVPWILKKPLELTIKLDLEEQQGTLLNNSILSKKGKEELKQLFEKYSALWQSWENQVGHRRIRPHKIATGTVKPTPQKQYHINPKAKPDIQIVINDLLKQGVLIQKESTMNTPVYPVPKPNGRWRMVLDYRAVNKVTPLIAVQNQHSYGILGSLFKGRYKTTIDLSNGFWAHPIVPEDYWITAFTWQGKQYCWTVLPQGFLNSPGLFNGDVVDLLQGIPNVEVYVDDVYISHDSEKEHLEYLDILFNRLKEAGYIISLKKSNIANSIVDFLGFQITNEGRGLTDTFKEKLENITAPTTLKQLQSILGLLNFARNFIPDFTELIAPLYALIPKSPKNYVPWQIEHSTTLETLITKLNGAEYLQGRKGDKTLIMKVNASYTTGYIRYYNEGEKKPISYVSIVFSKTELKFTELEKLLTTVHKGLLKALDLSMGQNIHVYSPIVSMQNIQKTPQTAKKALASRWLSWLSYLEDPRIRFFYDPQMPALKDLPAVDTGKDNKKHPSNFQHIFYTDGSAITSPTKEGHLNAGMGIVYFINKDGNLQKQQEWSISLGNHTAQFAEIAAFEFALKKCLPLGGNILVVTDSNYVAKAYNEELDVWASNGFVNNRKKPLKHISKWKSVADLKRLRPDVVVTHEPGHQKLDSSPHAYGNNLADQLATQASFKVHAGKRTADGSEFEKRTADGSEFESPKKKAKVE

SEQ ID NO: 1096 - protein, 2087 aa, synthetic construct
MPAAKRVKLDGGDKKYSIGLDIGTNSVGWAVITDEYKVPSKKFKVLGNTDRHSIKKNLIGALLFDSGETAEATRLKRTARRRYTRRKNRICYLQEIFSNEMAKVDDSFFHRLEESFLVEEDKKHERHPIFGNIVDEVAYHEKYPTIYHLRKKLVDSTDKADLRLIYLALAHMIKFRGHFLIEGDLNPDNSDVDKLFIQLVQTYNQLFEENPINASGVDAKAILSARLSKSRRLENLIAQLPGEKKNGLFGNLIALSLGLTPNFKSNFDLAEDAKLQLSKDTYDDDLDNLLAQIGDQYADLFLAAKNLSDAILLSDILRVNTEITKAPLSASMIKRYDEHHQDLTLLKALVRQQLPEKYKEIFFDQSKNGYAGYIDGGASQEEFYKFIKPILEKMDGTEELLVKLNREDLLRKQRTFDNGSIPHQIHLGELHAILRRQEDFYPFLKDNREKIEKILTFRIPYYVGPLARGNSRFAWMTRKSEETITPWNFEEVVDKGASAQSFIERMTNFDKNLPNEKVLPKHSLLYEYFTVYNELTKVKYVTEGMRKPAFLSGEQKKAIVDLLFKTNRKVTVKQLKEDYFKKIECFDSVEISGVEDRFNASLGTYHDLLKIIKDKDFLDNEENEDILEDIVLTLTLFEDREMIEERLKTYAHLFDDKVMKQLKRRRYTGWGRLSRKLINGIRDKQSGKTILDFLKSDGFANRNFMQLIHDDSLTFKEDIQKAQVSGQGDSLHEHIANLAGSPAIKKGILQTVKVVDELVKVMGRHKPENIVIEMARENQTTQKGQKNSRERMKRIEEGIKELGSQILKEHPVENTQLQNEKLYLYYLQNGRDMYVDQELDINRLSDYDVDHIVPQSFLKDDSIDNKVLTRSDKARGKSDNVPSEEVVKKMKNYWRQLLNAKLITQRKFDNLTKAERGGLSELDKAGFIKRQLVETRQITKHVAQILDSRMNTKYDENDKLIREVKVITLKSKLVSDFRKDFQFYKVREINNYHHAHDAYLNAVVGTALIKKYPKLESEFVYGDYKVYDVRKMIAKSEQEIGKATAKYFFYSNIMNFFKTEITLANGEIRKRPLIETNGETGEIVWDKGRDFATVRKVLSMPQVNIVKKTEVQTGGFSKESILPKRNSDKLIARKKDWDPKKYGGFDSPTVAYSVLVVAKVEKGKSKKLKSVKELLGITIMERSSFEKNPIDFLEAKGYKEVKKDLIIKLPKYSLFELENGRKRMLASAGELQKGNELALPSKYVNFLYLASHYEKLKGSPEDNEQKQLFVEQHKHYLDEIIEQISEFSKRVILADANLDKVLSAYNKHRDKPIREQAENIIHLFTLTNLGAPAAFKYFDTTIDRKRYTSTKEVLDATLIHQSITGLYETRIDLSQLGGDGGPAPGGGEAAAKGGVPWILKKPLELTIKLDLEEQQGTLLNNSILSKKGKEELKQLFEKYSALWQSWENQVGHRRIRPHKIATGTVKPTPQKQYHINPKAKPDIQIVINDLLKQGVLIQKESTMNTPVYPVPKPNGRWRMVLDYRAVNKVTPLIAVQNQHSYGILGSLFKGRYKTTIDLSNGFWAHPIVPEDYWITAFTWQGKQYCWTVLPQGFLNSPGLFNGDVVDLLQGIPNVEVYVDDVYISHDSEKEHLEYLDILFNRLKEAGYIISLKKSNIANSIVDFLGFQITNEGRGLTDTFKEKLENITAPTTLKQLQSILGLLNFARNFIPDFTELIAPLYALIPKSPKNYVPWQIEHSTTLETLITKLNGAEYLQGRKGDKTLIMKVNASYTTGYIRYYNEGEKKPISYVSIVFSKTELKFTELEKLLTTVHKGLLKALDLSMGQNIHVYSPIVSMQNIQKTPQTAKKALASRWLSWLSYLEDPRIRFFYDPQMPALKDLPAVDTGKDNKKHPSNFQHIFYTDGSAITSPTKEGHLNAGMGIVYFINKDGNLQKQQEWSISLGNHTAQFAEIAAFEFALKKCLPLGGNILVVTDSNYVAKAYNEELDVWASNGFVNNRKKPLKHISKWKSVADLKRLRPDVVVTHEPGHQKLDSSPHAYGNNLADQLATQASFKVHAGKRTADGSEFEKRTADGSEFESPKKKAKVE

SEQ ID NO: 1097 - protein, 2087 aa, synthetic construct
MPAAKRVKLDGGDKKYSIGLDIGTNSVGWAVITDEYKVPSKKFKVLGNTDRHSIKKNLIGALLFDSGETAEATRLKRTARRRYTRRKNRICYLQEIFSNEMAKVDDSFFHRLEESFLVEEDKKHERHPIFGNIVDEVAYHEKYPTIYHLRKKLVDSTDKADLRLIYLALAHMIKFRGHFLIEGDLNPDNSDVDKLFIQLVQTYNQLFEENPINASGVDAKAILSARLSKSRRLENLIAQLPGEKKNGLFGNLIALSLGLTPNFKSNFDLAEDAKLQLSKDTYDDDLDNLLAQIGDQYADLFLAAKNLSDAILLSDILRVNTEITKAPLSASMIKRYDEHHQDLTLLKALVRQQLPEKYKEIFFDQSKNGYAGYIDGGASQEEFYKFIKPILEKMDGTEELLVKLNREDLLRKQRTFDNGSIPHQIHLGELHAILRRQEDFYPFLKDNREKIEKILTFRIPYYVGPLARGNSRFAWMTRKSEETITPWNFEEVVDKGASAQSFIERMTNFDKNLPNEKVLPKHSLLYEYFTVYNELTKVKYVTEGMRKPAFLSGEQKKAIVDLLFKTNRKVTVKQLKEDYFKKIECFDSVEISGVEDRFNASLGTYHDLLKIIKDKDFLDNEENEDILEDIVLTLTLFEDREMIEERLKTYAHLFDDKVMKQLKRRRYTGWGRLSRKLINGIRDKQSGKTILDFLKSDGFANRNFMQLIHDDSLTFKEDIQKAQVSGQGDSLHEHIANLAGSPAIKKGILQTVKVVDELVKVMGRHKPENIVIEMARENQTTQKGQKNSRERMKRIEEGIKELGSQILKEHPVENTQLQNEKLYLYYLQNGRDMYVDQELDINRLSDYDVDHIVPQSFLKDDSIDNKVLTRSDKARGKSDNVPSEEVVKKMKNYWRQLLNAKLITQRKFDNLTKAERGGLSELDKAGFIKRQLVETRQITKHVAQILDSRMNTKYDENDKLIREVKVITLKSKLVSDFRKDFQFYKVREINNYHHAHDAYLNAVVGTALIKKYPKLESEFVYGDYKVYDVRKMIAKSEQEIGKATAKYFFYSNIMNFFKTEITLANGEIRKRPLIETNGETGEIVWDKGRDFATVRKVLSMPQVNIVKKTEVQTGGFSKESILPKRNSDKLIARKKDWDPKKYGGFDSPTVAYSVLVVAKVEKGKSKKLKSVKELLGITIMERSSFEKNPIDFLEAKGYKEVKKDLIIKLPKYSLFELENGRKRMLASAGELQKGNELALPSKYVNFLYLASHYEKLKGSPEDNEQKQLFVEQHKHYLDEIIEQISEFSKRVILADANLDKVLSAYNKHRDKPIREQAENIIHLFTLTNLGAPAAFKYFDTTIDRKRYTSTKEVLDATLIHQSITGLYETRIDLSQLGGDGGGGSEAAAKPAPGGVPWILKKPLELTIKLDLEEQQGTLLNNSILSKKGKEELKQLFEKYSALWQSWENQVGHRRIRPHKIATGTVKPTPQKQYHINPKAKPDIQIVINDLLKQGVLIQKESTMNTPVYPVPKPNGRWRMVLDYRAVNKVTPLIAVQNQHSYGILGSLFKGRYKTTIDLSNGFWAHPIVPEDYWITAFTWQGKQYCWTVLPQGFLNSPGLFNGDVVDLLQGIPNVEVYVDDVYISHDSEKEHLEYLDILFNRLKEAGYIISLKKSNIANSIVDFLGFQITNEGRGLTDTFKEKLENITAPTTLKQLQSILGLLNFARNFIPDFTELIAPLYALIPKSPKNYVPWQIEHSTTLETLITKLNGAEYLQGRKGDKTLIMKVNASYTTGYIRYYNEGEKKPISYVSIVFSKTELKFTELEKLLTTVHKGLLKALDLSMGQNIHVYSPIVSMQNIQKTPQTAKKALASRWLSWLSYLEDPRIRFFYDPQMPALKDLPAVDTGKDNKKHPSNFQHIFYTDGSAITSPTKEGHLNAGMGIVYFINKDGNLQKQQEWSISLGNHTAQFAEIAAFEFALKKCLPLGGNILVVTDSNYVAKAYNEELDVWASNGFVNNRKKPLKHISKWKSVADLKRLRPDVVVTHEPGHQKLDSSPHAYGNNLADQLATQASFKVHAGKRTADGSEFEKRTADGSEFESPKKKAKVE

SEQ ID NO: 1098 - protein, 2085 aa, synthetic construct
MPAAKRVKLDGGDKKYSIGLDIGTNSVGWAVITDEYKVPSKKFKVLGNTDRHSIKKNLIGALLFDSGETAEATRLKRTARRRYTRRKNRICYLQEIFSNEMAKVDDSFFHRLEESFLVEEDKKHERHPIFGNIVDEVAYHEKYPTIYHLRKKLVDSTDKADLRLIYLALAHMIKFRGHFLIEGDLNPDNSDVDKLFIQLVQTYNQLFEENPINASGVDAKAILSARLSKSRRLENLIAQLPGEKKNGLFGNLIALSLGLTPNFKSNFDLAEDAKLQLSKDTYDDDLDNLLAQIGDQYADLFLAAKNLSDAILLSDILRVNTEITKAPLSASMIKRYDEHHQDLTLLKALVRQQLPEKYKEIFFDQSKNGYAGYIDGGASQEEFYKFIKPILEKMDGTEELLVKLNREDLLRKQRTFDNGSIPHQIHLGELHAILRRQEDFYPFLKDNREKIEKILTFRIPYYVGPLARGNSRFAWMTRKSEETITPWNFEEVVDKGASAQSFIERMTNFDKNLPNEKVLPKHSLLYEYFTVYNELTKVKYVTEGMRKPAFLSGEQKKAIVDLLFKTNRKVTVKQLKEDYFKKIECFDSVEISGVEDRFNASLGTYHDLLKIIKDKDFLDNEENEDILEDIVLTLTLFEDREMIEERLKTYAHLFDDKVMKQLKRRRYTGWGRLSRKLINGIRDKQSGKTILDFLKSDGFANRNFMQLIHDDSLTFKEDIQKAQVSGQGDSLHEHIANLAGSPAIKKGILQTVKVVDELVKVMGRHKPENIVIEMARENQTTQKGQKNSRERMKRIEEGIKELGSQILKEHPVENTQLQNEKLYLYYLQNGRDMYVDQELDINRLSDYDVDHIVPQSFLKDDSIDNKVLTRSDKARGKSDNVPSEEVVKKMKNYWRQLLNAKLITQRKFDNLTKAERGGLSELDKAGFIKRQLVETRQITKHVAQILDSRMNTKYDENDKLIREVKVITLKSKLVSDFRKDFQFYKVREINNYHHAHDAYLNAVVGTALIKKYPKLESEFVYGDYKVYDVRKMIAKSEQEIGKATAKYFFYSNIMNFFKTEITLANGEIRKRPLIETNGETGEIVWDKGRDFATVRKVLSMPQVNIVKKTEVQTGGFSKESILPKRNSDKLIARKKDWDPKKYGGFDSPTVAYSVLVVAKVEKGKSKKLKSVKELLGITIMERSSFEKNPIDFLEAKGYKEVKKDLIIKLPKYSLFELENGRKRMLASAGELQKGNELALPSKYVNFLYLASHYEKLKGSPEDNEQKQLFVEQHKHYLDEIIEQISEFSKRVILADANLDKVLSAYNKHRDKPIREQAENIIHLFTLTNLGAPAAFKYFDTTIDRKRYTSTKEVLDATLIHQSITGLYETRIDLSQLGGDGGPAPGGSGGGGGVPWILKKPLELTIKLDLEEQQGTLLNNSILSKKGKEELKQLFEKYSALWQSWENQVGHRRIRPHKIATGTVKPTPQKQYHINPKAKPDIQIVINDLLKQGVLIQKESTMNTPVYPVPKPNGRWRMVLDYRAVNKVTPLIAVQNQHSYGILGSLFKGRYKTTIDLSNGFWAHPIVPEDYWITAFTWQGKQYCWTVLPQGFLNSPGLFNGDVVDLLQGIPNVEVYVDDVYISHDSEKEHLEYLDILFNRLKEAGYIISLKKSNIANSIVDFLGFQITNEGRGLTDTFKEKLENITAPTTLKQLQSILGLLNFARNFIPDFTELIAPLYALIPKSPKNYVPWQIEHSTTLETLITKLNGAEYLQGRKGDKTLIMKVNASYTTGYIRYYNEGEKKPISYVSIVFSKTELKFTELEKLLTTVHKGLLKALDLSMGQNIHVYSPIVSMQNIQKTPQTAKKALASRWLSWLSYLEDPRIRFFYDPQMPALKDLPAVDTGKDNKKHPSNFQHIFYTDGSAITSPTKEGHLNAGMGIVYFINKDGNLQKQQEWSISLGNHTAQFAEIAAFEFALKKCLPLGGNILVVTDSNYVAKAYNEELDVWASNGFVNNRKKPLKHISKWKSVADLKRLRPDVVVTHEPGHQKLDSSPHAYGNNLADQLATQASFKVHAGKRTADGSEFEKRTADGSEFESPKKKAKVE

SEQ ID NO: 1099 - protein, 2087 aa, synthetic construct
MPAAKRVKLDGGDKKYSIGLDIGTNSVGWAVITDEYKVPSKKFKVLGNTDRHSIKKNLIGALLFDSGETAEATRLKRTARRRYTRRKNRICYLQEIFSNEMAKVDDSFFHRLEESFLVEEDKKHERHPIFGNIVDEVAYHEKYPTIYHLRKKLVDSTDKADLRLIYLALAHMIKFRGHFLIEGDLNPDNSDVDKLFIQLVQTYNQLFEENPINASGVDAKAILSARLSKSRRLENLIAQLPGEKKNGLFGNLIALSLGLTPNFKSNFDLAEDAKLQLSKDTYDDDLDNLLAQIGDQYADLFLAAKNLSDAILLSDILRVNTEITKAPLSASMIKRYDEHHQDLTLLKALVRQQLPEKYKEIFFDQSKNGYAGYIDGGASQEEFYKFIKPILEKMDGTEELLVKLNREDLLRKQRTFDNGSIPHQIHLGELHAILRRQEDFYPFLKDNREKIEKILTFRIPYYVGPLARGNSRFAWMTRKSEETITPWNFEEVVDKGASAQSFIERMTNFDKNLPNEKVLPKHSLLYEYFTVYNELTKVKYVTEGMRKPAFLSGEQKKAIVDLLFKTNRKVTVKQLKEDYFKKIECFDSVEISGVEDRFNASLGTYHDLLKIIKDKDFLDNEENEDILEDIVLTLTLFEDREMIEERLKTYAHLFDDKVMKQLKRRRYTGWGRLSRKLINGIRDKQSGKTILDFLKSDGFANRNFMQLIHDDSLTFKEDIQKAQVSGQGDSLHEHIANLAGSPAIKKGILQTVKVVDELVKVMGRHKPENIVIEMARENQTTQKGQKNSRERMKRIEEGIKELGSQILKEHPVENTQLQNEKLYLYYLQNGRDMYVDQELDINRLSDYDVDHIVPQSFLKDDSIDNKVLTRSDKARGKSDNVPSEEVVKKMKNYWRQLLNAKLITQRKFDNLTKAERGGLSELDKAGFIKRQLVETRQITKHVAQILDSRMNTKYDENDKLIREVKVITLKSKLVSDFRKDFQFYKVREINNYHHAHDAYLNAVVGTALIKKYPKLESEFVYGDYKVYDVRKMIAKSEQEIGKATAKYFFYSNIMNFFKTEITLANGEIRKRPLIETNGETGEIVWDKGRDFATVRKVLSMPQVNIVKKTEVQTGGFSKESILPKRNSDKLIARKKDWDPKKYGGFDSPTVAYSVLVVAKVEKGKSKKLKSVKELLGITIMERSSFEKNPIDFLEAKGYKEVKKDLIIKLPKYSLFELENGRKRMLASAGELQKGNELALPSKYVNFLYLASHYEKLKGSPEDNEQKQLFVEQHKHYLDEIIEQISEFSKRVILADANLDKVLSAYNKHRDKPIREQAENIIHLFTLTNLGAPAAFKYFDTTIDRKRYTSTKEVLDATLIHQSITGLYETRIDLSQLGGDGGGGSPAPEAAAKGGVPWILKKPLELTIKLDLEEQQGTLLNNSILSKKGKEELKQLFEKYSALWQSWENQVGHRRIRPHKIATGTVKPTPQKQYHINPKAKPDIQIVINDLLKQGVLIQKESTMNTPVYPVPKPNGRWRMVLDYRAVNKVTPLIAVQNQHSYGILGSLFKGRYKTTIDLSNGFWAHPIVPEDYWITAFTWQGKQYCWTVLPQGFLNSPGLFNGDVVDLLQGIPNVEVYVDDVYISHDSEKEHLEYLDILFNRLKEAGYIISLKKSNIANSIVDFLGFQITNEGRGLTDTFKEKLENITAPTTLKQLQSILGLLNFARNFIPDFTELIAPLYALIPKSPKNYVPWQIEHSTTLETLITKLNGAEYLQGRKGDKTLIMKVNASYTTGYIRYYNEGEKKPISYVSIVFSKTELKFTELEKLLTTVHKGLLKALDLSMGQNIHVYSPIVSMQNIQKTPQTAKKALASRWLSWLSYLEDPRIRFFYDPQMPALKDLPAVDTGKDNKKHPSNFQHIFYTDGSAITSPTKEGHLNAGMGIVYFINKDGNLQKQQEWSISLGNHTAQFAEIAAFEFALKKCLPLGGNILVVTDSNYVAKAYNEELDVWASNGFVNNRKKPLKHISKWKSVADLKRLRPDVVVTHEPGHQKLDSSPHAYGNNLADQLATQASFKVHAGKRTADGSEFEKRTADGSEFESPKKKAKVE

SEQ ID NO: 1100 - protein, 2087 aa, synthetic construct
MPAAKRVKLDGGDKKYSIGLDIGTNSVGWAVITDEYKVPSKKFKVLGNTDRHSIKKNLIGALLFDSGETAEATRLKRTARRRYTRRKNRICYLQEIFSNEMAKVDDSFFHRLEESFLVEEDKKHERHPIFGNIVDEVAYHEKYPTIYHLRKKLVDSTDKADLRLIYLALAHMIKFRGHFLIEGDLNPDNSDVDKLFIQLVQTYNQLFEENPINASGVDAKAILSARLSKSRRLENLIAQLPGEKKNGLFGNLIALSLGLTPNFKSNFDLAEDAKLQLSKDTYDDDLDNLLAQIGDQYADLFLAAKNLSDAILLSDILRVNTEITKAPLSASMIKRYDEHHQDLTLLKALVRQQLPEKYKEIFFDQSKNGYAGYIDGGASQEEFYKFIKPILEKMDGTEELLVKLNREDLLRKQRTFDNGSIPHQIHLGELHAILRRQEDFYPFLKDNREKIEKILTFRIPYYVGPLARGNSRFAWMTRKSEETITPWNFEEVVDKGASAQSFIERMTNFDKNLPNEKVLPKHSLLYEYFTVYNELTKVKYVTEGMRKPAFLSGEQKKAIVDLLFKTNRKVTVKQLKEDYFKKIECFDSVEISGVEDRFNASLGTYHDLLKIIKDKDFLDNEENEDILEDIVLTLTLFEDREMIEERLKTYAHLFDDKVMKQLKRRRYTGWGRLSRKLINGIRDKQSGKTILDFLKSDGFANRNFMQLIHDDSLTFKEDIQKAQVSGQGDSLHEHIANLAGSPAIKKGILQTVKVVDELVKVMGRHKPENIVIEMARENQTTQKGQKNSRERMKRIEEGIKELGSQILKEHPVENTQLQNEKLYLYYLQNGRDMYVDQELDINRLSDYDVDHIVPQSFLKDDSIDNKVLTRSDKARGKSDNVPSEEVVKKMKNYWRQLLNAKLITQRKFDNLTKAERGGLSELDKAGFIKRQLVETRQITKHVAQILDSRMNTKYDENDKLIREVKVITLKSKLVSDFRKDFQFYKVREINNYHHAHDAYLNAVVGTALIKKYPKLESEFVYGDYKVYDVRKMIAKSEQEIGKATAKYFFYSNIMNFFKTEITLANGEIRKRPLIETNGETGEIVWDKGRDFATVRKVLSMPQVNIVKKTEVQTGGFSKESILPKRNSDKLIARKKDWDPKKYGGFDSPTVAYSVLVVAKVEKGKSKKLKSVKELLGITIMERSSFEKNPIDFLEAKGYKEVKKDLIIKLPKYSLFELENGRKRMLASAGELQKGNELALPSKYVNFLYLASHYEKLKGSPEDNEQKQLFVEQHKHYLDEIIEQISEFSKRVILADANLDKVLSAYNKHRDKPIREQAENIIHLFTLTNLGAPAAFKYFDTTIDRKRYTSTKEVLDATLIHQSITGLYETRIDLSQLGGDGGGSSEAAAKGGGGGVPWILKKPLELTIKLDLEEQQGTLLNNSILSKKGKEELKQLFEKYSALWQSWENQVGHRRIRPHKIATGTVKPTPQKQYHINPKAKPDIQIVINDLLKQGVLIQKESTMNTPVYPVPKPNGRWRMVLDYRAVNKVTPLIAVQNQHSYGILGSLFKGRYKTTIDLSNGFWAHPIVPEDYWITAFTWQGKQYCWTVLPQGFLNSPGLFNGDVVDLLQGIPNVEVYVDDVYISHDSEKEHLEYLDILFNRLKEAGYIISLKKSNIANSIVDFLGFQITNEGRGLTDTFKEKLENITAPTTLKQLQSILGLLNFARNFIPDFTELIAPLYALIPKSPKNYVPWQIEHSTTLETLITKLNGAEYLQGRKGDKTLIMKVNASYTTGYIRYYNEGEKKPISYVSIVFSKTELKFTELEKLLTTVHKGLLKALDLSMGQNIHVYSPIVSMQNIQKTPQTAKKALASRWLSWLSYLEDPRIRFFYDPQMPALKDLPAVDTGKDNKKHPSNFQHIFYTDGSAITSPTKEGHLNAGMGIVYFINKDGNLQKQQEWSISLGNHTAQFAEIAAFEFALKKCLPLGGNILVVTDSNYVAKAYNEELDVWASNGFVNNRKKPLKHISKWKSVADLKRLRPDVVVTHEPGHQKLDSSPHAYGNNLADQLATQASFKVHAGKRTADGSEFEKRTADGSEFESPKKKAKVE

SEQ ID NO: 1101 - protein, 2091 aa, synthetic construct
MPAAKRVKLDGGDKKYSIGLDIGTNSVGWAVITDEYKVPSKKFKVLGNTDRHSIKKNLIGALLFDSGETAEATRLKRTARRRYTRRKNRICYLQEIFSNEMAKVDDSFFHRLEESFLVEEDKKHERHPIFGNIVDEVAYHEKYPTIYHLRKKLVDSTDKADLRLIYLALAHMIKFRGHFLIEGDLNPDNSDVDKLFIQLVQTYNQLFEENPINASGVDAKAILSARLSKSRRLENLIAQLPGEKKNGLFGNLIALSLGLTPNFKSNFDLAEDAKLQLSKDTYDDDLDNLLAQIGDQYADLFLAAKNLSDAILLSDILRVNTEITKAPLSASMIKRYDEHHQDLTLLKALVRQQLPEKYKEIFFDQSKNGYAGYIDGGASQEEFYKFIKPILEKMDGTEELLVKLNREDLLRKQRTFDNGSIPHQIHLGELHAILRRQEDFYPFLKDNREKIEKILTFRIPYYVGPLARGNSRFAWMTRKSEETITPWNFEEVVDKGASAQSFIERMTNFDKNLPNEKVLPKHSLLYEYFTVYNELTKVKYVTEGMRKPAFLSGEQKKAIVDLLFKTNRKVTVKQLKEDYFKKIECFDSVEISGVEDRFNASLGTYHDLLKIIKDKDFLDNEENEDILEDIVLTLTLFEDREMIEERLKTYAHLFDDKVMKQLKRRRYTGWGRLSRKLINGIRDKQSGKTILDFLKSDGFANRNFMQLIHDDSLTFKEDIQKAQVSGQGDSLHEHIANLAGSPAIKKGILQTVKVVDELVKVMGRHKPENIVIEMARENQTTQKGQKNSRERMKRIEEGIKELGSQILKEHPVENTQLQNEKLYLYYLQNGRDMYVDQELDINRLSDYDVDHIVPQSFLKDDSIDNKVLTRSDKARGKSDNVPSEEVVKKMKNYWRQLLNAKLITQRKFDNLTKAERGGLSELDKAGFIKRQLVETRQITKHVAQILDSRMNTKYDENDKLIREVKVITLKSKLVSDFRKDFQFYKVREINNYHHAHDAYLNAVVGTALIKKYPKLESEFVYGDYKVYDVRKMIAKSEQEIGKATAKYFFYSNIMNFFKTEITLANGEIRKRPLIETNGETGEIVWDKGRDFATVRKVLSMPQVNIVKKTEVQTGGFSKESILPKRNSDKLIARKKDWDPKKYGGFDSPTVAYSVLVVAKVEKGKSKKLKSVKELLGITIMERSSFEKNPIDFLEAKGYKEVKKDLIIKLPKYSLFELENGRKRMLASAGELQKGNELALPSKYVNFLYLASHYEKLKGSPEDNEQKQLFVEQHKHYLDEIIEQISEFSKRVILADANLDKVLSAYNKHRDKPIREQAENIIHLFTLTNLGAPAAFKYFDTTIDRKRYTSTKEVLDATLIHQSITGLYETRIDLSQLGGDGGGSSGSSGSSGSSGSSGGVPWILKKPLELTIKLDLEEQQGTLLNNSILSKKGKEELKQLFEKYSALWQSWENQVGHRRIRPHKIATGTVKPTPQKQYHINPKAKPDIQIVINDLLKQGVLIQKESTMNTPVYPVPKPNGRWRMVLDYRAVNKVTPLIAVQNQHSYGILGSLFKGRYKTTIDLSNGFWAHPIVPEDYWITAFTWQGKQYCWTVLPQGFLNSPGLFNGDVVDLLQGIPNVEVYVDDVYISHDSEKEHLEYLDILFNRLKEAGYIISLKKSNIANSIVDFLGFQITNEGRGLTDTFKEKLENITAPTTLKQLQSILGLLNFARNFIPDFTELIAPLYALIPKSPKNYVPWQIEHSTTLETLITKLNGAEYLQGRKGDKTLIMKVNASYTTGYIRYYNEGEKKPISYVSIVFSKTELKFTELEKLLTTVHKGLLKALDLSMGQNIHVYSPIVSMQNIQKTPQTAKKALASRWLSWLSYLEDPRIRFFYDPQMPALKDLPAVDTGKDNKKHPSNFQHIFYTDGSAITSPTKEGHLNAGMGIVYFINKDGNLQKQQEWSISLGNHTAQFAEIAAFEFALKKCLPLGGNILVVTDSNYVAKAYNEELDVWASNGFVNNRKKPLKHISKWKSVADLKRLRPDVVVTHEPGHQKLDSSPHAYGNNLADQLATQASFKVHAGKRTADGSEFEKRTADGSEFESPKKKAKVE

SEQ ID NO: 1102 - protein, 2081 aa, synthetic construct
MPAAKRVKLDGGDKKYSIGLDIGTNSVGWAVITDEYKVPSKKFKVLGNTDRHSIKKNLIGALLFDSGETAEATRLKRTARRRYTRRKNRICYLQEIFSNEMAKVDDSFFHRLEESFLVEEDKKHERHPIFGNIVDEVAYHEKYPTIYHLRKKLVDSTDKADLRLIYLALAHMIKFRGHFLIEGDLNPDNSDVDKLFIQLVQTYNQLFEENPINASGVDAKAILSARLSKSRRLENLIAQLPGEKKNGLFGNLIALSLGLTPNFKSNFDLAEDAKLQLSKDTYDDDLDNLLAQIGDQYADLFLAAKNLSDAILLSDILRVNTEITKAPLSASMIKRYDEHHQDLTLLKALVRQQLPEKYKEIFFDQSKNGYAGYIDGGASQEEFYKFIKPILEKMDGTEELLVKLNREDLLRKQRTFDNGSIPHQIHLGELHAILRRQEDFYPFLKDNREKIEKILTFRIPYYVGPLARGNSRFAWMTRKSEETITPWNFEEVVDKGASAQSFIERMTNFDKNLPNEKVLPKHSLLYEYFTVYNELTKVKYVTEGMRKPAFLSGEQKKAIVDLLFKTNRKVTVKQLKEDYFKKIECFDSVEISGVEDRFNASLGTYHDLLKIIKDKDFLDNEENEDILEDIVLTLTLFEDREMIEERLKTYAHLFDDKVMKQLKRRRYTGWGRLSRKLINGIRDKQSGKTILDFLKSDGFANRNFMQLIHDDSLTFKEDIQKAQVSGQGDSLHEHIANLAGSPAIKKGILQTVKVVDELVKVMGRHKPENIVIEMARENQTTQKGQKNSRERMKRIEEGIKELGSQILKEHPVENTQLQNEKLYLYYLQNGRDMYVDQELDINRLSDYDVDHIVPQSFLKDDSIDNKVLTRSDKARGKSDNVPSEEVVKKMKNYWRQLLNAKLITQRKFDNLTKAERGGLSELDKAGFIKRQLVETRQITKHVAQILDSRMNTKYDENDKLIREVKVITLKSKLVSDFRKDFQFYKVREINNYHHAHDAYLNAVVGTALIKKYPKLESEFVYGDYKVYDVRKMIAKSEQEIGKATAKYFFYSNIMNFFKTEITLANGEIRKRPLIETNGETGEIVWDKGRDFATVRKVLSMPQVNIVKKTEVQTGGFSKESILPKRNSDKLIARKKDWDPKKYGGFDSPTVAYSVLVVAKVEKGKSKKLKSVKELLGITIMERSSFEKNPIDFLEAKGYKEVKKDLIIKLPKYSLFELENGRKRMLASAGELQKGNELALPSKYVNFLYLASHYEKLKGSPEDNEQKQLFVEQHKHYLDEIIEQISEFSKRVILADANLDKVLSAYNKHRDKPIREQAENIIHLFTLTNLGAPAAFKYFDTTIDRKRYTSTKEVLDATLIHQSITGLYETRIDLSQLGGDGGPAPAPGGVPWILKKPLELTIKLDLEEQQGTLLNNSILSKKGKEELKQLFEKYSALWQSWENQVGHRRIRPHKIATGTVKPTPQKQYHINPKAKPDIQIVINDLLKQGVLIQKESTMNTPVYPVPKPNGRWRMVLDYRAVNKVTPLIAVQNQHSYGILGSLFKGRYKTTIDLSNGFWAHPIVPEDYWITAFTWQGKQYCWTVLPQGFLNSPGLFNGDVVDLLQGIPNVEVYVDDVYISHDSEKEHLEYLDILFNRLKEAGYIISLKKSNIANSIVDFLGFQITNEGRGLTDTFKEKLENITAPTTLKQLQSILGLLNFARNFIPDFTELIAPLYALIPKSPKNYVPWQIEHSTTLETLITKLNGAEYLQGRKGDKTLIMKVNASYTTGYIRYYNEGEKKPISYVSIVFSKTELKFTELEKLLTTVHKGLLKALDLSMGQNIHVYSPIVSMQNIQKTPQTAKKALASRWLSWLSYLEDPRIRFFYDPQMPALKDLPAVDTGKDNKKHPSNFQHIFYTDGSAITSPTKEGHLNAGMGIVYFINKDGNLQKQQEWSISLGNHTAQFAEIAAFEFALKKCLPLGGNILVVTDSNYVAKAYNEELDVWASNGFVNNRKKPLKHISKWKSVADLKRLRPDVVVTHEPGHQKLDSSPHAYGNNLADQLATQASFKVHAGKRTADGSEFEKRTADGSEFESPKKKAKVE

SEQ ID NO: 1103 - protein, 2085 aa, synthetic construct
MPAAKRVKLDGGDKKYSIGLDIGTNSVGWAVITDEYKVPSKKFKVLGNTDRHSIKKNLIGALLFDSGETAEATRLKRTARRRYTRRKNRICYLQEIFSNEMAKVDDSFFHRLEESFLVEEDKKHERHPIFGNIVDEVAYHEKYPTIYHLRKKLVDSTDKADLRLIYLALAHMIKFRGHFLIEGDLNPDNSDVDKLFIQLVQTYNQLFEENPINASGVDAKAILSARLSKSRRLENLIAQLPGEKKNGLFGNLIALSLGLTPNFKSNFDLAEDAKLQLSKDTYDDDLDNLLAQIGDQYADLFLAAKNLSDAILLSDILRVNTEITKAPLSASMIKRYDEHHQDLTLLKALVRQQLPEKYKEIFFDQSKNGYAGYIDGGASQEEFYKFIKPILEKMDGTEELLVKLNREDLLRKQRTFDNGSIPHQIHLGELHAILRRQEDFYPFLKDNREKIEKILTFRIPYYVGPLARGNSRFAWMTRKSEETITPWNFEEVVDKGASAQSFIERMTNFDKNLPNEKVLPKHSLLYEYFTVYNELTKVKYVTEGMRKPAFLSGEQKKAIVDLLFKTNRKVTVKQLKEDYFKKIECFDSVEISGVEDRFNASLGTYHDLLKIIKDKDFLDNEENEDILEDIVLTLTLFEDREMIEERLKTYAHLFDDKVMKQLKRRRYTGWGRLSRKLINGIRDKQSGKTILDFLKSDGFANRNFMQLIHDDSLTFKEDIQKAQVSGQGDSLHEHIANLAGSPAIKKGILQTVKVVDELVKVMGRHKPENIVIEMARENQTTQKGQKNSRERMKRIEEGIKELGSQILKEHPVENTQLQNEKLYLYYLQNGRDMYVDQELDINRLSDYDVDHIVPQSFLKDDSIDNKVLTRSDKARGKSDNVPSEEVVKKMKNYWRQLLNAKLITQRKFDNLTKAERGGLSELDKAGFIKRQLVETRQITKHVAQILDSRMNTKYDENDKLIREVKVITLKSKLVSDFRKDFQFYKVREINNYHHAHDAYLNAVVGTALIKKYPKLESEFVYGDYKVYDVRKMIAKSEQEIGKATAKYFFYSNIMNFFKTEITLANGEIRKRPLIETNGETGEIVWDKGRDFATVRKVLSMPQVNIVKKTEVQTGGFSKESILPKRNSDKLIARKKDWDPKKYGGFDSPTVAYSVLVVAKVEKGKSKKLKSVKELLGITIMERSSFEKNPIDFLEAKGYKEVKKDLIIKLPKYSLFELENGRKRMLASAGELQKGNELALPSKYVNFLYLASHYEKLKGSPEDNEQKQLFVEQHKHYLDEIIEQISEFSKRVILADANLDKVLSAYNKHRDKPIREQAENIIHLFTLTNLGAPAAFKYFDTTIDRKRYTSTKEVLDATLIHQSITGLYETRIDLSQLGGDGGGSSGSSGSSGGVPWILKKPLELTIKLDLEEQQGTLLNNSILSKKGKEELKQLFEKYSALWQSWENQVGHRRIRPHKIATGTVKPTPQKQYHINPKAKPDIQIVINDLLKQGVLIQKESTMNTPVYPVPKPNGRWRMVLDYRAVNKVTPLIAVQNQHSYGILGSLFKGRYKTTIDLSNGFWAHPIVPEDYWITAFTWQGKQYCWTVLPQGFLNSPGLFNGDVVDLLQGIPNVEVYVDDVYISHDSEKEHLEYLDILFNRLKEAGYIISLKKSNIANSIVDFLGFQITNEGRGLTDTFKEKLENITAPTTLKQLQSILGLLNFARNFIPDFTELIAPLYALIPKSPKNYVPWQIEHSTTLETLITKLNGAEYLQGRKGDKTLIMKVNASYTTGYIRYYNEGEKKPISYVSIVFSKTELKFTELEKLLTTVHKGLLKALDLSMGQNIHVYSPIVSMQNIQKTPQTAKKALASRWLSWLSYLEDPRIRFFYDPQMPALKDLPAVDTGKDNKKHPSNFQHIFYTDGSAITSPTKEGHLNAGMGIVYFINKDGNLQKQQEWSISLGNHTAQFAEIAAFEFALKKCLPLGGNILVVTDSNYVAKAYNEELDVWASNGFVNNRKKPLKHISKWKSVADLKRLRPDVVVTHEPGHQKLDSSPHAYGNNLADQLATQASFKVHAGKRTADGSEFEKRTADGSEFESPKKKAKVE

SEQ ID NO: 1104 - protein, 2087 aa, synthetic construct
MPAAKRVKLDGGDKKYSIGLDIGTNSVGWAVITDEYKVPSKKFKVLGNTDRHSIKKNLIGALLFDSGETAEATRLKRTARRRYTRRKNRICYLQEIFSNEMAKVDDSFFHRLEESFLVEEDKKHERHPIFGNIVDEVAYHEKYPTIYHLRKKLVDSTDKADLRLIYLALAHMIKFRGHFLIEGDLNPDNSDVDKLFIQLVQTYNQLFEENPINASGVDAKAILSARLSKSRRLENLIAQLPGEKKNGLFGNLIALSLGLTPNFKSNFDLAEDAKLQLSKDTYDDDLDNLLAQIGDQYADLFLAAKNLSDAILLSDILRVNTEITKAPLSASMIKRYDEHHQDLTLLKALVRQQLPEKYKEIFFDQSKNGYAGYIDGGASQEEFYKFIKPILEKMDGTEELLVKLNREDLLRKQRTFDNGSIPHQIHLGELHAILRRQEDFYPFLKDNREKIEKILTFRIPYYVGPLARGNSRFAWMTRKSEETITPWNFEEVVDKGASAQSFIERMTNFDKNLPNEKVLPKHSLLYEYFTVYNELTKVKYVTEGMRKPAFLSGEQKKAIVDLLFKTNRKVTVKQLKEDYFKKIECFDSVEISGVEDRFNASLGTYHDLLKIIKDKDFLDNEENEDILEDIVLTLTLFEDREMIEERLKTYAHLFDDKVMKQLKRRRYTGWGRLSRKLINGIRDKQSGKTILDFLKSDGFANRNFMQLIHDDSLTFKEDIQKAQVSGQGDSLHEHIANLAGSPAIKKGILQTVKVVDELVKVMGRHKPENIVIEMARENQTTQKGQKNSRERMKRIEEGIKELGSQILKEHPVENTQLQNEKLYLYYLQNGRDMYVDQELDINRLSDYDVDHIVPQSFLKDDSIDNKVLTRSDKARGKSDNVPSEEVVKKMKNYWRQLLNAKLITQRKFDNLTKAERGGLSELDKAGFIKRQLVETRQITKHVAQILDSRMNTKYDENDKLIREVKVITLKSKLVSDFRKDFQFYKVREINNYHHAHDAYLNAVVGTALIKKYPKLESEFVYGDYKVYDVRKMIAKSEQEIGKATAKYFFYSNIMNFFKTEITLANGEIRKRPLIETNGETGEIVWDKGRDFATVRKVLSMPQVNIVKKTEVQTGGFSKESILPKRNSDKLIARKKDWDPKKYGGFDSPTVAYSVLVVAKVEKGKSKKLKSVKELLGITIMERSSFEKNPIDFLEAKGYKEVKKDLIIKLPKYSLFELENGRKRMLASAGELQKGNELALPSKYVNFLYLASHYEKLKGSPEDNEQKQLFVEQHKHYLDEIIEQISEFSKRVILADANLDKVLSAYNKHRDKPIREQAENIIHLFTLTNLGAPAAFKYFDTTIDRKRYTSTKEVLDATLIHQSITGLYETRIDLSQLGGDGGPAPGSSEAAAKGGVPWILKKPLELTIKLDLEEQQGTLLNNSILSKKGKEELKQLFEKYSALWQSWENQVGHRRIRPHKIATGTVKPTPQKQYHINPKAKPDIQIVINDLLKQGVLIQKESTMNTPVYPVPKPNGRWRMVLDYRAVNKVTPLIAVQNQHSYGILGSLFKGRYKTTIDLSNGFWAHPIVPEDYWITAFTWQGKQYCWTVLPQGFLNSPGLFNGDVVDLLQGIPNVEVYVDDVYISHDSEKEHLEYLDILFNRLKEAGYIISLKKSNIANSIVDFLGFQITNEGRGLTDTFKEKLENITAPTTLKQLQSILGLLNFARNFIPDFTELIAPLYALIPKSPKNYVPWQIEHSTTLETLITKLNGAEYLQGRKGDKTLIMKVNASYTTGYIRYYNEGEKKPISYVSIVFSKTELKFTELEKLLTTVHKGLLKALDLSMGQNIHVYSPIVSMQNIQKTPQTAKKALASRWLSWLSYLEDPRIRFFYDPQMPALKDLPAVDTGKDNKKHPSNFQHIFYTDGSAITSPTKEGHLNAGMGIVYFINKDGNLQKQQEWSISLGNHTAQFAEIAAFEFALKKCLPLGGNILVVTDSNYVAKAYNEELDVWASNGFVNNRKKPLKHISKWKSVADLKRLRPDVVVTHEPGHQKLDSSPHAYGNNLADQLATQASFKVHAGKRTADGSEFEKRTADGSEFESPKKKAKVE

SEQ ID NO: 1105 - protein, 2087 aa, synthetic construct
MPAAKRVKLDGGDKKYSIGLDIGTNSVGWAVITDEYKVPSKKFKVLGNTDRHSIKKNLIGALLFDSGETAEATRLKRTARRRYTRRKNRICYLQEIFSNEMAKVDDSFFHRLEESFLVEEDKKHERHPIFGNIVDEVAYHEKYPTIYHLRKKLVDSTDKADLRLIYLALAHMIKFRGHFLIEGDLNPDNSDVDKLFIQLVQTYNQLFEENPINASGVDAKAILSARLSKSRRLENLIAQLPGEKKNGLFGNLIALSLGLTPNFKSNFDLAEDAKLQLSKDTYDDDLDNLLAQIGDQYADLFLAAKNLSDAILLSDILRVNTEITKAPLSASMIKRYDEHHQDLTLLKALVRQQLPEKYKEIFFDQSKNGYAGYIDGGASQEEFYKFIKPILEKMDGTEELLVKLNREDLLRKQRTFDNGSIPHQIHLGELHAILRRQEDFYPFLKDNREKIEKILTFRIPYYVGPLARGNSRFAWMTRKSEETITPWNFEEVVDKGASAQSFIERMTNFDKNLPNEKVLPKHSLLYEYFTVYNELTKVKYVTEGMRKPAFLSGEQKKAIVDLLFKTNRKVTVKQLKEDYFKKIECFDSVEISGVEDRFNASLGTYHDLLKIIKDKDFLDNEENEDILEDIVLTLTLFEDREMIEERLKTYAHLFDDKVMKQLKRRRYTGWGRLSRKLINGIRDKQSGKTILDFLKSDGFANRNFMQLIHDDSLTFKEDIQKAQVSGQGDSLHEHIANLAGSPAIKKGILQTVKVVDELVKVMGRHKPENIVIEMARENQTTQKGQKNSRERMKRIEEGIKELGSQILKEHPVENTQLQNEKLYLYYLQNGRDMYVDQELDINRLSDYDVDHIVPQSFLKDDSIDNKVLTRSDKARGKSDNVPSEEVVKKMKNYWRQLLNAKLITQRKFDNLTKAERGGLSELDKAGFIKRQLVETRQITKHVAQILDSRMNTKYDENDKLIREVKVITLKSKLVSDFRKDFQFYKVREINNYHHAHDAYLNAVVGTALIKKYPKLESEFVYGDYKVYDVRKMIAKSEQEIGKATAKYFFYSNIMNFFKTEITLANGEIRKRPLIETNGETGEIVWDKGRDFATVRKVLSMPQVNIVKKTEVQTGGFSKESILPKRNSDKLIARKKDWDPKKYGGFDSPTVAYSVLVVAKVEKGKSKKLKSVKELLGITIMERSSFEKNPIDFLEAKGYKEVKKDLIIKLPKYSLFELENGRKRMLASAGELQKGNELALPSKYVNFLYLASHYEKLKGSPEDNEQKQLFVEQHKHYLDEIIEQISEFSKRVILADANLDKVLSAYNKHRDKPIREQAENIIHLFTLTNLGAPAAFKYFDTTIDRKRYTSTKEVLDATLIHQSITGLYETRIDLSQLGGDGGEAAAKPAPGGGGGVPWILKKPLELTIKLDLEEQQGTLLNNSILSKKGKEELKQLFEKYSALWQSWENQVGHRRIRPHKIATGTVKPTPQKQYHINPKAKPDIQIVINDLLKQGVLIQKESTMNTPVYPVPKPNGRWRMVLDYRAVNKVTPLIAVQNQHSYGILGSLFKGRYKTTIDLSNGFWAHPIVPEDYWITAFTWQGKQYCWTVLPQGFLNSPGLFNGDVVDLLQGIPNVEVYVDDVYISHDSEKEHLEYLDILFNRLKEAGYIISLKKSNIANSIVDFLGFQITNEGRGLTDTFKEKLENITAPTTLKQLQSILGLLNFARNFIPDFTELIAPLYALIPKSPKNYVPWQIEHSTTLETLITKLNGAEYLQGRKGDKTLIMKVNASYTTGYIRYYNEGEKKPISYVSIVFSKTELKFTELEKLLTTVHKGLLKALDLSMGQNIHVYSPIVSMQNIQKTPQTAKKALASRWLSWLSYLEDPRIRFFYDPQMPALKDLPAVDTGKDNKKHPSNFQHIFYTDGSAITSPTKEGHLNAGMGIVYFINKDGNLQKQQEWSISLGNHTAQFAEIAAFEFALKKCLPLGGNILVVTDSNYVAKAYNEELDVWASNGFVNNRKKPLKHISKWKSVADLKRLRPDVVVTHEPGHQKLDSSPHAYGNNLADQLATQASFKVHAGKRTADGSEFEKRTADGSEFESPKKKAKVE

SEQ ID NO: 1106 - protein, 2087 aa, synthetic construct
MPAAKRVKLDGGDKKYSIGLDIGTNSVGWAVITDEYKVPSKKFKVLGNTDRHSIKKNLIGALLFDSGETAEATRLKRTARRRYTRRKNRICYLQEIFSNEMAKVDDSFFHRLEESFLVEEDKKHERHPIFGNIVDEVAYHEKYPTIYHLRKKLVDSTDKADLRLIYLALAHMIKFRGHFLIEGDLNPDNSDVDKLFIQLVQTYNQLFEENPINASGVDAKAILSARLSKSRRLENLIAQLPGEKKNGLFGNLIALSLGLTPNFKSNFDLAEDAKLQLSKDTYDDDLDNLLAQIGDQYADLFLAAKNLSDAILLSDILRVNTEITKAPLSASMIKRYDEHHQDLTLLKALVRQQLPEKYKEIFFDQSKNGYAGYIDGGASQEEFYKFIKPILEKMDGTEELLVKLNREDLLRKQRTFDNGSIPHQIHLGELHAILRRQEDFYPFLKDNREKIEKILTFRIPYYVGPLARGNSRFAWMTRKSEETITPWNFEEVVDKGASAQSFIERMTNFDKNLPNEKVLPKHSLLYEYFTVYNELTKVKYVTEGMRKPAFLSGEQKKAIVDLLFKTNRKVTVKQLKEDYFKKIECFDSVEISGVEDRFNASLGTYHDLLKIIKDKDFLDNEENEDILEDIVLTLTLFEDREMIEERLKTYAHLFDDKVMKQLKRRRYTGWGRLSRKLINGIRDKQSGKTILDFLKSDGFANRNFMQLIHDDSLTFKEDIQKAQVSGQGDSLHEHIANLAGSPAIKKGILQTVKVVDELVKVMGRHKPENIVIEMARENQTTQKGQKNSRERMKRIEEGIKELGSQILKEHPVENTQLQNEKLYLYYLQNGRDMYVDQELDINRLSDYDVDHIVPQSFLKDDSIDNKVLTRSDKARGKSDNVPSEEVVKKMKNYWRQLLNAKLITQRKFDNLTKAERGGLSELDKAGFIKRQLVETRQITKHVAQILDSRMNTKYDENDKLIREVKVITLKSKLVSDFRKDFQFYKVREINNYHHAHDAYLNAVVGTALIKKYPKLESEFVYGDYKVYDVRKMIAKSEQEIGKATAKYFFYSNIMNFFKTEITLANGEIRKRPLIETNGETGEIVWDKGRDFATVRKVLSMPQVNIVKKTEVQTGGFSKESILPKRNSDKLIARKKDWDPKKYGGFDSPTVAYSVLVVAKVEKGKSKKLKSVKELLGITIMERSSFEKNPIDFLEAKGYKEVKKDLIIKLPKYSLFELENGRKRMLASAGELQKGNELALPSKYVNFLYLASHYEKLKGSPEDNEQKQLFVEQHKHYLDEIIEQISEFSKRVILADANLDKVLSAYNKHRDKPIREQAENIIHLFTLTNLGAPAAFKYFDTTIDRKRYTSTKEVLDATLIHQSITGLYETRIDLSQLGGDGGGGSGGGEAAAKGGVPWILKKPLELTIKLDLEEQQGTLLNNSILSKKGKEELKQLFEKYSALWQSWENQVGHRRIRPHKIATGTVKPTPQKQYHINPKAKPDIQIVINDLLKQGVLIQKESTMNTPVYPVPKPNGRWRMVLDYRAVNKVTPLIAVQNQHSYGILGSLFKGRYKTTIDLSNGFWAHPIVPEDYWITAFTWQGKQYCWTVLPQGFLNSPGLFNGDVVDLLQGIPNVEVYVDDVYISHDSEKEHLEYLDILFNRLKEAGYIISLKKSNIANSIVDFLGFQITNEGRGLTDTFKEKLENITAPTTLKQLQSILGLLNFARNFIPDFTELIAPLYALIPKSPKNYVPWQIEHSTTLETLITKLNGAEYLQGRKGDKTLIMKVNASYTTGYIRYYNEGEKKPISYVSIVFSKTELKFTELEKLLTTVHKGLLKALDLSMGQNIHVYSPIVSMQNIQKTPQTAKKALASRWLSWLSYLEDPRIRFFYDPQMPALKDLPAVDTGKDNKKHPSNFQHIFYTDGSAITSPTKEGHLNAGMGIVYFINKDGNLQKQQEWSISLGNHTAQFAEIAAFEFALKKCLPLGGNILVVTDSNYVAKAYNEELDVWASNGFVNNRKKPLKHISKWKSVADLKRLRPDVVVTHEPGHQKLDSSPHAYGNNLADQLATQASFKVHAGKRTADGSEFEKRTADGSEFESPKKKAKVE

SEQ ID NO: 1107 - protein, 2082 aa, synthetic construct
MPAAKRVKLDGGDKKYSIGLDIGTNSVGWAVITDEYKVPSKKFKVLGNTDRHSIKKNLIGALLFDSGETAEATRLKRTARRRYTRRKNRICYLQEIFSNEMAKVDDSFFHRLEESFLVEEDKKHERHPIFGNIVDEVAYHEKYPTIYHLRKKLVDSTDKADLRLIYLALAHMIKFRGHFLIEGDLNPDNSDVDKLFIQLVQTYNQLFEENPINASGVDAKAILSARLSKSRRLENLIAQLPGEKKNGLFGNLIALSLGLTPNFKSNFDLAEDAKLQLSKDTYDDDLDNLLAQIGDQYADLFLAAKNLSDAILLSDILRVNTEITKAPLSASMIKRYDEHHQDLTLLKALVRQQLPEKYKEIFFDQSKNGYAGYIDGGASQEEFYKFIKPILEKMDGTEELLVKLNREDLLRKQRTFDNGSIPHQIHLGELHAILRRQEDFYPFLKDNREKIEKILTFRIPYYVGPLARGNSRFAWMTRKSEETITPWNFEEVVDKGASAQSFIERMTNFDKNLPNEKVLPKHSLLYEYFTVYNELTKVKYVTEGMRKPAFLSGEQKKAIVDLLFKTNRKVTVKQLKEDYFKKIECFDSVEISGVEDRFNASLGTYHDLLKIIKDKDFLDNEENEDILEDIVLTLTLFEDREMIEERLKTYAHLFDDKVMKQLKRRRYTGWGRLSRKLINGIRDKQSGKTILDFLKSDGFANRNFMQLIHDDSLTFKEDIQKAQVSGQGDSLHEHIANLAGSPAIKKGILQTVKVVDELVKVMGRHKPENIVIEMARENQTTQKGQKNSRERMKRIEEGIKELGSQILKEHPVENTQLQNEKLYLYYLQNGRDMYVDQELDINRLSDYDVDHIVPQSFLKDDSIDNKVLTRSDKARGKSDNVPSEEVVKKMKNYWRQLLNAKLITQRKFDNLTKAERGGLSELDKAGFIKRQLVETRQITKHVAQILDSRMNTKYDENDKLIREVKVITLKSKLVSDFRKDFQFYKVREINNYHHAHDAYLNAVVGTALIKKYPKLESEFVYGDYKVYDVRKMIAKSEQEIGKATAKYFFYSNIMNFFKTEITLANGEIRKRPLIETNGETGEIVWDKGRDFATVRKVLSMPQVNIVKKTEVQTGGFSKESILPKRNSDKLIARKKDWDPKKYGGFDSPTVAYSVLVVAKVEKGKSKKLKSVKELLGITIMERSSFEKNPIDFLEAKGYKEVKKDLIIKLPKYSLFELENGRKRMLASAGELQKGNELALPSKYVNFLYLASHYEKLKGSPEDNEQKQLFVEQHKHYLDEIIEQISEFSKRVILADANLDKVLSAYNKHRDKPIREQAENIIHLFTLTNLGAPAAFKYFDTTIDRKRYTSTKEVLDATLIHQSITGLYETRIDLSQLGGDGGPAPGGSGGVPWILKKPLELTIKLDLEEQQGTLLNNSILSKKGKEELKQLFEKYSALWQSWENQVGHRRIRPHKIATGTVKPTPQKQYHINPKAKPDIQIVINDLLKQGVLIQKESTMNTPVYPVPKPNGRWRMVLDYRAVNKVTPLIAVQNQHSYGILGSLFKGRYKTTIDLSNGFWAHPIVPEDYWITAFTWQGKQYCWTVLPQGFLNSPGLFNGDVVDLLQGIPNVEVYVDDVYISHDSEKEHLEYLDILFNRLKEAGYIISLKKSNIANSIVDFLGFQITNEGRGLTDTFKEKLENITAPTTLKQLQSILGLLNFARNFIPDFTELIAPLYALIPKSPKNYVPWQIEHSTTLETLITKLNGAEYLQGRKGDKTLIMKVNASYTTGYIRYYNEGEKKPISYVSIVFSKTELKFTELEKLLTTVHKGLLKALDLSMGQNIHVYSPIVSMQNIQKTPQTAKKALASRWLSWLSYLEDPRIRFFYDPQMPALKDLPAVDTGKDNKKHPSNFQHIFYTDGSAITSPTKEGHLNAGMGIVYFINKDGNLQKQQEWSISLGNHTAQFAEIAAFEFALKKCLPLGGNILVVTDSNYVAKAYNEELDVWASNGFVNNRKKPLKHISKWKSVADLKRLRPDVVVTHEPGHQKLDSSPHAYGNNLADQLATQASFKVHAGKRTADGSEFEKRTADGSEFESPKKKAKVE

SEQ ID NO: 1108 - protein, 2084 aa, synthetic construct
MPAAKRVKLDGGDKKYSIGLDIGTNSVGWAVITDEYKVPSKKFKVLGNTDRHSIKKNLIGALLFDSGETAEATRLKRTARRRYTRRKNRICYLQEIFSNEMAKVDDSFFHRLEESFLVEEDKKHERHPIFGNIVDEVAYHEKYPTIYHLRKKLVDSTDKADLRLIYLALAHMIKFRGHFLIEGDLNPDNSDVDKLFIQLVQTYNQLFEENPINASGVDAKAILSARLSKSRRLENLIAQLPGEKKNGLFGNLIALSLGLTPNFKSNFDLAEDAKLQLSKDTYDDDLDNLLAQIGDQYADLFLAAKNLSDAILLSDILRVNTEITKAPLSASMIKRYDEHHQDLTLLKALVRQQLPEKYKEIFFDQSKNGYAGYIDGGASQEEFYKFIKPILEKMDGTEELLVKLNREDLLRKQRTFDNGSIPHQIHLGELHAILRRQEDFYPFLKDNREKIEKILTFRIPYYVGPLARGNSRFAWMTRKSEETITPWNFEEVVDKGASAQSFIERMTNFDKNLPNEKVLPKHSLLYEYFTVYNELTKVKYVTEGMRKPAFLSGEQKKAIVDLLFKTNRKVTVKQLKEDYFKKIECFDSVEISGVEDRFNASLGTYHDLLKIIKDKDFLDNEENEDILEDIVLTLTLFEDREMIEERLKTYAHLFDDKVMKQLKRRRYTGWGRLSRKLINGIRDKQSGKTILDFLKSDGFANRNFMQLIHDDSLTFKEDIQKAQVSGQGDSLHEHIANLAGSPAIKKGILQTVKVVDELVKVMGRHKPENIVIEMARENQTTQKGQKNSRERMKRIEEGIKELGSQILKEHPVENTQLQNEKLYLYYLQNGRDMYVDQELDINRLSDYDVDHIVPQSFLKDDSIDNKVLTRSDKARGKSDNVPSEEVVKKMKNYWRQLLNAKLITQRKFDNLTKAERGGLSELDKAGFIKRQLVETRQITKHVAQILDSRMNTKYDENDKLIREVKVITLKSKLVSDFRKDFQFYKVREINNYHHAHDAYLNAVVGTALIKKYPKLESEFVYGDYKVYDVRKMIAKSEQEIGKATAKYFFYSNIMNFFKTEITLANGEIRKRPLIETNGETGEIVWDKGRDFATVRKVLSMPQVNIVKKTEVQTGGFSKESILPKRNSDKLIARKKDWDPKKYGGFDSPTVAYSVLVVAKVEKGKSKKLKSVKELLGITIMERSSFEKNPIDFLEAKGYKEVKKDLIIKLPKYSLFELENGRKRMLASAGELQKGNELALPSKYVNFLYLASHYEKLKGSPEDNEQKQLFVEQHKHYLDEIIEQISEFSKRVILADANLDKVLSAYNKHRDKPIREQAENIIHLFTLTNLGAPAAFKYFDTTIDRKRYTSTKEVLDATLIHQSITGLYETRIDLSQLGGDGGGGGEAAAKGGVPWILKKPLELTIKLDLEEQQGTLLNNSILSKKGKEELKQLFEKYSALWQSWENQVGHRRIRPHKIATGTVKPTPQKQYHINPKAKPDIQIVINDLLKQGVLIQKESTMNTPVYPVPKPNGRWRMVLDYRAVNKVTPLIAVQNQHSYGILGSLFKGRYKTTIDLSNGFWAHPIVPEDYWITAFTWQGKQYCWTVLPQGFLNSPGLFNGDVVDLLQGIPNVEVYVDDVYISHDSEKEHLEYLDILFNRLKEAGYIISLKKSNIANSIVDFLGFQITNEGRGLTDTFKEKLENITAPTTLKQLQSILGLLNFARNFIPDFTELIAPLYALIPKSPKNYVPWQIEHSTTLETLITKLNGAEYLQGRKGDKTLIMKVNASYTTGYIRYYNEGEKKPISYVSIVFSKTELKFTELEKLLTTVHKGLLKALDLSMGQNIHVYSPIVSMQNIQKTPQTAKKALASRWLSWLSYLEDPRIRFFYDPQMPALKDLPAVDTGKDNKKHPSNFQHIFYTDGSAITSPTKEGHLNAGMGIVYFINKDGNLQKQQEWSISLGNHTAQFAEIAAFEFALKKCLPLGGNILVVTDSNYVAKAYNEELDVWASNGFVNNRKKPLKHISKWKSVADLKRLRPDVVVTHEPGHQKLDSSPHAYGNNLADQLATQASFKVHAGKRTADGSEFEKRTADGSEFESPKKKAKVE

SEQ ID NO: 1109 - protein, 2085 aa, synthetic construct
MPAAKRVKLDGGDKKYSIGLDIGTNSVGWAVITDEYKVPSKKFKVLGNTDRHSIKKNLIGALLFDSGETAEATRLKRTARRRYTRRKNRICYLQEIFSNEMAKVDDSFFHRLEESFLVEEDKKHERHPIFGNIVDEVAYHEKYPTIYHLRKKLVDSTDKADLRLIYLALAHMIKFRGHFLIEGDLNPDNSDVDKLFIQLVQTYNQLFEENPINASGVDAKAILSARLSKSRRLENLIAQLPGEKKNGLFGNLIALSLGLTPNFKSNFDLAEDAKLQLSKDTYDDDLDNLLAQIGDQYADLFLAAKNLSDAILLSDILRVNTEITKAPLSASMIKRYDEHHQDLTLLKALVRQQLPEKYKEIFFDQSKNGYAGYIDGGASQEEFYKFIKPILEKMDGTEELLVKLNREDLLRKQRTFDNGSIPHQIHLGELHAILRRQEDFYPFLKDNREKIEKILTFRIPYYVGPLARGNSRFAWMTRKSEETITPWNFEEVVDKGASAQSFIERMTNFDKNLPNEKVLPKHSLLYEYFTVYNELTKVKYVTEGMRKPAFLSGEQKKAIVDLLFKTNRKVTVKQLKEDYFKKIECFDSVEISGVEDRFNASLGTYHDLLKIIKDKDFLDNEENEDILEDIVLTLTLFEDREMIEERLKTYAHLFDDKVMKQLKRRRYTGWGRLSRKLINGIRDKQSGKTILDFLKSDGFANRNFMQLIHDDSLTFKEDIQKAQVSGQGDSLHEHIANLAGSPAIKKGILQTVKVVDELVKVMGRHKPENIVIEMARENQTTQKGQKNSRERMKRIEEGIKELGSQILKEHPVENTQLQNEKLYLYYLQNGRDMYVDQELDINRLSDYDVDHIVPQSFLKDDSIDNKVLTRSDKARGKSDNVPSEEVVKKMKNYWRQLLNAKLITQRKFDNLTKAERGGLSELDKAGFIKRQLVETRQITKHVAQILDSRMNTKYDENDKLIREVKVITLKSKLVSDFRKDFQFYKVREINNYHHAHDAYLNAVVGTALIKKYPKLESEFVYGDYKVYDVRKMIAKSEQEIGKATAKYFFYSNIMNFFKTEITLANGEIRKRPLIETNGETGEIVWDKGRDFATVRKVLSMPQVNIVKKTEVQTGGFSKESILPKRNSDKLIARKKDWDPKKYGGFDSPTVAYSVLVVAKVEKGKSKKLKSVKELLGITIMERSSFEKNPIDFLEAKGYKEVKKDLIIKLPKYSLFELENGRKRMLASAGELQKGNELALPSKYVNFLYLASHYEKLKGSPEDNEQKQLFVEQHKHYLDEIIEQISEFSKRVILADANLDKVLSAYNKHRDKPIREQAENIIHLFTLTNLGAPAAFKYFDTTIDRKRYTSTKEVLDATLIHQSITGLYETRIDLSQLGGDGGGGGGSSPAPGGVPWILKKPLELTIKLDLEEQQGTLLNNSILSKKGKEELKQLFEKYSALWQSWENQVGHRRIRPHKIATGTVKPTPQKQYHINPKAKPDIQIVINDLLKQGVLIQKESTMNTPVYPVPKPNGRWRMVLDYRAVNKVTPLIAVQNQHSYGILGSLFKGRYKTTIDLSNGFWAHPIVPEDYWITAFTWQGKQYCWTVLPQGFLNSPGLFNGDVVDLLQGIPNVEVYVDDVYISHDSEKEHLEYLDILFNRLKEAGYIISLKKSNIANSIVDFLGFQITNEGRGLTDTFKEKLENITAPTTLKQLQSILGLLNFARNFIPDFTELIAPLYALIPKSPKNYVPWQIEHSTTLETLITKLNGAEYLQGRKGDKTLIMKVNASYTTGYIRYYNEGEKKPISYVSIVFSKTELKFTELEKLLTTVHKGLLKALDLSMGQNIHVYSPIVSMQNIQKTPQTAKKALASRWLSWLSYLEDPRIRFFYDPQMPALKDLPAVDTGKDNKKHPSNFQHIFYTDGSAITSPTKEGHLNAGMGIVYFINKDGNLQKQQEWSISLGNHTAQFAEIAAFEFALKKCLPLGGNILVVTDSNYVAKAYNEELDVWASNGFVNNRKKPLKHISKWKSVADLKRLRPDVVVTHEPGHQKLDSSPHAYGNNLADQLATQASFKVHAGKRTADGSEFEKRTADGSEFESPKKKAKVE

SEQ ID NO: 1110 - protein, 2085 aa, synthetic construct
MPAAKRVKLDGGDKKYSIGLDIGTNSVGWAVITDEYKVPSKKFKVLGNTDRHSIKKNLIGALLFDSGETAEATRLKRTARRRYTRRKNRICYLQEIFSNEMAKVDDSFFHRLEESFLVEEDKKHERHPIFGNIVDEVAYHEKYPTIYHLRKKLVDSTDKADLRLIYLALAHMIKFRGHFLIEGDLNPDNSDVDKLFIQLVQTYNQLFEENPINASGVDAKAILSARLSKSRRLENLIAQLPGEKKNGLFGNLIALSLGLTPNFKSNFDLAEDAKLQLSKDTYDDDLDNLLAQIGDQYADLFLAAKNLSDAILLSDILRVNTEITKAPLSASMIKRYDEHHQDLTLLKALVRQQLPEKYKEIFFDQSKNGYAGYIDGGASQEEFYKFIKPILEKMDGTEELLVKLNREDLLRKQRTFDNGSIPHQIHLGELHAILRRQEDFYPFLKDNREKIEKILTFRIPYYVGPLARGNSRFAWMTRKSEETITPWNFEEVVDKGASAQSFIERMTNFDKNLPNEKVLPKHSLLYEYFTVYNELTKVKYVTEGMRKPAFLSGEQKKAIVDLLFKTNRKVTVKQLKEDYFKKIECFDSVEISGVEDRFNASLGTYHDLLKIIKDKDFLDNEENEDILEDIVLTLTLFEDREMIEERLKTYAHLFDDKVMKQLKRRRYTGWGRLSRKLINGIRDKQSGKTILDFLKSDGFANRNFMQLIHDDSLTFKEDIQKAQVSGQGDSLHEHIANLAGSPAIKKGILQTVKVVDELVKVMGRHKPENIVIEMARENQTTQKGQKNSRERMKRIEEGIKELGSQILKEHPVENTQLQNEKLYLYYLQNGRDMYVDQELDINRLSDYDVDHIVPQSFLKDDSIDNKVLTRSDKARGKSDNVPSEEVVKKMKNYWRQLLNAKLITQRKFDNLTKAERGGLSELDKAGFIKRQLVETRQITKHVAQILDSRMNTKYDENDKLIREVKVITLKSKLVSDFRKDFQFYKVREINNYHHAHDAYLNAVVGTALIKKYPKLESEFVYGDYKVYDVRKMIAKSEQEIGKATAKYFFYSNIMNFFKTEITLANGEIRKRPLIETNGETGEIVWDKGRDFATVRKVLSMPQVNIVKKTEVQTGGFSKESILPKRNSDKLIARKKDWDPKKYGGFDSPTVAYSVLVVAKVEKGKSKKLKSVKELLGITIMERSSFEKNPIDFLEAKGYKEVKKDLIIKLPKYSLFELENGRKRMLASAGELQKGNELALPSKYVNFLYLASHYEKLKGSPEDNEQKQLFVEQHKHYLDEIIEQISEFSKRVILADANLDKVLSAYNKHRDKPIREQAENIIHLFTLTNLGAPAAFKYFDTTIDRKRYTSTKEVLDATLIHQSITGLYETRIDLSQLGGDGGPAPGGSGSSGGVPWILKKPLELTIKLDLEEQQGTLLNNSILSKKGKEELKQLFEKYSALWQSWENQVGHRRIRPHKIATGTVKPTPQKQYHINPKAKPDIQIVINDLLKQGVLIQKESTMNTPVYPVPKPNGRWRMVLDYRAVNKVTPLIAVQNQHSYGILGSLFKGRYKTTIDLSNGFWAHPIVPEDYWITAFTWQGKQYCWTVLPQGFLNSPGLFNGDVVDLLQGIPNVEVYVDDVYISHDSEKEHLEYLDILFNRLKEAGYIISLKKSNIANSIVDFLGFQITNEGRGLTDTFKEKLENITAPTTLKQLQSILGKLNFARNFIPDFTELIAPLYALIPKSPKNYVPWQIEHSTTLETLITKLNGAEYLQGRKGDKTLIMKVNASYTTGYIRYYNEGEKKPISYVSIVFSKTELKFTELEKLLTTVHKGLLKALDLSMGQNIHVYSPIVSMQNIQKTPQTAKKALASRWLSWLSYLEDPRIRFFYDPQMPALKDLPAVDTGKDNKKHPSNFQHIFYTDGSAITSPTKEGHLNAGMGIVYFINKDGNLQKQQEWSISLGNHTAQFAEIAAFEFALKKCLPLGGNILVVTDSNYVAKAYNEELDVWASNGFVNNRKKPLKHISKWKSVADLKRLRPDVVVTHEPGHQKLDSSPHAYGNNLADQLATQASFKVHAGKRTADGSEFEKRTADGSEFESPKKKAKVE

SEQ ID NO: 1111 - protein, 2087 aa, synthetic construct
MPAAKRVKLDGGDKKYSIGLDIGTNSVGWAVITDEYKVPSKKFKVLGNTDRHSIKKNLIGALLFDSGETAEATRLKRTARRRYTRRKNRICYLQEIFSNEMAKVDDSFFHRLEESFLVEEDKKHERHPIFGNIVDEVAYHEKYPTIYHLRKKLVDSTDKADLRLIYLALAHMIKFRGHFLIEGDLNPDNSDVDKLFIQLVQTYNQLFEENPINASGVDAKAILSARLSKSRRLENLIAQLPGEKKNGLFGNLIALSLGLTPNFKSNFDLAEDAKLQLSKDTYDDDLDNLLAQIGDQYADLFLAAKNLSDAILLSDILRVNTEITKAPLSASMIKRYDEHHQDLTLLKALVRQQLPEKYKEIFFDQSKNGYAGYIDGGASQEEFYKFIKPILEKMDGTEELLVKLNREDLLRKQRTFDNGSIPHQIHLGELHAILRRQEDFYPFLKDNREKIEKILTFRIPYYVGPLARGNSRFAWMTRKSEETITPWNFEEVVDKGASAQSFIERMTNFDKNLPNEKVLPKHSLLYEYFTVYNELTKVKYVTEGMRKPAFLSGEQKKAIVDLLFKTNRKVTVKQLKEDYFKKIECFDSVEISGVEDRFNASLGTYHDLLKIIKDKDFLDNEENEDILEDIVLTLTLFEDREMIEERLKTYAHLFDDKVMKQLKRRRYTGWGRLSRKLINGIRDKQSGKTILDFLKSDGFANRNFMQLIHDDSLTFKEDIQKAQVSGQGDSLHEHIANLAGSPAIKKGILQTVKVVDELVKVMGRHKPENIVIEMARENQTTQKGQKNSRERMKRIEEGIKELGSQILKEHPVENTQLQNEKLYLYYLQNGRDMYVDQELDINRLSDYDVDHIVPQSFLKDDSIDNKVLTRSDKARGKSDNVPSEEVVKKMKNYWRQLLNAKLITQRKFDNLTKAERGGLSELDKAGFIKRQLVETRQITKHVAQILDSRMNTKYDENDKLIREVKVITLKSKLVSDFRKDFQFYKVREINNYHHAHDAYLNAVVGTALIKKYPKLESEFVYGDYKVYDVRKMIAKSEQEIGKATAKYFFYSNIMNFFKTEITLANGEIRKRPLIETNGETGEIVWDKGRDFATVRKVLSMPQVNIVKKTEVQTGGFSKESILPKRNSDKLIARKKDWDPKKYGGFDSPTVAYSVLVVAKVEKGKSKKLKSVKELLGITIMERSSFEKNPIDFLEAKGYKEVKKDLIIKLPKYSLFELENGRKRMLASAGELQKGNELALPSKYVNFLYLASHYEKLKGSPEDNEQKQLFVEQHKHYLDEIIEQISEFSKRVILADANLDKVLSAYNKHRDKPIREQAENIIHLFTLTNLGAPAAFKYFDTTIDRKRYTSTKEVLDATLIHQSITGLYETRIDLSQLGGDGGGSSEAAAKGGGGGVPWILKKPLELTIKLDLEEQQGTLLNNSILSKKGKEELKQLFEKYSALWQSWENQVGHRRIRPHKIATGTVKPTPQKQYHINPKAKPDIQIVINDLLKQGVLIQKESTMNTPVYPVPKPNGRWRMVLDYRAVNKVTPLIAVQNQHSYGILGSLFKGRYKTTIDLSNGFWAHPIVPEDYWITAFTWQGKQYCWTVLPQGFLNSPGLFNGDVVDLLQGIPNVEVYVDDVYISHDSEKEHLEYLDILFNRLKEAGYIISLKKSNIANSIVDFLGFQITNEGRGLTDTFKEKLENITAPTTLKQLQSILGKLNFARNFIPDFTELIAPLYALIPKSPKNYVPWQIEHSTTLETLITKLNGAEYLQGRKGDKTLIMKVNASYTTGYIRYYNEGEKKPISYVSIVFSKTELKFTELEKLLTTVHKGLLKALDLSMGQNIHVYSPIVSMQNIQKTPQTAKKALASRWLSWLSYLEDPRIRFFYDPQMPALKDLPAVDTGKDNKKHPSNFQHIFYTDGSAITSPTKEGHLNAGMGIVYFINKDGNLQKQQEWSISLGNHTAQFAEIAAFEFALKKCLPLGGNILVVTDSNYVAKAYNEELDVWASNGFVNNRKKPLKHISKWKSVADLKRLRPDVVVTHEPGHQKLDSSPHAYGNNLADQLATQASFKVHAGKRTADGSEFEKRTADGSEFESPKKKAKVE

SEQ ID NO: 1112 - protein, 2091 aa, synthetic construct
MPAAKRVKLDGGDKKYSIGLDIGTNSVGWAVITDEYKVPSKKFKVLGNTDRHSIKKNLIGALLFDSGETAEATRLKRTARRRYTRRKNRICYLQEIFSNEMAKVDDSFFHRLEESFLVEEDKKHERHPIFGNIVDEVAYHEKYPTIYHLRKKLVDSTDKADLRLIYLALAHMIKFRGHFLIEGDLNPDNSDVDKLFIQLVQTYNQLFEENPINASGVDAKAILSARLSKSRRLENLIAQLPGEKKNGLFGNLIALSLGLTPNFKSNFDLAEDAKLQLSKDTYDDDLDNLLAQIGDQYADLFLAAKNLSDAILLSDILRVNTEITKAPLSASMIKRYDEHHQDLTLLKALVRQQLPEKYKEIFFDQSKNGYAGYIDGGASQEEFYKFIKPILEKMDGTEELLVKLNREDLLRKQRTFDNGSIPHQIHLGELHAILRRQEDFYPFLKDNREKIEKILTFRIPYYVGPLARGNSRFAWMTRKSEETITPWNFEEVVDKGASAQSFIERMTNFDKNLPNEKVLPKHSLLYEYFTVYNELTKVKYVTEGMRKPAFLSGEQKKAIVDLLFKTNRKVTVKQLKEDYFKKIECFDSVEISGVEDRFNASLGTYHDLLKIIKDKDFLDNEENEDILEDIVLTLTLFEDREMIEERLKTYAHLFDDKVMKQLKRRRYTGWGRLSRKLINGIRDKQSGKTILDFLKSDGFANRNFMQLIHDDSLTFKEDIQKAQVSGQGDSLHEHIANLAGSPAIKKGILQTVKVVDELVKVMGRHKPENIVIEMARENQTTQKGQKNSRERMKRIEEGIKELGSQILKEHPVENTQLQNEKLYLYYLQNGRDMYVDQELDINRLSDYDVDHIVPQSFLKDDSIDNKVLTRSDKARGKSDNVPSEEVVKKMKNYWRQLLNAKLITQRKFDNLTKAERGGLSELDKAGFIKRQLVETRQITKHVAQILDSRMNTKYDENDKLIREVKVITLKSKLVSDFRKDFQFYKVREINNYHHAHDAYLNAVVGTALIKKYPKLESEFVYGDYKVYDVRKMIAKSEQEIGKATAKYFFYSNIMNFFKTEITLANGEIRKRPLIETNGETGEIVWDKGRDFATVRKVLSMPQVNIVKKTEVQTGGFSKESILPKRNSDKLIARKKDWDPKKYGGFDSPTVAYSVLVVAKVEKGKSKKLKSVKELLGITIMERSSFEKNPIDFLEAKGYKEVKKDLIIKLPKYSLFELENGRKRMLASAGELQKGNELALPSKYVNFLYLASHYEKLKGSPEDNEQKQLFVEQHKHYLDEIIEQISEFSKRVILADANLDKVLSAYNKHRDKPIREQAENIIHLFTLTNLGAPAAFKYFDTTIDRKRYTSTKEVLDATLIHQSITGLYETRIDLSQLGGDGGGSSGSSGSSGSSGSSGGVPWILKKPLELTIKLDLEEQQGTLLNNSILSKKGKEELKQLFEKYSALWQSWENQVGHRRIRPHKIATGTVKPTPQKQYHINPKAKPDIQIVINDLLKQGVLIQKESTMNTPVYPVPKPNGRWRMVLDYRAVNKVTPLIAVQNQHSYGILGSLFKGRYKTTIDLSNGFWAHPIVPEDYWITAFTWQGKQYCWTVLPQGFLNSPGLFNGDVVDLLQGIPNVEVYVDDVYISHDSEKEHLEYLDILFNRLKEAGYIISLKKSNIANSIVDFLGFQITNEGRGLTDTFKEKLENITAPTTLKQLQSILGKLNFARNFIPDFTELIAPLYALIPKSPKNYVPWQIEHSTTLETLITKLNGAEYLQGRKGDKTLIMKVNASYTTGYIRYYNEGEKKPISYVSIVFSKTELKFTELEKLLTTVHKGLLKALDLSMGQNIHVYSPIVSMQNIQKTPQTAKKALASRWLSWLSYLEDPRIRFFYDPQMPALKDLPAVDTGKDNKKHPSNFQHIFYTDGSAITSPTKEGHLNAGMGIVYFINKDGNLQKQQEWSISLGNHTAQFAEIAAFEFALKKCLPLGGNILVVTDSNYVAKAYNEELDVWASNGFVNNRKKPLKHISKWKSVADLKRLRPDVVVTHEPGHQKLDSSPHAYGNNLADQLATQASFKVHAGKRTADGSEFEKRTADGSEFESPKKKAKVE

SEQ ID NO: 1113 - protein, 2087 aa, synthetic construct
MPAAKRVKLDGGDKKYSIGLDIGTNSVGWAVITDEYKVPSKKFKVLGNTDRHSIKKNLIGALLFDSGETAEATRLKRTARRRYTRRKNRICYLQEIFSNEMAKVDDSFFHRLEESFLVEEDKKHERHPIFGNIVDEVAYHEKYPTIYHLRKKLVDSTDKADLRLIYLALAHMIKFRGHFLIEGDLNPDNSDVDKLFIQLVQTYNQLFEENPINASGVDAKAILSARLSKSRRLENLIAQLPGEKKNGLFGNLIALSLGLTPNFKSNFDLAEDAKLQLSKDTYDDDLDNLLAQIGDQYADLFLAAKNLSDAILLSDILRVNTEITKAPLSASMIKRYDEHHQDLTLLKALVRQQLPEKYKEIFFDQSKNGYAGYIDGGASQEEFYKFIKPILEKMDGTEELLVKLNREDLLRKQRTFDNGSIPHQIHLGELHAILRRQEDFYPFLKDNREKIEKILTFRIPYYVGPLARGNSRFAWMTRKSEETITPWNFEEVVDKGASAQSFIERMTNFDKNLPNEKVLPKHSLLYEYFTVYNELTKVKYVTEGMRKPAFLSGEQKKAIVDLLFKTNRKVTVKQLKEDYFKKIECFDSVEISGVEDRFNASLGTYHDLLKIIKDKDFLDNEENEDILEDIVLTLTLFEDREMIEERLKTYAHLFDDKVMKQLKRRRYTGWGRLSRKLINGIRDKQSGKTILDFLKSDGFANRNFMQLIHDDSLTFKEDIQKAQVSGQGDSLHEHIANLAGSPAIKKGILQTVKVVDELVKVMGRHKPENIVIEMARENQTTQKGQKNSRERMKRIEEGIKELGSQILKEHPVENTQLQNEKLYLYYLQNGRDMYVDQELDINRLSDYDVDHIVPQSFLKDDSIDNKVLTRSDKARGKSDNVPSEEVVKKMKNYWRQLLNAKLITQRKFDNLTKAERGGLSELDKAGFIKRQLVETRQITKHVAQILDSRMNTKYDENDKLIREVKVITLKSKLVSDFRKDFQFYKVREINNYHHAHDAYLNAVVGTALIKKYPKLESEFVYGDYKVYDVRKMIAKSEQEIGKATAKYFFYSNIMNFFKTEITLANGEIRKRPLIETNGETGEIVWDKGRDFATVRKVLSMPQVNIVKKTEVQTGGFSKESILPKRNSDKLIARKKDWDPKKYGGFDSPTVAYSVLVVAKVEKGKSKKLKSVKELLGITIMERSSFEKNPIDFLEAKGYKEVKKDLIIKLPKYSLFELENGRKRMLASAGELQKGNELALPSKYVNFLYLASHYEKLKGSPEDNEQKQLFVEQHKHYLDEIIEQISEFSKRVILADANLDKVLSAYNKHRDKPIREQAENIIHLFTLTNLGAPAAFKYFDTTIDRKRYTSTKEVLDATLIHQSITGLYETRIDLSQLGGDGGGGSEAAAKGGGGGVPWILKKPLELTIKLDLEEQQGTLLNNSILSKKGKEELKQLFEKYSALWQSWENQVGHRRIRPHKIATGTVKPTPQKQYHINPKAKPDIQIVINDLLKQGVLIQKESTMNTPVYPVPKPNGRWRMVLDYRAVNKVTPLIAVQNQHSYGILGSLFKGRYKTTIDLSNGFWAHPIVPEDYWITAFTWQGKQYCWTVLPQGFLNSPGLFNGDVVDLLQGIPNVEVYVDDVYISHDSEKEHLEYLDILFNRLKEAGYIISLKKSNIANSIVDFLGFQITNEGRGLTDTFKEKLENITAPTTLKQLQSILGKLNFARNFIPDFTELIAPLYALIPKSPKNYVPWQIEHSTTLETLITKLNGAEYLQGRKGDKTLIMKVNASYTTGYIRYYNEGEKKPISYVSIVFSKTELKFTELEKLLTTVHKGLLKALDLSMGQNIHVYSPIVSMQNIQKTPQTAKKALASRWLSWLSYLEDPRIRFFYDPQMPALKDLPAVDTGKDNKKHPSNFQHIFYTDGSAITSPTKEGHLNAGMGIVYFINKDGNLQKQQEWSISLGNHTAQFAEIAAFEFALKKCLPLGGNILVVTDSNYVAKAYNEELDVWASNGFVNNRKKPLKHISKWKSVADLKRLRPDVVVTHEPGHQKLDSSPHAYGNNLADQLATQASFKVHAGKRTADGSEFEKRTADGSEFESPKKKAKVE

SEQ ID NO: 1114 - protein, 2087 aa, synthetic construct
MPAAKRVKLDGGDKKYSIGLDIGTNSVGWAVITDEYKVPSKKFKVLGNTDRHSIKKNLIGALLFDSGETAEATRLKRTARRRYTRRKNRICYLQEIFSNEMAKVDDSFFHRLEESFLVEEDKKHERHPIFGNIVDEVAYHEKYPTIYHLRKKLVDSTDKADLRLIYLALAHMIKFRGHFLIEGDLNPDNSDVDKLFIQLVQTYNQLFEENPINASGVDAKAILSARLSKSRRLENLIAQLPGEKKNGLFGNLIALSLGLTPNFKSNFDLAEDAKLQLSKDTYDDDLDNLLAQIGDQYADLFLAAKNLSDAILLSDILRVNTEITKAPLSASMIKRYDEHHQDLTLLKALVRQQLPEKYKEIFFDQSKNGYAGYIDGGASQEEFYKFIKPILEKMDGTEELLVKLNREDLLRKQRTFDNGSIPHQIHLGELHAILRRQEDFYPFLKDNREKIEKILTFRIPYYVGPLARGNSRFAWMTRKSEETITPWNFEEVVDKGASAQSFIERMTNFDKNLPNEKVLPKHSLLYEYFTVYNELTKVKYVTEGMRKPAFLSGEQKKAIVDLLFKTNRKVTVKQLKEDYFKKIECFDSVEISGVEDRFNASLGTYHDLLKIIKDKDFLDNEENEDILEDIVLTLTLFEDREMIEERLKTYAHLFDDKVMKQLKRRRYTGWGRLSRKLINGIRDKQSGKTILDFLKSDGFANRNFMQLIHDDSLTFKEDIQKAQVSGQGDSLHEHIANLAGSPAIKKGILQTVKVVDELVKVMGRHKPENIVIEMARENQTTQKGQKNSRERMKRIEEGIKELGSQILKEHPVENTQLQNEKLYLYYLQNGRDMYVDQELDINRLSDYDVDHIVPQSFLKDDSIDNKVLTRSDKARGKSDNVPSEEVVKKMKNYWRQLLNAKLITQRKFDNLTKAERGGLSELDKAGFIKRQLVETRQITKHVAQILDSRMNTKYDENDKLIREVKVITLKSKLVSDFRKDFQFYKVREINNYHHAHDAYLNAVVGTALIKKYPKLESEFVYGDYKVYDVRKMIAKSEQEIGKATAKYFFYSNIMNFFKTEITLANGEIRKRPLIETNGETGEIVWDKGRDFATVRKVLSMPQVNIVKKTEVQTGGFSKESILPKRNSDKLIARKKDWDPKKYGGFDSPTVAYSVLVVAKVEKGKSKKLKSVKELLGITIMERSSFEKNPIDFLEAKGYKEVKKDLIIKLPKYSLFELENGRKRMLASAGELQKGNELALPSKYVNFLYLASHYEKLKGSPEDNEQKQLFVEQHKHYLDEIIEQISEFSKRVILADANLDKVLSAYNKHRDKPIREQAENIIHLFTLTNLGAPAAFKYFDTTIDRKRYTSTKEVLDATLIHQSITGLYETRIDLSQLGGDGGGGGEAAAKGGSGGVPWILKKPLELTIKLDLEEQQGTLLNNSILSKKGKEELKQLFEKYSALWQSWENQVGHRRIRPHKIATGTVKPTPQKQYHINPKAKPDIQIVINDLLKQGVLIQKESTMNTPVYPVPKPNGRWRMVLDYRAVNKVTPLIAVQNQHSYGILGSLFKGRYKTTIDLSNGFWAHPIVPEDYWITAFTWQGKQYCWTVLPQGFLNSPGLFNGDVVDLLQGIPNVEVYVDDVYISHDSEKEHLEYLDILFNRLKEAGYIISLKKSNIANSIVDFLGFQITNEGRGLTDTFKEKLENITAPTTLKQLQSILGKLNFARNFIPDFTELIAPLYALIPKSPKNYVPWQIEHSTTLETLITKLNGAEYLQGRKGDKTLIMKVNASYTTGYIRYYNEGEKKPISYVSIVFSKTELKFTELEKLLTTVHKGLLKALDLSMGQNIHVYSPIVSMQNIQKTPQTAKKALASRWLSWLSYLEDPRIRFFYDPQMPALKDLPAVDTGKDNKKHPSNFQHIFYTDGSAITSPTKEGHLNAGMGIVYFINKDGNLQKQQEWSISLGNHTAQFAEIAAFEFALKKCLPLGGNILVVTDSNYVAKAYNEELDVWASNGFVNNRKKPLKHISKWKSVADLKRLRPDVVVTHEPGHQKLDSSPHAYGNNLADQLATQASFKVHAGKRTADGSEFEKRTADGSEFESPKKKAKVE

SEQ ID NO: 1115 - protein, 2208 aa, synthetic construct
MPAAKRVKLDGGDKKYSIGLDIGTNSVGWAVITDEYKVPSKKFKVLGNTDRHSIKKNLIGALLFDSGETAEATRLKRTARRRYTRRKNRICYLQEIFSNEMAKVDDSFFHRLEESFLVEEDKKHERHPIFGNIVDEVAYHEKYPTIYHLRKKLVDSTDKADLRLIYLALAHMIKFRGHFLIEGDLNPDNSDVDKLFIQLVQTYNQLFEENPINASGVDAKAILSARLSKSRRLENLIAQLPGEKKNGLFGNLIALSLGLTPNFKSNFDLAEDAKLQLSKDTYDDDLDNLLAQIGDQYADLFLAAKNLSDAILLSDILRVNTEITKAPLSASMIKRYDEHHQDLTLLKALVRQQLPEKYKEIFFDQSKNGYAGYIDGGASQEEFYKFIKPILEKMDGTEELLVKLNREDLLRKQRTFDNGSIPHQIHLGELHAILRRQEDFYPFLKDNREKIEKILTFRIPYYVGPLARGNSRFAWMTRKSEETITPWNFEEVVDKGASAQSFIERMTNFDKNLPNEKVLPKHSLLYEYFTVYNELTKVKYVTEGMRKPAFLSGEQKKAIVDLLFKTNRKVTVKQLKEDYFKKIECFDSVEISGVEDRFNASLGTYHDLLKIIKDKDFLDNEENEDILEDIVLTLTLFEDREMIEERLKTYAHLFDDKVMKQLKRRRYTGWGRLSRKLINGIRDKQSGKTILDFLKSDGFANRNFMQLIHDDSLTFKEDIQKAQVSGQGDSLHEHIANLAGSPAIKKGILQTVKVVDELVKVMGRHKPENIVIEMARENQTTQKGQKNSRERMKRIEEGIKELGSQILKEHPVENTQLQNEKLYLYYLQNGRDMYVDQELDINRLSDYDVDHIVPQSFLKDDSIDNKVLTRSDKARGKSDNVPSEEVVKKMKNYWRQLLNAKLITQRKFDNLTKAERGGLSELDKAGFIKRQLVETRQITKHVAQILDSRMNTKYDENDKLIREVKVITLKSKLVSDFRKDFQFYKVREINNYHHAHDAYLNAVVGTALIKKYPKLESEFVYGDYKVYDVRKMIAKSEQEIGKATAKYFFYSNIMNFFKTEITLANGEIRKRPLIETNGETGEIVWDKGRDFATVRKVLSMPQVNIVKKTEVQTGGFSKESILPKRNSDKLIARKKDWDPKKYGGFDSPTVAYSVLVVAKVEKGKSKKLKSVKELLGITIMERSSFEKNPIDFLEAKGYKEVKKDLIIKLPKYSLFELENGRKRMLASAGELQKGNELALPSKYVNFLYLASHYEKLKGSPEDNEQKQLFVEQHKHYLDEIIEQISEFSKRVILADANLDKVLSAYNKHRDKPIREQAENIIHLFTLTNLGAPAAFKYFDTTIDRKRYTSTKEVLDATLIHQSITGLYETRIDLSQLGGDGGAEAAAKEAAAKEAAAKEAAAKALEAEAAAKEAAAKEAAAKEAAAKAGGMDLLKPLTVERKGVKIKGYWNSQADITCVPKDLLQGEEPVRQQNVTTIHGTQEGDVYYVNLKIDGRRINTEVIGTTLDYAIITPGDVPWILKKPLELTIKLDLEEQQGTLLNNSILSKKGKEELKQLFEKYSALWQSWENQVGHRRIRPHKIATGTVKPTPQKQYHINPKAKPDIQIVINDLLKQGVLIQKESTMNTPVYPVPKPNGRWRMVLDYRAVNKVTPLIAVQNQHSYGILGSLFKGRYKTTIDLSNGFWAHPIVPEDYWITAFTWQGKQYCWTVLPQGFLNSPGLFNGDVVDLLQGIPNVEVYVDDVYISHDSEKEHLEYLDILFNRLKEAGYIISLKKSNIANSIVDFLGFQITNEGRGLTDTFKEKLENITAPTTLKQLQSILGLLNFARNFIPDFTELIAPLYALIPKSPKNYVPWQIEHSTTLETLITKLNGAEYLQGRKGDKTLIMKVNASYTTGYIRYYNEGEKKPISYVSIVFSKTELKFTELEKLLTTVHKGLLKALDLSMGQNIHVYSPIVSMQNIQKTPQTAKKALASRWLSWLSYLEDPRIRFFYDPQMPALKDLPAVDTGKDNKKHPSNFQHIFYTDGSAITSPTKEGHLNAGMGIVYFINKDGNLQKQQEWSISLGNHTAQFAEIAAFEFALKKCLPLGGNILVVTDSNYVAKAYNEELDVWASNGFVNNRKKPLKHISKWKSVADLKRLRPDVVVTHEPGHQKLDSSPHAYGNNLADQLATQASFKVHAGKRTADGSEFEKRTADGSEFESPKKKAKVE

SEQ ID NO: 1116 - protein, 2182 aa, synthetic construct
MPAAKRVKLDGGDKKYSIGLDIGTNSVGWAVITDEYKVPSKKFKVLGNTDRHSIKKNLIGALLFDSGETAEATRLKRTARRRYTRRKNRICYLQEIFSNEMAKVDDSFFHRLEESFLVEEDKKHERHPIFGNIVDEVAYHEKYPTIYHLRKKLVDSTDKADLRLIYLALAHMIKFRGHFLIEGDLNPDNSDVDKLFIQLVQTYNQLFEENPINASGVDAKAILSARLSKSRRLENLIAQLPGEKKNGLFGNLIALSLGLTPNFKSNFDLAEDAKLQLSKDTYDDDLDNLLAQIGDQYADLFLAAKNLSDAILLSDILRVNTEITKAPLSASMIKRYDEHHQDLTLLKALVRQQLPEKYKEIFFDQSKNGYAGYIDGGASQEEFYKFIKPILEKMDGTEELLVKLNREDLLRKQRTFDNGSIPHQIHLGELHAILRRQEDFYPFLKDNREKIEKILTFRIPYYVGPLARGNSRFAWMTRKSEETITPWNFEEVVDKGASAQSFIERMTNFDKNLPNEKVLPKHSLLYEYFTVYNELTKVKYVTEGMRKPAFLSGEQKKAIVDLLFKTNRKVTVKQLKEDYFKKIECFDSVEISGVEDRFNASLGTYHDLLKIIKDKDFLDNEENEDILEDIVLTLTLFEDREMIEERLKTYAHLFDDKVMKQLKRRRYTGWGRLSRKLINGIRDKQSGKTILDFLKSDGFANRNFMQLIHDDSLTFKEDIQKAQVSGQGDSLHEHIANLAGSPAIKKGILQTVKVVDELVKVMGRHKPENIVIEMARENQTTQKGQKNSRERMKRIEEGIKELGSQILKEHPVENTQLQNEKLYLYYLQNGRDMYVDQELDINRLSDYDVDHIVPQSFLKDDSIDNKVLTRSDKARGKSDNVPSEEVVKKMKNYWRQLLNAKLITQRKFDNLTKAERGGLSELDKAGFIKRQLVETRQITKHVAQILDSRMNTKYDENDKLIREVKVITLKSKLVSDFRKDFQFYKVREINNYHHAHDAYLNAVVGTALIKKYPKLESEFVYGDYKVYDVRKMIAKSEQEIGKATAKYFFYSNIMNFFKTEITLANGEIRKRPLIETNGETGEIVWDKGRDFATVRKVLSMPQVNIVKKTEVQTGGFSKESILPKRNSDKLIARKKDWDPKKYGGFDSPTVAYSVLVVAKVEKGKSKKLKSVKELLGITIMERSSFEKNPIDFLEAKGYKEVKKDLIIKLPKYSLFELENGRKRMLASAGELQKGNELALPSKYVNFLYLASHYEKLKGSPEDNEQKQLFVEQHKHYLDEIIEQISEFSKRVILADANLDKVLSAYNKHRDKPIREQAENIIHLFTLTNLGAPAAFKYFDTTIDRKRYTSTKEVLDATLIHQSITGLYETRIDLSQLGGDGGEAAAKEAAAKEAAAKEAAAKGGMDLLKPLTVERKGVKIKGYWNSQADITCVPKDLLQGEEPVRQQNVTTIHGTQEGDVYYVNLKIDGRRINTEVIGTTLDYAIITPGDVPWILKKPLELTIKLDLEEQQGTLLNNSILSKKGKEELKQLFEKYSALWQSWENQVGHRRIRPHKIATGTVKPTPQKQYHINPKAKPDIQIVINDLLKQGVLIQKESTMNTPVYPVPKPNGRWRMVLDYRAVNKVTPLIAVQNQHSYGILGSLFKGRYKTTIDLSNGFWAHPIVPEDYWITAFTWQGKQYCWTVLPQGFLNSPGLFNGDVVDLLQGIPNVEVYVDDVYISHDSEKEHLEYLDILFNRLKEAGYIISLKKSNIANSIVDFLGFQITNEGRGLTDTFKEKLENITAPTTLKQLQSILGLLNFARNFIPDFTELIAPLYALIPKSPKNYVPWQIEHSTTLETLITKLNGAEYLQGRKGDKTLIMKVNASYTTGYIRYYNEGEKKPISYVSIVFSKTELKFTELEKLLTTVHKGLLKALDLSMGQNIHVYSPIVSMQNIQKTPQTAKKALASRWLSWLSYLEDPRIRFFYDPQMPALKDLPAVDTGKDNKKHPSNFQHIFYTDGSAITSPTKEGHLNAGMGIVYFINKDGNLQKQQEWSISLGNHTAQFAEIAAFEFALKKCLPLGGNILVVTDSNYVAKAYNEELDVWASNGFVNNRKKPLKHISKWKSVADLKRLRPDVVVTHEPGHQKLDSSPHAYGNNLADQLATQASFKVHAGKRTADGSEFEKRTADGSEFESPKKKAKVE

SEQ ID NO: 1117 - protein, 2171 aa, synthetic construct
MPAAKRVKLDGGDKKYSIGLDIGTNSVGWAVITDEYKVPSKKFKVLGNTDRHSIKKNLIGALLFDSGETAEATRLKRTARRRYTRRKNRICYLQEIFSNEMAKVDDSFFHRLEESFLVEEDKKHERHPIFGNIVDEVAYHEKYPTIYHLRKKLVDSTDKADLRLIYLALAHMIKFRGHFLIEGDLNPDNSDVDKLFIQLVQTYNQLFEENPINASGVDAKAILSARLSKSRRLENLIAQLPGEKKNGLFGNLIALSLGLTPNFKSNFDLAEDAKLQLSKDTYDDDLDNLLAQIGDQYADLFLAAKNLSDAILLSDILRVNTEITKAPLSASMIKRYDEHHQDLTLLKALVRQQLPEKYKEIFFDQSKNGYAGYIDGGASQEEFYKFIKPILEKMDGTEELLVKLNREDLLRKQRTFDNGSIPHQIHLGELHAILRRQEDFYPFLKDNREKIEKILTFRIPYYVGPLARGNSRFAWMTRKSEETITPWNFEEVVDKGASAQSFIERMTNFDKNLPNEKVLPKHSLLYEYFTVYNELTKVKYVTEGMRKPAFLSGEQKKAIVDLLFKTNRKVTVKQLKEDYFKKIECFDSVEISGVEDRFNASLGTYHDLLKIIKDKDFLDNEENEDILEDIVLTLTLFEDREMIEERLKTYAHLFDDKVMKQLKRRRYTGWGRLSRKLINGIRDKQSGKTILDFLKSDGFANRNFMQLIHDDSLTFKEDIQKAQVSGQGDSLHEHIANLAGSPAIKKGILQTVKVVDELVKVMGRHKPENIVIEMARENQTTQKGQKNSRERMKRIEEGIKELGSQILKEHPVENTQLQNEKLYLYYLQNGRDMYVDQELDINRLSDYDVDHIVPQSFLKDDSIDNKVLTRSDKARGKSDNVPSEEVVKKMKNYWRQLLNAKLITQRKFDNLTKAERGGLSELDKAGFIKRQLVETRQITKHVAQILDSRMNTKYDENDKLIREVKVITLKSKLVSDFRKDFQFYKVREINNYHHAHDAYLNAVVGTALIKKYPKLESEFVYGDYKVYDVRKMIAKSEQEIGKATAKYFFYSNIMNFFKTEITLANGEIRKRPLIETNGETGEIVWDKGRDFATVRKVLSMPQVNIVKKTEVQTGGFSKESILPKRNSDKLIARKKDWDPKKYGGFDSPTVAYSVLVVAKVEKGKSKKLKSVKELLGITIMERSSFEKNPIDFLEAKGYKEVKKDLIIKLPKYSLFELENGRKRMLASAGELQKGNELALPSKYVNFLYLASHYEKLKGSPEDNEQKQLFVEQHKHYLDEIIEQISEFSKRVILADANLDKVLSAYNKHRDKPIREQAENIIHLFTLTNLGAPAAFKYFDTTIDRKRYTSTKEVLDATLIHQSITGLYETRIDLSQLGGDGGGSSPAPGGGGGMDLLKPLTVERKGVKIKGYWNSQADITCVPKDLLQGEEPVRQQNVTTIHGTQEGDVYYVNLKIDGRRINTEVIGTTLDYAIITPGDVPWILKKPLELTIKLDLEEQQGTLLNNSILSKKGKEELKQLFEKYSALWQSWENQVGHRRIRPHKIATGTVKPTPQKQYHINPKAKPDIQIVINDLLKQGVLIQKESTMNTPVYPVPKPNGRWRMVLDYRAVNKVTPLIAVQNQHSYGILGSLFKGRYKTTIDLSNGFWAHPIVPEDYWITAFTWQGKQYCWTVLPQGFLNSPGLFNGDVVDLLQGIPNVEVYVDDVYISHDSEKEHLEYLDILFNRLKEAGYIISLKKSNIANSIVDFLGFQITNEGRGLTDTFKEKLENITAPTTLKQLQSILGLLNFARNFIPDFTELIAPLYALIPKSPKNYVPWQIEHSTTLETLITKLNGAEYLQGRKGDKTLIMKVNASYTTGYIRYYNEGEKKPISYVSIVFSKTELKFTELEKLLTTVHKGLLKALDLSMGQNIHVYSPIVSMQNIQKTPQTAKKALASRWLSWLSYLEDPRIRFFYDPQMPALKDLPAVDTGKDNKKHPSNFQHIFYTDGSAITSPTKEGHLNAGMGIVYFINKDGNLQKQQEWSISLGNHTAQFAEIAAFEFALKKCLPLGGNILVVTDSNYVAKAYNEELDVWASNGFVNNRKKPLKHISKWKSVADLKRLRPDVVVTHEPGHQKLDSSPHAYGNNLADQLATQASFKVHAGKRTADGSEFEKRTADGSEFESPKKKAKVE

SEQ ID NO: 1118 - protein, 2173 aa, synthetic construct
MPAAKRVKLDGGDKKYSIGLDIGTNSVGWAVITDEYKVPSKKFKVLGNTDRHSIKKNLIGALLFDSGETAEATRLKRTARRRYTRRKNRICYLQEIFSNEMAKVDDSFFHRLEESFLVEEDKKHERHPIFGNIVDEVAYHEKYPTIYHLRKKLVDSTDKADLRLIYLALAHMIKFRGHFLIEGDLNPDNSDVDKLFIQLVQTYNQLFEENPINASGVDAKAILSARLSKSRRLENLIAQLPGEKKNGLFGNLIALSLGLTPNFKSNFDLAEDAKLQLSKDTYDDDLDNLLAQIGDQYADLFLAAKNLSDAILLSDILRVNTEITKAPLSASMIKRYDEHHQDLTLLKALVRQQLPEKYKEIFFDQSKNGYAGYIDGGASQEEFYKFIKPILEKMDGTEELLVKLNREDLLRKQRTFDNGSIPHQIHLGELHAILRRQEDFYPFLKDNREKIEKILTFRIPYYVGPLARGNSRFAWMTRKSEETITPWNFEEVVDKGASAQSFIERMTNFDKNLPNEKVLPKHSLLYEYFTVYNELTKVKYVTEGMRKPAFLSGEQKKAIVDLLFKTNRKVTVKQLKEDYFKKIECFDSVEISGVEDRFNASLGTYHDLLKIIKDKDFLDNEENEDILEDIVLTLTLFEDREMIEERLKTYAHLFDDKVMKQLKRRRYTGWGRLSRKLINGIRDKQSGKTILDFLKSDGFANRNFMQLIHDDSLTFKEDIQKAQVSGQGDSLHEHIANLAGSPAIKKGILQTVKVVDELVKVMGRHKPENIVIEMARENQTTQKGQKNSRERMKRIEEGIKELGSQILKEHPVENTQLQNEKLYLYYLQNGRDMYVDQELDINRLSDYDVDHIVPQSFLKDDSIDNKVLTRSDKARGKSDNVPSEEVVKKMKNYWRQLLNAKLITQRKFDNLTKAERGGLSELDKAGFIKRQLVETRQITKHVAQILDSRMNTKYDENDKLIREVKVITLKSKLVSDFRKDFQFYKVREINNYHHAHDAYLNAVVGTALIKKYPKLESEFVYGDYKVYDVRKMIAKSEQEIGKATAKYFFYSNIMNFFKTEITLANGEIRKRPLIETNGETGEIVWDKGRDFATVRKVLSMPQVNIVKKTEVQTGGFSKESILPKRNSDKLIARKKDWDPKKYGGFDSPTVAYSVLVVAKVEKGKSKKLKSVKELLGITIMERSSFEKNPIDFLEAKGYKEVKKDLIIKLPKYSLFELENGRKRMLASAGELQKGNELALPSKYVNFLYLASHYEKLKGSPEDNEQKQLFVEQHKHYLDEIIEQISEFSKRVILADANLDKVLSAYNKHRDKPIREQAENIIHLFTLTNLGAPAAFKYFDTTIDRKRYTSTKEVLDATLIHQSITGLYETRIDLSQLGGDGGPAPEAAAKGGGGGMDLLKPLTVERKGVKIKGYWNSQADITCVPKDLLQGEEPVRQQNVTTIHGTQEGDVYYVNLKIDGRRINTEVIGTTLDYAIITPGDVPWILKKPLELTIKLDLEEQQGTLLNNSILSKKGKEELKQLFEKYSALWQSWENQVGHRRIRPHKIATGTVKPTPQKQYHINPKAKPDIQIVINDLLKQGVLIQKESTMNTPVYPVPKPNGRWRMVLDYRAVNKVTPLIAVQNQHSYGILGSLFKGRYKTTIDLSNGFWAHPIVPEDYWITAFTWQGKQYCWTVLPQGFLNSPGLFNGDVVDLLQGIPNVEVYVDDVYISHDSEKEHLEYLDILFNRLKEAGYIISLKKSNIANSIVDFLGFQITNEGRGLTDTFKEKLENITAPTTLKQLQSILGLLNFARNFIPDFTELIAPLYALIPKSPKNYVPWQIEHSTTLETLITKLNGAEYLQGRKGDKTLIMKVNASYTTGYIRYYNEGEKKPISYVSIVFSKTELKFTELEKLLTTVHKGLLKALDLSMGQNIHVYSPIVSMQNIQKTPQTAKKALASRWLSWLSYLEDPRIRFFYDPQMPALKDLPAVDTGKDNKKHPSNFQHIFYTDGSAITSPTKEGHLNAGMGIVYFINKDGNLQKQQEWSISLGNHTAQFAEIAAFEFALKKCLPLGGNILVVTDSNYVAKAYNEELDVWASNGFVNNRKKPLKHISKWKSVADLKRLRPDVVVTHEPGHQKLDSSPHAYGNNLADQLATQASFKVHAGKRTADGSEFEKRTADGSEFESPKKKAKVE

SEQ ID NO: 1119 - protein, 2182 aa, synthetic construct
MPAAKRVKLDGGDKKYSIGLDIGTNSVGWAVITDEYKVPSKKFKVLGNTDRHSIKKNLIGALLFDSGETAEATRLKRTARRRYTRRKNRICYLQEIFSNEMAKVDDSFFHRLEESFLVEEDKKHERHPIFGNIVDEVAYHEKYPTIYHLRKKLVDSTDKADLRLIYLALAHMIKFRGHFLIEGDLNPDNSDVDKLFIQLVQTYNQLFEENPINASGVDAKAILSARLSKSRRLENLIAQLPGEKKNGLFGNLIALSLGLTPNFKSNFDLAEDAKLQLSKDTYDDDLDNLLAQIGDQYADLFLAAKNLSDAILLSDILRVNTEITKAPLSASMIKRYDEHHQDLTLLKALVRQQLPEKYKEIFFDQSKNGYAGYIDGGASQEEFYKFIKPILEKMDGTEELLVKLNREDLLRKQRTFDNGSIPHQIHLGELHAILRRQEDFYPFLKDNREKIEKILTFRIPYYVGPLARGNSRFAWMTRKSEETITPWNFEEVVDKGASAQSFIERMTNFDKNLPNEKVLPKHSLLYEYFTVYNELTKVKYVTEGMRKPAFLSGEQKKAIVDLLFKTNRKVTVKQLKEDYFKKIECFDSVEISGVEDRFNASLGTYHDLLKIIKDKDFLDNEENEDILEDIVLTLTLFEDREMIEERLKTYAHLFDDKVMKQLKRRRYTGWGRLSRKLINGIRDKQSGKTILDFLKSDGFANRNFMQLIHDDSLTFKEDIQKAQVSGQGDSLHEHIANLAGSPAIKKGILQTVKVVDELVKVMGRHKPENIVIEMARENQTTQKGQKNSRERMKRIEEGIKELGSQILKEHPVENTQLQNEKLYLYYLQNGRDMYVDQELDINRLSDYDVDHIVPQSFLKDDSIDNKVLTRSDKARGKSDNVPSEEVVKKMKNYWRQLLNAKLITQRKFDNLTKAERGGLSELDKAGFIKRQLVETRQITKHVAQILDSRMNTKYDENDKLIREVKVITLKSKLVSDFRKDFQFYKVREINNYHHAHDAYLNAVVGTALIKKYPKLESEFVYGDYKVYDVRKMIAKSEQEIGKATAKYFFYSNIMNFFKTEITLANGEIRKRPLIETNGETGEIVWDKGRDFATVRKVLSMPQVNIVKKTEVQTGGFSKESILPKRNSDKLIARKKDWDPKKYGGFDSPTVAYSVLVVAKVEKGKSKKLKSVKELLGITIMERSSFEKNPIDFLEAKGYKEVKKDLIIKLPKYSLFELENGRKRMLASAGELQKGNELALPSKYVNFLYLASHYEKLKGSPEDNEQKQLFVEQHKHYLDEIIEQISEFSKRVILADANLDKVLSAYNKHRDKPIREQAENIIHLFTLTNLGAPAAFKYFDTTIDRKRYTSTKEVLDATLIHQSITGLYETRIDLSQLGGDGGGGGGSGGGGSGGGGSGGGGSGGMDLLKPLTVERKGVKIKGYWNSQADITCVPKDLLQGEEPVRQQNVTTIHGTQEGDVYYVNLKIDGRRINTEVIGTTLDYAIITPGDVPWILKKPLELTIKLDLEEQQGTLLNNSILSKKGKEELKQLFEKYSALWQSWENQVGHRRIRPHKIATGTVKPTPQKQYHINPKAKPDIQIVINDLLKQGVLIQKESTMNTPVYPVPKPNGRWRMVLDYRAVNKVTPLIAVQNQHSYGILGSLFKGRYKTTIDLSNGFWAHPIVPEDYWITAFTWQGKQYCWTVLPQGFLNSPGLFNGDVVDLLQGIPNVEVYVDDVYISHDSEKEHLEYLDILFNRLKEAGYIISLKKSNIANSIVDFLGFQITNEGRGLTDTFKEKLENITAPTTLKQLQSILGLLNFARNFIPDFTELIAPLYALIPKSPKNYVPWQIEHSTTLETLITKLNGAEYLQGRKGDKTLIMKVNASYTTGYIRYYNEGEKKPISYVSIVFSKTELKFTELEKLLTTVHKGLLKALDLSMGQNIHVYSPIVSMQNIQKTPQTAKKALASRWLSWLSYLEDPRIRFFYDPQMPALKDLPAVDTGKDNKKHPSNFQHIFYTDGSAITSPTKEGHLNAGMGIVYFINKDGNLQKQQEWSISLGNHTAQFAEIAAFEFALKKCLPLGGNILVVTDSNYVAKAYNEELDVWASNGFVNNRKKPLKHISKWKSVADLKRLRPDVVVTHEPGHQKLDSSPHAYGNNLADQLATQASFKVHAGKRTADGSEFEKRTADGSEFESPKKKAKVE

SEQ ID NO: 1120 - protein, 2171 aa, synthetic construct
MPAAKRVKLDGGDKKYSIGLDIGTNSVGWAVITDEYKVPSKKFKVLGNTDRHSIKKNLIGALLFDSGETAEATRLKRTARRRYTRRKNRICYLQEIFSNEMAKVDDSFFHRLEESFLVEEDKKHERHPIFGNIVDEVAYHEKYPTIYHLRKKLVDSTDKADLRLIYLALAHMIKFRGHFLIEGDLNPDNSDVDKLFIQLVQTYNQLFEENPINASGVDAKAILSARLSKSRRLENLIAQLPGEKKNGLFGNLIALSLGLTPNFKSNFDLAEDAKLQLSKDTYDDDLDNLLAQIGDQYADLFLAAKNLSDAILLSDILRVNTEITKAPLSASMIKRYDEHHQDLTLLKALVRQQLPEKYKEIFFDQSKNGYAGYIDGGASQEEFYKFIKPILEKMDGTEELLVKLNREDLLRKQRTFDNGSIPHQIHLGELHAILRRQEDFYPFLKDNREKIEKILTFRIPYYVGPLARGNSRFAWMTRKSEETITPWNFEEVVDKGASAQSFIERMTNFDKNLPNEKVLPKHSLLYEYFTVYNELTKVKYVTEGMRKPAFLSGEQKKAIVDLLFKTNRKVTVKQLKEDYFKKIECFDSVEISGVEDRFNASLGTYHDLLKIIKDKDFLDNEENEDILEDIVLTLTLFEDREMIEERLKTYAHLFDDKVMKQLKRRRYTGWGRLSRKLINGIRDKQSGKTILDFLKSDGFANRNFMQLIHDDSLTFKEDIQKAQVSGQGDSLHEHIANLAGSPAIKKGILQTVKVVDELVKVMGRHKPENIVIEMARENQTTQKGQKNSRERMKRIEEGIKELGSQILKEHPVENTQLQNEKLYLYYLQNGRDMYVDQELDINRLSDYDVDHIVPQSFLKDDSIDNKVLTRSDKARGKSDNVPSEEVVKKMKNYWRQLLNAKLITQRKFDNLTKAERGGLSELDKAGFIKRQLVETRQITKHVAQILDSRMNTKYDENDKLIREVKVITLKSKLVSDFRKDFQFYKVREINNYHHAHDAYLNAVVGTALIKKYPKLESEFVYGDYKVYDVRKMIAKSEQEIGKATAKYFFYSNIMNFFKTEITLANGEIRKRPLIETNGETGEIVWDKGRDFATVRKVLSMPQVNIVKKTEVQTGGFSKESILPKRNSDKLIARKKDWDPKKYGGFDSPTVAYSVLVVAKVEKGKSKKLKSVKELLGITIMERSSFEKNPIDFLEAKGYKEVKKDLIIKLPKYSLFELENGRKRMLASAGELQKGNELALPSKYVNFLYLASHYEKLKGSPEDNEQKQLFVEQHKHYLDEIIEQISEFSKRVILADANLDKVLSAYNKHRDKPIREQAENIIHLFTLTNLGAPAAFKYFDTTIDRKRYTSTKEVLDATLIHQSITGLYETRIDLSQLGGDGGPAPGGSGSSGGMDLLKPLTVERKGVKIKGYWNSQADITCVPKDLLQGEEPVRQQNVTTIHGTQEGDVYYVNLKIDGRRINTEVIGTTLDYAIITPGDVPWILKKPLELTIKLDLEEQQGTLLNNSILSKKGKEELKQLFEKYSALWQSWENQVGHRRIRPHKIATGTVKPTPQKQYHINPKAKPDIQIVINDLLKQGVLIQKESTMNTPVYPVPKPNGRWRMVLDYRAVNKVTPLIAVQNQHSYGILGSLFKGRYKTTIDLSNGFWAHPIVPEDYWITAFTWQGKQYCWTVLPQGFLNSPGLFNGDVVDLLQGIPNVEVYVDDVYISHDSEKEHLEYLDILFNRLKEAGYIISLKKSNIANSIVDFLGFQITNEGRGLTDTFKEKLENITAPTTLKQLQSILGLLNFARNFIPDFTELIAPLYALIPKSPKNYVPWQIEHSTTLETLITKLNGAEYLQGRKGDKTLIMKVNASYTTGYIRYYNEGEKKPISYVSIVFSKTELKFTELEKLLTTVHKGLLKALDLSMGQNIHVYSPIVSMQNIQKTPQTAKKALASRWLSWLSYLEDPRIRFFYDPQMPALKDLPAVDTGKDNKKHPSNFQHIFYTDGSAITSPTKEGHLNAGMGIVYFINKDGNLQKQQEWSISLGNHTAQFAEIAAFEFALKKCLPLGGNILVVTDSNYVAKAYNEELDVWASNGFVNNRKKPLKHISKWKSVADLKRLRPDVVVTHEPGHQKLDSSPHAYGNNLADQLATQASFKVHAGKRTADGSEFEKRTADGSEFESPKKKAKVE

SEQ ID NO: 1121 - protein, 2173 aa, synthetic construct
MPAAKRVKLDGGDKKYSIGLDIGTNSVGWAVITDEYKVPSKKFKVLGNTDRHSIKKNLIGALLFDSGETAEATRLKRTARRRYTRRKNRICYLQEIFSNEMAKVDDSFFHRLEESFLVEEDKKHERHPIFGNIVDEVAYHEKYPTIYHLRKKLVDSTDKADLRLIYLALAHMIKFRGHFLIEGDLNPDNSDVDKLFIQLVQTYNQLFEENPINASGVDAKAILSARLSKSRRLENLIAQLPGEKKNGLFGNLIALSLGLTPNFKSNFDLAEDAKLQLSKDTYDDDLDNLLAQIGDQYADLFLAAKNLSDAILLSDILRVNTEITKAPLSASMIKRYDEHHQDLTLLKALVRQQLPEKYKEIFFDQSKNGYAGYIDGGASQEEFYKFIKPILEKMDGTEELLVKLNREDLLRKQRTFDNGSIPHQIHLGELHAILRRQEDFYPFLKDNREKIEKILTFRIPYYVGPLARGNSRFAWMTRKSEETITPWNFEEVVDKGASAQSFIERMTNFDKNLPNEKVLPKHSLLYEYFTVYNELTKVKYVTEGMRKPAFLSGEQKKAIVDLLFKTNRKVTVKQLKEDYFKKIECFDSVEISGVEDRFNASLGTYHDLLKIIKDKDFLDNEENEDILEDIVLTLTLFEDREMIEERLKTYAHLFDDKVMKQLKRRRYTGWGRLSRKLINGIRDKQSGKTILDFLKSDGFANRNFMQLIHDDSLTFKEDIQKAQVSGQGDSLHEHIANLAGSPAIKKGILQTVKVVDELVKVMGRHKPENIVIEMARENQTTQKGQKNSRERMKRIEEGIKELGSQILKEHPVENTQLQNEKLYLYYLQNGRDMYVDQELDINRLSDYDVDHIVPQSFLKDDSIDNKVLTRSDKARGKSDNVPSEEVVKKMKNYWRQLLNAKLITQRKFDNLTKAERGGLSELDKAGFIKRQLVETRQITKHVAQILDSRMNTKYDENDKLIREVKVITLKSKLVSDFRKDFQFYKVREINNYHHAHDAYLNAVVGTALIKKYPKLESEFVYGDYKVYDVRKMIAKSEQEIGKATAKYFFYSNIMNFFKTEITLANGEIRKRPLIETNGETGEIVWDKGRDFATVRKVLSMPQVNIVKKTEVQTGGFSKESILPKRNSDKLIARKKDWDPKKYGGFDSPTVAYSVLVVAKVEKGKSKKLKSVKELLGITIMERSSFEKNPIDFLEAKGYKEVKKDLIIKLPKYSLFELENGRKRMLASAGELQKGNELALPSKYVNFLYLASHYEKLKGSPEDNEQKQLFVEQHKHYLDEIIEQISEFSKRVILADANLDKVLSAYNKHRDKPIREQAENIIHLFTLTNLGAPAAFKYFDTTIDRKRYTSTKEVLDATLIHQSITGLYETRIDLSQLGGDGGEAAAKPAPGSSGGMDLLKPLTVERKGVKIKGYWNSQADITCVPKDLLQGEEPVRQQNVTTIHGTQEGDVYYVNLKIDGRRINTEVIGTTLDYAIITPGDVPWILKKPLELTIKLDLEEQQGTLLNNSILSKKGKEELKQLFEKYSALWQSWENQVGHRRIRPHKIATGTVKPTPQKQYHINPKAKPDIQIVINDLLKQGVLIQKESTMNTPVYPVPKPNGRWRMVLDYRAVNKVTPLIAVQNQHSYGILGSLFKGRYKTTIDLSNGFWAHPIVPEDYWITAFTWQGKQYCWTVLPQGFLNSPGLFNGDVVDLLQGIPNVEVYVDDVYISHDSEKEHLEYLDILFNRLKEAGYIISLKKSNIANSIVDFLGFQITNEGRGLTDTFKEKLENITAPTTLKQLQSILGLLNFARNFIPDFTELIAPLYALIPKSPKNYVPWQIEHSTTLETLITKLNGAEYLQGRKGDKTLIMKVNASYTTGYIRYYNEGEKKPISYVSIVFSKTELKFTELEKLLTTVHKGLLKALDLSMGQNIHVYSPIVSMQNIQKTPQTAKKALASRWLSWLSYLEDPRIRFFYDPQMPALKDLPAVDTGKDNKKHPSNFQHIFYTDGSAITSPTKEGHLNAGMGIVYFINKDGNLQKQQEWSISLGNHTAQFAEIAAFEFALKKCLPLGGNILVVTDSNYVAKAYNEELDVWASNGFVNNRKKPLKHISKWKSVADLKRLRPDVVVTHEPGHQKLDSSPHAYGNNLADQLATQASFKVHAGKRTADGSEFEKRTADGSEFESPKKKAKVE

SEQ ID NO: 1122 - protein, 2172 aa, synthetic construct
MPAAKRVKLDGGDKKYSIGLDIGTNSVGWAVITDEYKVPSKKFKVLGNTDRHSIKKNLIGALLFDSGETAEATRLKRTARRRYTRRKNRICYLQEIFSNEMAKVDDSFFHRLEESFLVEEDKKHERHPIFGNIVDEVAYHEKYPTIYHLRKKLVDSTDKADLRLIYLALAHMIKFRGHFLIEGDLNPDNSDVDKLFIQLVQTYNQLFEENPINASGVDAKAILSARLSKSRRLENLIAQLPGEKKNGLFGNLIALSLGLTPNFKSNFDLAEDAKLQLSKDTYDDDLDNLLAQIGDQYADLFLAAKNLSDAILLSDILRVNTEITKAPLSASMIKRYDEHHQDLTLLKALVRQQLPEKYKEIFFDQSKNGYAGYIDGGASQEEFYKFIKPILEKMDGTEELLVKLNREDLLRKQRTFDNGSIPHQIHLGELHAILRRQEDFYPFLKDNREKIEKILTFRIPYYVGPLARGNSRFAWMTRKSEETITPWNFEEVVDKGASAQSFIERMTNFDKNLPNEKVLPKHSLLYEYFTVYNELTKVKYVTEGMRKPAFLSGEQKKAIVDLLFKTNRKVTVKQLKEDYFKKIECFDSVEISGVEDRFNASLGTYHDLLKIIKDKDFLDNEENEDILEDIVLTLTLFEDREMIEERLKTYAHLFDDKVMKQLKRRRYTGWGRLSRKLINGIRDKQSGKTILDFLKSDGFANRNFMQLIHDDSLTFKEDIQKAQVSGQGDSLHEHIANLAGSPAIKKGILQTVKVVDELVKVMGRHKPENIVIEMARENQTTQKGQKNSRERMKRIEEGIKELGSQILKEHPVENTQLQNEKLYLYYLQNGRDMYVDQELDINRLSDYDVDHIVPQSFLKDDSIDNKVLTRSDKARGKSDNVPSEEVVKKMKNYWRQLLNAKLITQRKFDNLTKAERGGLSELDKAGFIKRQLVETRQITKHVAQILDSRMNTKYDENDKLIREVKVITLKSKLVSDFRKDFQFYKVREINNYHHAHDAYLNAVVGTALIKKYPKLESEFVYGDYKVYDVRKMIAKSEQEIGKATAKYFFYSNIMNFFKTEITLANGEIRKRPLIETNGETGEIVWDKGRDFATVRKVLSMPQVNIVKKTEVQTGGFSKESILPKRNSDKLIARKKDWDPKKYGGFDSPTVAYSVLVVAKVEKGKSKKLKSVKELLGITIMERSSFEKNPIDFLEAKGYKEVKKDLIIKLPKYSLFELENGRKRMLASAGELQKGNELALPSKYVNFLYLASHYEKLKGSPEDNEQKQLFVEQHKHYLDEIIEQISEFSKRVILADANLDKVLSAYNKHRDKPIREQAENIIHLFTLTNLGAPAAFKYFDTTIDRKRYTSTKEVLDATLIHQSITGLYETRIDLSQLGGDGGGGGGSGGGGSGGMDLLKPLTVERKGVKIKGYWNSQADITCVPKDLLQGEEPVRQQNVTTIHGTQEGDVYYVNLKIDGRRINTEVIGTTLDYAIITPGDVPWILKKPLELTIKLDLEEQQGTLLNNSILSKKGKEELKQLFEKYSALWQSWENQVGHRRIRPHKIATGTVKPTPQKQYHINPKAKPDIQIVINDLLKQGVLIQKESTMNTPVYPVPKPNGRWRMVLDYRAVNKVTPLIAVQNQHSYGILGSLFKGRYKTTIDLSNGFWAHPIVPEDYWITAFTWQGKQYCWTVLPQGFLNSPGLFNGDVVDLLQGIPNVEVYVDDVYISHDSEKEHLEYLDILFNRLKEAGYIISLKKSNIANSIVDFLGFQITNEGRGLTDTFKEKLENITAPTTLKQLQSILGLLNFARNFIPDFTELIAPLYALIPKSPKNYVPWQIEHSTTLETLITKLNGAEYLQGRKGDKTLIMKVNASYTTGYIRYYNEGEKKPISYVSIVFSKTELKFTELEKLLTTVHKGLLKALDLSMGQNIHVYSPIVSMQNIQKTPQTAKKALASRWLSWLSYLEDPRIRFFYDPQMPALKDLPAVDTGKDNKKHPSNFQHIFYTDGSAITSPTKEGHLNAGMGIVYFINKDGNLQKQQEWSISLGNHTAQFAEIAAFEFALKKCLPLGGNILVVTDSNYVAKAYNEELDVWASNGFVNNRKKPLKHISKWKSVADLKRLRPDVVVTHEPGHQKLDSSPHAYGNNLADQLATQASFKVHAGKRTADGSEFEKRTADGSEFESPKKKAKVE

SEQ ID NO: 1123 - protein, 2173 aa, synthetic construct
MPAAKRVKLDGGDKKYSIGLDIGTNSVGWAVITDEYKVPSKKFKVLGNTDRHSIKKNLIGALLFDSGETAEATRLKRTARRRYTRRKNRICYLQEIFSNEMAKVDDSFFHRLEESFLVEEDKKHERHPIFGNIVDEVAYHEKYPTIYHLRKKLVDSTDKADLRLIYLALAHMIKFRGHFLIEGDLNPDNSDVDKLFIQLVQTYNQLFEENPINASGVDAKAILSARLSKSRRLENLIAQLPGEKKNGLFGNLIALSLGLTPNFKSNFDLAEDAKLQLSKDTYDDDLDNLLAQIGDQYADLFLAAKNLSDAILLSDILRVNTEITKAPLSASMIKRYDEHHQDLTLLKALVRQQLPEKYKEIFFDQSKNGYAGYIDGGASQEEFYKFIKPILEKMDGTEELLVKLNREDLLRKQRTFDNGSIPHQIHLGELHAILRRQEDFYPFLKDNREKIEKILTFRIPYYVGPLARGNSRFAWMTRKSEETITPWNFEEVVDKGASAQSFIERMTNFDKNLPNEKVLPKHSLLYEYFTVYNELTKVKYVTEGMRKPAFLSGEQKKAIVDLLFKTNRKVTVKQLKEDYFKKIECFDSVEISGVEDRFNASLGTYHDLLKIIKDKDFLDNEENEDILEDIVLTLTLFEDREMIEERLKTYAHLFDDKVMKQLKRRRYTGWGRLSRKLINGIRDKQSGKTILDFLKSDGFANRNFMQLIHDDSLTFKEDIQKAQVSGQGDSLHEHIANLAGSPAIKKGILQTVKVVDELVKVMGRHKPENIVIEMARENQTTQKGQKNSRERMKRIEEGIKELGSQILKEHPVENTQLQNEKLYLYYLQNGRDMYVDQELDINRLSDYDVDHIVPQSFLKDDSIDNKVLTRSDKARGKSDNVPSEEVVKKMKNYWRQLLNAKLITQRKFDNLTKAERGGLSELDKAGFIKRQLVETRQITKHVAQILDSRMNTKYDENDKLIREVKVITLKSKLVSDFRKDFQFYKVREINNYHHAHDAYLNAVVGTALIKKYPKLESEFVYGDYKVYDVRKMIAKSEQEIGKATAKYFFYSNIMNFFKTEITLANGEIRKRPLIETNGETGEIVWDKGRDFATVRKVLSMPQVNIVKKTEVQTGGFSKESILPKRNSDKLIARKKDWDPKKYGGFDSPTVAYSVLVVAKVEKGKSKKLKSVKELLGITIMERSSFEKNPIDFLEAKGYKEVKKDLIIKLPKYSLFELENGRKRMLASAGELQKGNELALPSKYVNFLYLASHYEKLKGSPEDNEQKQLFVEQHKHYLDEIIEQISEFSKRVILADANLDKVLSAYNKHRDKPIREQAENIIHLFTLTNLGAPAAFKYFDTTIDRKRYTSTKEVLDATLIHQSITGLYETRIDLSQLGGDGGGGSEAAAKPAPGGMDLLKPLTVERKGVKIKGYWNSQADITCVPKDLLQGEEPVRQQNVTTIHGTQEGDVYYVNLKIDGRRINTEVIGTTLDYAIITPGDVPWILKKPLELTIKLDLEEQQGTLLNNSILSKKGKEELKQLFEKYSALWQSWENQVGHRRIRPHKIATGTVKPTPQKQYHINPKAKPDIQIVINDLLKQGVLIQKESTMNTPVYPVPKPNGRWRMVLDYRAVNKVTPLIAVQNQHSYGILGSLFKGRYKTTIDLSNGFWAHPIVPEDYWITAFTWQGKQYCWTVLPQGFLNSPGLFNGDVVDLLQGIPNVEVYVDDVYISHDSEKEHLEYLDILFNRLKEAGYIISLKKSNIANSIVDFLGFQITNEGRGLTDTFKEKLENITAPTTLKQLQSILGLLNFARNFIPDFTELIAPLYALIPKSPKNYVPWQIEHSTTLETLITKLNGAEYLQGRKGDKTLIMKVNASYTTGYIRYYNEGEKKPISYVSIVFSKTELKFTELEKLLTTVHKGLLKALDLSMGQNIHVYSPIVSMQNIQKTPQTAKKALASRWLSWLSYLEDPRIRFFYDPQMPALKDLPAVDTGKDNKKHPSNFQHIFYTDGSAITSPTKEGHLNAGMGIVYFINKDGNLQKQQEWSISLGNHTAQFAEIAAFEFALKKCLPLGGNILVVTDSNYVAKAYNEELDVWASNGFVNNRKKPLKHISKWKSVADLKRLRPDVVVTHEPGHQKLDSSPHAYGNNLADQLATQASFKVHAGKRTADGSEFEKRTADGSEFESPKKKAKVE

SEQ ID NO: 1124 - protein, 2171 aa, synthetic construct
MPAAKRVKLDGGDKKYSIGLDIGTNSVGWAVITDEYKVPSKKFKVLGNTDRHSIKKNLIGALLFDSGETAEATRLKRTARRRYTRRKNRICYLQEIFSNEMAKVDDSFFHRLEESFLVEEDKKHERHPIFGNIVDEVAYHEKYPTIYHLRKKLVDSTDKADLRLIYLALAHMIKFRGHFLIEGDLNPDNSDVDKLFIQLVQTYNQLFEENPINASGVDAKAILSARLSKSRRLENLIAQLPGEKKNGLFGNLIALSLGLTPNFKSNFDLAEDAKLQLSKDTYDDDLDNLLAQIGDQYADLFLAAKNLSDAILLSDILRVNTEITKAPLSASMIKRYDEHHQDLTLLKALVRQQLPEKYKEIFFDQSKNGYAGYIDGGASQEEFYKFIKPILEKMDGTEELLVKLNREDLLRKQRTFDNGSIPHQIHLGELHAILRRQEDFYPFLKDNREKIEKILTFRIPYYVGPLARGNSRFAWMTRKSEETITPWNFEEVVDKGASAQSFIERMTNFDKNLPNEKVLPKHSLLYEYFTVYNELTKVKYVTEGMRKPAFLSGEQKKAIVDLLFKTNRKVTVKQLKEDYFKKIECFDSVEISGVEDRFNASLGTYHDLLKIIKDKDFLDNEENEDILEDIVLTLTLFEDREMIEERLKTYAHLFDDKVMKQLKRRRYTGWGRLSRKLINGIRDKQSGKTILDFLKSDGFANRNFMQLIHDDSLTFKEDIQKAQVSGQGDSLHEHIANLAGSPAIKKGILQTVKVVDELVKVMGRHKPENIVIEMARENQTTQKGQKNSRERMKRIEEGIKELGSQILKEHPVENTQLQNEKLYLYYLQNGRDMYVDQELDINRLSDYDVDHIVPQSFLKDDSIDNKVLTRSDKARGKSDNVPSEEVVKKMKNYWRQLLNAKLITQRKFDNLTKAERGGLSELDKAGFIKRQLVETRQITKHVAQILDSRMNTKYDENDKLIREVKVITLKSKLVSDFRKDFQFYKVREINNYHHAHDAYLNAVVGTALIKKYPKLESEFVYGDYKVYDVRKMIAKSEQEIGKATAKYFFYSNIMNFFKTEITLANGEIRKRPLIETNGETGEIVWDKGRDFATVRKVLSMPQVNIVKKTEVQTGGFSKESILPKRNSDKLIARKKDWDPKKYGGFDSPTVAYSVLVVAKVEKGKSKKLKSVKELLGITIMERSSFEKNPIDFLEAKGYKEVKKDLIIKLPKYSLFELENGRKRMLASAGELQKGNELALPSKYVNFLYLASHYEKLKGSPEDNEQKQLFVEQHKHYLDEIIEQISEFSKRVILADANLDKVLSAYNKHRDKPIREQAENIIHLFTLTNLGAPAAFKYFDTTIDRKRYTSTKEVLDATLIHQSITGLYETRIDLSQLGGDGGGGGGSSPAPGGMDLLKPLTVERKGVKIKGYWNSQADITCVPKDLLQGEEPVRQQNVTTIHGTQEGDVYYVNLKIDGRRINTEVIGTTLDYAIITPGDVPWILKKPLELTIKLDLEEQQGTLLNNSILSKKGKEELKQLFEKYSALWQSWENQVGHRRIRPHKIATGTVKPTPQKQYHINPKAKPDIQIVINDLLKQGVLIQKESTMNTPVYPVPKPNGRWRMVLDYRAVNKVTPLIAVQNQHSYGILGSLFKGRYKTTIDLSNGFWAHPIVPEDYWITAFTWQGKQYCWTVLPQGFLNSPGLFNGDVVDLLQGIPNVEVYVDDVYISHDSEKEHLEYLDILFNRLKEAGYIISLKKSNIANSIVDFLGFQITNEGRGLTDTFKEKLENITAPTTLKQLQSILGLLNFARNFIPDFTELIAPLYALIPKSPKNYVPWQIEHSTTLETLITKLNGAEYLQGRKGDKTLIMKVNASYTTGYIRYYNEGEKKPISYVSIVFSKTELKFTELEKLLTTVHKGLLKALDLSMGQNIHVYSPIVSMQNIQKTPQTAKKALASRWLSWLSYLEDPRIRFFYDPQMPALKDLPAVDTGKDNKKHPSNFQHIFYTDGSAITSPTKEGHLNAGMGIVYFINKDGNLQKQQEWSISLGNHTAQFAEIAAFEFALKKCLPLGGNILVVTDSNYVAKAYNEELDVWASNGFVNNRKKPLKHISKWKSVADLKRLRPDVVVTHEPGHQKLDSSPHAYGNNLADQLATQASFKVHAGKRTADGSEFEKRTADGSEFESPKKKAKVE

SEQ ID NO: 1125 - protein, 2177 aa, synthetic construct
MPAAKRVKLDGGDKKYSIGLDIGTNSVGWAVITDEYKVPSKKFKVLGNTDRHSIKKNLIGALLFDSGETAEATRLKRTARRRYTRRKNRICYLQEIFSNEMAKVDDSFFHRLEESFLVEEDKKHERHPIFGNIVDEVAYHEKYPTIYHLRKKLVDSTDKADLRLIYLALAHMIKFRGHFLIEGDLNPDNSDVDKLFIQLVQTYNQLFEENPINASGVDAKAILSARLSKSRRLENLIAQLPGEKKNGLFGNLIALSLGLTPNFKSNFDLAEDAKLQLSKDTYDDDLDNLLAQIGDQYADLFLAAKNLSDAILLSDILRVNTEITKAPLSASMIKRYDEHHQDLTLLKALVRQQLPEKYKEIFFDQSKNGYAGYIDGGASQEEFYKFIKPILEKMDGTEELLVKLNREDLLRKQRTFDNGSIPHQIHLGELHAILRRQEDFYPFLKDNREKIEKILTFRIPYYVGPLARGNSRFAWMTRKSEETITPWNFEEVVDKGASAQSFIERMTNFDKNLPNEKVLPKHSLLYEYFTVYNELTKVKYVTEGMRKPAFLSGEQKKAIVDLLFKTNRKVTVKQLKEDYFKKIECFDSVEISGVEDRFNASLGTYHDLLKIIKDKDFLDNEENEDILEDIVLTLTLFEDREMIEERLKTYAHLFDDKVMKQLKRRRYTGWGRLSRKLINGIRDKQSGKTILDFLKSDGFANRNFMQLIHDDSLTFKEDIQKAQVSGQGDSLHEHIANLAGSPAIKKGILQTVKVVDELVKVMGRHKPENIVIEMARENQTTQKGQKNSRERMKRIEEGIKELGSQILKEHPVENTQLQNEKLYLYYLQNGRDMYVDQELDINRLSDYDVDHIVPQSFLKDDSIDNKVLTRSDKARGKSDNVPSEEVVKKMKNYWRQLLNAKLITQRKFDNLTKAERGGLSELDKAGFIKRQLVETRQITKHVAQILDSRMNTKYDENDKLIREVKVITLKSKLVSDFRKDFQFYKVREINNYHHAHDAYLNAVVGTALIKKYPKLESEFVYGDYKVYDVRKMIAKSEQEIGKATAKYFFYSNIMNFFKTEITLANGEIRKRPLIETNGETGEIVWDKGRDFATVRKVLSMPQVNIVKKTEVQTGGFSKESILPKRNSDKLIARKKDWDPKKYGGFDSPTVAYSVLVVAKVEKGKSKKLKSVKELLGITIMERSSFEKNPIDFLEAKGYKEVKKDLIIKLPKYSLFELENGRKRMLASAGELQKGNELALPSKYVNFLYLASHYEKLKGSPEDNEQKQLFVEQHKHYLDEIIEQISEFSKRVILADANLDKVLSAYNKHRDKPIREQAENIIHLFTLTNLGAPAAFKYFDTTIDRKRYTSTKEVLDATLIHQSITGLYETRIDLSQLGGDGGGGGGSGGGGSGGGGSGGMDLLKPLTVERKGVKIKGYWNSQADITCVPKDLLQGEEPVRQQNVTTIHGTQEGDVYYVNLKIDGRRINTEVIGTTLDYAIITPGDVPWILKKPLELTIKLDLEEQQGTLLNNSILSKKGKEELKQLFEKYSALWQSWENQVGHRRIRPHKIATGTVKPTPQKQYHINPKAKPDIQIVINDLLKQGVLIQKESTMNTPVYPVPKPNGRWRMVLDYRAVNKVTPLIAVQNQHSYGILGSLFKGRYKTTIDLSNGFWAHPIVPEDYWITAFTWQGKQYCWTVLPQGFLNSPGLFNGDVVDLLQGIPNVEVYVDDVYISHDSEKEHLEYLDILFNRLKEAGYIISLKKSNIANSIVDFLGFQITNEGRGLTDTFKEKLENITAPTTLKQLQSILGLLNFARNFIPDFTELIAPLYALIPKSPKNYVPWQIEHSTTLETLITKLNGAEYLQGRKGDKTLIMKVNASYTTGYIRYYNEGEKKPISYVSIVFSKTELKFTELEKLLTTVHKGLLKALDLSMGQNIHVYSPIVSMQNIQKTPQTAKKALASRWLSWLSYLEDPRIRFFYDPQMPALKDLPAVDTGKDNKKHPSNFQHIFYTDGSAITSPTKEGHLNAGMGIVYFINKDGNLQKQQEWSISLGNHTAQFAEIAAFEFALKKCLPLGGNILVVTDSNYVAKAYNEELDVWASNGFVNNRKKPLKHISKWKSVADLKRLRPDVVVTHEPGHQKLDSSPHAYGNNLADQLATQASFKVHAGKRTADGSEFEKRTADGSEFESPKKKAKVE

SEQ ID NO: 1126 - protein, 2177 aa, synthetic construct
MPAAKRVKLDGGDKKYSIGLDIGTNSVGWAVITDEYKVPSKKFKVLGNTDRHSIKKNLIGALLFDSGETAEATRLKRTARRRYTRRKNRICYLQEIFSNEMAKVDDSFFHRLEESFLVEEDKKHERHPIFGNIVDEVAYHEKYPTIYHLRKKLVDSTDKADLRLIYLALAHMIKFRGHFLIEGDLNPDNSDVDKLFIQLVQTYNQLFEENPINASGVDAKAILSARLSKSRRLENLIAQLPGEKKNGLFGNLIALSLGLTPNFKSNFDLAEDAKLQLSKDTYDDDLDNLLAQIGDQYADLFLAAKNLSDAILLSDILRVNTEITKAPLSASMIKRYDEHHQDLTLLKALVRQQLPEKYKEIFFDQSKNGYAGYIDGGASQEEFYKFIKPILEKMDGTEELLVKLNREDLLRKQRTFDNGSIPHQIHLGELHAILRRQEDFYPFLKDNREKIEKILTFRIPYYVGPLARGNSRFAWMTRKSEETITPWNFEEVVDKGASAQSFIERMTNFDKNLPNEKVLPKHSLLYEYFTVYNELTKVKYVTEGMRKPAFLSGEQKKAIVDLLFKTNRKVTVKQLKEDYFKKIECFDSVEISGVEDRFNASLGTYHDLLKIIKDKDFLDNEENEDILEDIVLTLTLFEDREMIEERLKTYAHLFDDKVMKQLKRRRYTGWGRLSRKLINGIRDKQSGKTILDFLKSDGFANRNFMQLIHDDSLTFKEDIQKAQVSGQGDSLHEHIANLAGSPAIKKGILQTVKVVDELVKVMGRHKPENIVIEMARENQTTQKGQKNSRERMKRIEEGIKELGSQILKEHPVENTQLQNEKLYLYYLQNGRDMYVDQELDINRLSDYDVDHIVPQSFLKDDSIDNKVLTRSDKARGKSDNVPSEEVVKKMKNYWRQLLNAKLITQRKFDNLTKAERGGLSELDKAGFIKRQLVETRQITKHVAQILDSRMNTKYDENDKLIREVKVITLKSKLVSDFRKDFQFYKVREINNYHHAHDAYLNAVVGTALIKKYPKLESEFVYGDYKVYDVRKMIAKSEQEIGKATAKYFFYSNIMNFFKTEITLANGEIRKRPLIETNGETGEIVWDKGRDFATVRKVLSMPQVNIVKKTEVQTGGFSKESILPKRNSDKLIARKKDWDPKKYGGFDSPTVAYSVLVVAKVEKGKSKKLKSVKELLGITIMERSSFEKNPIDFLEAKGYKEVKKDLIIKLPKYSLFELENGRKRMLASAGELQKGNELALPSKYVNFLYLASHYEKLKGSPEDNEQKQLFVEQHKHYLDEIIEQISEFSKRVILADANLDKVLSAYNKHRDKPIREQAENIIHLFTLTNLGAPAAFKYFDTTIDRKRYTSTKEVLDATLIHQSITGLYETRIDLSQLGGDGGEAAAKEAAAKEAAAKGGMDLLKPLTVERKGVKIKGYWNSQADITCVPKDLLQGEEPVRQQNVTTIHGTQEGDVYYVNLKIDGRRINTEVIGTTLDYAIITPGDVPWILKKPLELTIKLDLEEQQGTLLNNSILSKKGKEELKQLFEKYSALWQSWENQVGHRRIRPHKIATGTVKPTPQKQYHINPKAKPDIQIVINDLLKQGVLIQKESTMNTPVYPVPKPNGRWRMVLDYRAVNKVTPLIAVQNQHSYGILGSLFKGRYKTTIDLSNGFWAHPIVPEDYWITAFTWQGKQYCWTVLPQGFLNSPGLFNGDVVDLLQGIPNVEVYVDDVYISHDSEKEHLEYLDILFNRLKEAGYIISLKKSNIANSIVDFLGFQITNEGRGLTDTFKEKLENITAPTTLKQLQSILGLLNFARNFIPDFTELIAPLYALIPKSPKNYVPWQIEHSTTLETLITKLNGAEYLQGRKGDKTLIMKVNASYTTGYIRYYNEGEKKPISYVSIVFSKTELKFTELEKLLTTVHKGLLKALDLSMGQNIHVYSPIVSMQNIQKTPQTAKKALASRWLSWLSYLEDPRIRFFYDPQMPALKDLPAVDTGKDNKKHPSNFQHIFYTDGSAITSPTKEGHLNAGMGIVYFINKDGNLQKQQEWSISLGNHTAQFAEIAAFEFALKKCLPLGGNILVVTDSNYVAKAYNEELDVWASNGFVNNRKKPLKHISKWKSVADLKRLRPDVVVTHEPGHQKLDSSPHAYGNNLADQLATQASFKVHAGKRTADGSEFEKRTADGSEFESPKKKAKVE

SEQ ID NO: 1127 - protein, 2173 aa, synthetic construct
MPAAKRVKLDGGDKKYSIGLDIGTNSVGWAVITDEYKVPSKKFKVLGNTDRHSIKKNLIGALLFDSGETAEATRLKRTARRRYTRRKNRICYLQEIFSNEMAKVDDSFFHRLEESFLVEEDKKHERHPIFGNIVDEVAYHEKYPTIYHLRKKLVDSTDKADLRLIYLALAHMIKFRGHFLIEGDLNPDNSDVDKLFIQLVQTYNQLFEENPINASGVDAKAILSARLSKSRRLENLIAQLPGEKKNGLFGNLIALSLGLTPNFKSNFDLAEDAKLQLSKDTYDDDLDNLLAQIGDQYADLFLAAKNLSDAILLSDILRVNTEITKAPLSASMIKRYDEHHQDLTLLKALVRQQLPEKYKEIFFDQSKNGYAGYIDGGASQEEFYKFIKPILEKMDGTEELLVKLNREDLLRKQRTFDNGSIPHQIHLGELHAILRRQEDFYPFLKDNREKIEKILTFRIPYYVGPLARGNSRFAWMTRKSEETITPWNFEEVVDKGASAQSFIERMTNFDKNLPNEKVLPKHSLLYEYFTVYNELTKVKYVTEGMRKPAFLSGEQKKAIVDLLFKTNRKVTVKQLKEDYFKKIECFDSVEISGVEDRFNASLGTYHDLLKIIKDKDFLDNEENEDILEDIVLTLTLFEDREMIEERLKTYAHLFDDKVMKQLKRRRYTGWGRLSRKLINGIRDKQSGKTILDFLKSDGFANRNFMQLIHDDSLTFKEDIQKAQVSGQGDSLHEHIANLAGSPAIKKGILQTVKVVDELVKVMGRHKPENIVIEMARENQTTQKGQKNSRERMKRIEEGIKELGSQILKEHPVENTQLQNEKLYLYYLQNGRDMYVDQELDINRLSDYDVDHIVPQSFLKDDSIDNKVLTRSDKARGKSDNVPSEEVVKKMKNYWRQLLNAKLITQRKFDNLTKAERGGLSELDKAGFIKRQLVETRQITKHVAQILDSRMNTKYDENDKLIREVKVITLKSKLVSDFRKDFQFYKVREINNYHHAHDAYLNAVVGTALIKKYPKLESEFVYGDYKVYDVRKMIAKSEQEIGKATAKYFFYSNIMNFFKTEITLANGEIRKRPLIETNGETGEIVWDKGRDFATVRKVLSMPQVNIVKKTEVQTGGFSKESILPKRNSDKLIARKKDWDPKKYGGFDSPTVAYSVLVVAKVEKGKSKKLKSVKELLGITIMERSSFEKNPIDFLEAKGYKEVKKDLIIKLPKYSLFELENGRKRMLASAGELQKGNELALPSKYVNFLYLASHYEKLKGSPEDNEQKQLFVEQHKHYLDEIIEQISEFSKRVILADANLDKVLSAYNKHRDKPIREQAENIIHLFTLTNLGAPAAFKYFDTTIDRKRYTSTKEVLDATLIHQSITGLYETRIDLSQLGGDGGEAAAKGSSGGSGGMDLLKPLTVERKGVKIKGYWNSQADITCVPKDLLQGEEPVRQQNVTTIHGTQEGDVYYVNLKIDGRRINTEVIGTTLDYAIITPGDVPWILKKPLELTIKLDLEEQQGTLLNNSILSKKGKEELKQLFEKYSALWQSWENQVGHRRIRPHKIATGTVKPTPQKQYHINPKAKPDIQIVINDLLKQGVLIQKESTMNTPVYPVPKPNGRWRMVLDYRAVNKVTPLIAVQNQHSYGILGSLFKGRYKTTIDLSNGFWAHPIVPEDYWITAFTWQGKQYCWTVLPQGFLNSPGLFNGDVVDLLQGIPNVEVYVDDVYISHDSEKEHLEYLDILFNRLKEAGYIISLKKSNIANSIVDFLGFQITNEGRGLTDTFKEKLENITAPTTLKQLQSILGLLNFARNFIPDFTELIAPLYALIPKSPKNYVPWQIEHSTTLETLITKLNGAEYLQGRKGDKTLIMKVNASYTTGYIRYYNEGEKKPISYVSIVFSKTELKFTELEKLLTTVHKGLLKALDLSMGQNIHVYSPIVSMQNIQKTPQTAKKALASRWLSWLSYLEDPRIRFFYDPQMPALKDLPAVDTGKDNKKHPSNFQHIFYTDGSAITSPTKEGHLNAGMGIVYFINKDGNLQKQQEWSISLGNHTAQFAEIAAFEFALKKCLPLGGNILVVTDSNYVAKAYNEELDVWASNGFVNNRKKPLKHISKWKSVADLKRLRPDVVVTHEPGHQKLDSSPHAYGNNLADQLATQASFKVHAGKRTADGSEFEKRTADGSEFESPKKKAKVE

SEQ ID NO: 1128 - protein, 2171 aa, synthetic construct
MPAAKRVKLDGGDKKYSIGLDIGTNSVGWAVITDEYKVPSKKFKVLGNTDRHSIKKNLIGALLFDSGETAEATRLKRTARRRYTRRKNRICYLQEIFSNEMAKVDDSFFHRLEESFLVEEDKKHERHPIFGNIVDEVAYHEKYPTIYHLRKKLVDSTDKADLRLIYLALAHMIKFRGHFLIEGDLNPDNSDVDKLFIQLVQTYNQLFEENPINASGVDAKAILSARLSKSRRLENLIAQLPGEKKNGLFGNLIALSLGLTPNFKSNFDLAEDAKLQLSKDTYDDDLDNLLAQIGDQYADLFLAAKNLSDAILLSDILRVNTEITKAPLSASMIKRYDEHHQDLTLLKALVRQQLPEKYKEIFFDQSKNGYAGYIDGGASQEEFYKFIKPILEKMDGTEELLVKLNREDLLRKQRTFDNGSIPHQIHLGELHAILRRQEDFYPFLKDNREKIEKILTFRIPYYVGPLARGNSRFAWMTRKSEETITPWNFEEVVDKGASAQSFIERMTNFDKNLPNEKVLPKHSLLYEYFTVYNELTKVKYVTEGMRKPAFLSGEQKKAIVDLLFKTNRKVTVKQLKEDYFKKIECFDSVEISGVEDRFNASLGTYHDLLKIIKDKDFLDNEENEDILEDIVLTLTLFEDREMIEERLKTYAHLFDDKVMKQLKRRRYTGWGRLSRKLINGIRDKQSGKTILDFLKSDGFANRNFMQLIHDDSLTFKEDIQKAQVSGQGDSLHEHIANLAGSPAIKKGILQTVKVVDELVKVMGRHKPENIVIEMARENQTTQKGQKNSRERMKRIEEGIKELGSQILKEHPVENTQLQNEKLYLYYLQNGRDMYVDQELDINRLSDYDVDHIVPQSFLKDDSIDNKVLTRSDKARGKSDNVPSEEVVKKMKNYWRQLLNAKLITQRKFDNLTKAERGGLSELDKAGFIKRQLVETRQITKHVAQILDSRMNTKYDENDKLIREVKVITLKSKLVSDFRKDFQFYKVREINNYHHAHDAYLNAVVGTALIKKYPKLESEFVYGDYKVYDVRKMIAKSEQEIGKATAKYFFYSNIMNFFKTEITLANGEIRKRPLIETNGETGEIVWDKGRDFATVRKVLSMPQVNIVKKTEVQTGGFSKESILPKRNSDKLIARKKDWDPKKYGGFDSPTVAYSVLVVAKVEKGKSKKLKSVKELLGITIMERSSFEKNPIDFLEAKGYKEVKKDLIIKLPKYSLFELENGRKRMLASAGELQKGNELALPSKYVNFLYLASHYEKLKGSPEDNEQKQLFVEQHKHYLDEIIEQISEFSKRVILADANLDKVLSAYNKHRDKPIREQAENIIHLFTLTNLGAPAAFKYFDTTIDRKRYTSTKEVLDATLIHQSITGLYETRIDLSQLGGDGGGGSGGGPAPGGMDLLKPLTVERKGVKIKGYWNSQADITCVPKDLLQGEEPVRQQNVTTIHGTQEGDVYYVNLKIDGRRINTEVIGTTLDYAIITPGDVPWILKKPLELTIKLDLEEQQGTLLNNSILSKKGKEELKQLFEKYSALWQSWENQVGHRRIRPHKIATGTVKPTPQKQYHINPKAKPDIQIVINDLLKQGVLIQKESTMNTPVYPVPKPNGRWRMVLDYRAVNKVTPLIAVQNQHSYGILGSLFKGRYKTTIDLSNGFWAHPIVPEDYWITAFTWQGKQYCWTVLPQGFLNSPGLFNGDVVDLLQGIPNVEVYVDDVYISHDSEKEHLEYLDILFNRLKEAGYIISLKKSNIANSIVDFLGFQITNEGRGLTDTFKEKLENITAPTTLKQLQSILGLLNFARNFIPDFTELIAPLYALIPKSPKNYVPWQIEHSTTLETLITKLNGAEYLQGRKGDKTLIMKVNASYTTGYIRYYNEGEKKPISYVSIVFSKTELKFTELEKLLTTVHKGLLKALDLSMGQNIHVYSPIVSMQNIQKTPQTAKKALASRWLSWLSYLEDPRIRFFYDPQMPALKDLPAVDTGKDNKKHPSNFQHIFYTDGSAITSPTKEGHLNAGMGIVYFINKDGNLQKQQEWSISLGNHTAQFAEIAAFEFALKKCLPLGGNILVVTDSNYVAKAYNEELDVWASNGFVNNRKKPLKHISKWKSVADLKRLRPDVVVTHEPGHQKLDSSPHAYGNNLADQLATQASFKVHAGKRTADGSEFEKRTADGSEFESPKKKAKVE

SEQ ID NO: 1129 - protein, 2208 aa, synthetic construct
MPAAKRVKLDGGDKKYSIGLDIGTNSVGWAVITDEYKVPSKKFKVLGNTDRHSIKKNLIGALLFDSGETAEATRLKRTARRRYTRRKNRICYLQEIFSNEMAKVDDSFFHRLEESFLVEEDKKHERHPIFGNIVDEVAYHEKYPTIYHLRKKLVDSTDKADLRLIYLALAHMIKFRGHFLIEGDLNPDNSDVDKLFIQLVQTYNQLFEENPINASGVDAKAILSARLSKSRRLENLIAQLPGEKKNGLFGNLIALSLGLTPNFKSNFDLAEDAKLQLSKDTYDDDLDNLLAQIGDQYADLFLAAKNLSDAILLSDILRVNTEITKAPLSASMIKRYDEHHQDLTLLKALVRQQLPEKYKEIFFDQSKNGYAGYIDGGASQEEFYKFIKPILEKMDGTEELLVKLNREDLLRKQRTFDNGSIPHQIHLGELHAILRRQEDFYPFLKDNREKIEKILTFRIPYYVGPLARGNSRFAWMTRKSEETITPWNFEEVVDKGASAQSFIERMTNFDKNLPNEKVLPKHSLLYEYFTVYNELTKVKYVTEGMRKPAFLSGEQKKAIVDLLFKTNRKVTVKQLKEDYFKKIECFDSVEISGVEDRFNASLGTYHDLLKIIKDKDFLDNEENEDILEDIVLTLTLFEDREMIEERLKTYAHLFDDKVMKQLKRRRYTGWGRLSRKLINGIRDKQSGKTILDFLKSDGFANRNFMQLIHDDSLTFKEDIQKAQVSGQGDSLHEHIANLAGSPAIKKGILQTVKVVDELVKVMGRHKPENIVIEMARENQTTQKGQKNSRERMKRIEEGIKELGSQILKEHPVENTQLQNEKLYLYYLQNGRDMYVDQELDINRLSDYDVDHIVPQSFLKDDSIDNKVLTRSDKARGKSDNVPSEEVVKKMKNYWRQLLNAKLITQRKFDNLTKAERGGLSELDKAGFIKRQLVETRQITKHVAQILDSRMNTKYDENDKLIREVKVITLKSKLVSDFRKDFQFYKVREINNYHHAHDAYLNAVVGTALIKKYPKLESEFVYGDYKVYDVRKMIAKSEQEIGKATAKYFFYSNIMNFFKTEITLANGEIRKRPLIETNGETGEIVWDKGRDFATVRKVLSMPQVNIVKKTEVQTGGFSKESILPKRNSDKLIARKKDWDPKKYGGFDSPTVAYSVLVVAKVEKGKSKKLKSVKELLGITIMERSSFEKNPIDFLEAKGYKEVKKDLIIKLPKYSLFELENGRKRMLASAGELQKGNELALPSKYVNFLYLASHYEKLKGSPEDNEQKQLFVEQHKHYLDEIIEQISEFSKRVILADANLDKVLSAYNKHRDKPIREQAENIIHLFTLTNLGAPAAFKYFDTTIDRKRYTSTKEVLDATLIHQSITGLYETRIDLSQLGGDGGAEAAAKEAAAKEAAAKEAAAKALEAEAAAKEAAAKEAAAKEAAAKAGGMDLLKPLTVERKGVKIKGYWNSQADITCVPKDLLQGEEPVRQQNVTTIHGTQEGDVYYVNLKIDGRRINTEVIGTTLDYAIITPGDVPWILKKPLELTIKLDLEEQQGTLLNNSILSKKGKEELKQLFEKYSALWQSWENQVGHRRIRPHKIATGTVKPTPQKQYHINPKAKPDIQIVINDLLKQGVLIQKESTMNTPVYPVPKPNGRWRMVLDYRAVNKVTPLIAVQNQHSYGILGSLFKGRYKTTIDLSNGFWAHPIVPEDYWITAFTWQGKQYCWTVLPQGFLNSPGLFNGDVVDLLQGIPNVEVYVDDVYISHDSEKEHLEYLDILFNRLKEAGYIISLKKSNIANSIVDFLGFQITNEGRGLTDTFKEKLENITAPTTLKQLQSILGKLNFARNFIPDFTELIAPLYALIPKSPKNYVPWQIEHSTTLETLITKLNGAEYLQGRKGDKTLIMKVNASYTTGYIRYYNEGEKKPISYVSIVFSKTELKFTELEKLLTTVHKGLLKALDLSMGQNIHVYSPIVSMQNIQKTPQTAKKALASRWLSWLSYLEDPRIRFFYDPQMPALKDLPAVDTGKDNKKHPSNFQHIFYTDGSAITSPTKEGHLNAGMGIVYFINKDGNLQKQQEWSISLGNHTAQFAEIAAFEFALKKCLPLGGNILVVTDSNYVAKAYNEELDVWASNGFVNNRKKPLKHISKWKSVADLKRLRPDVVVTHEPGHQKLDSSPHAYGNNLADQLATQASFKVHAGKRTADGSEFEKRTADGSEFESPKKKAKVE

SEQ ID NO: 1130 - protein, 2171 aa, synthetic construct
MPAAKRVKLDGGDKKYSIGLDIGTNSVGWAVITDEYKVPSKKFKVLGNTDRHSIKKNLIGALLFDSGETAEATRLKRTARRRYTRRKNRICYLQEIFSNEMAKVDDSFFHRLEESFLVEEDKKHERHPIFGNIVDEVAYHEKYPTIYHLRKKLVDSTDKADLRLIYLALAHMIKFRGHFLIEGDLNPDNSDVDKLFIQLVQTYNQLFEENPINASGVDAKAILSARLSKSRRLENLIAQLPGEKKNGLFGNLIALSLGLTPNFKSNFDLAEDAKLQLSKDTYDDDLDNLLAQIGDQYADLFLAAKNLSDAILLSDILRVNTEITKAPLSASMIKRYDEHHQDLTLLKALVRQQLPEKYKEIFFDQSKNGYAGYIDGGASQEEFYKFIKPILEKMDGTEELLVKLNREDLLRKQRTFDNGSIPHQIHLGELHAILRRQEDFYPFLKDNREKIEKILTFRIPYYVGPLARGNSRFAWMTRKSEETITPWNFEEVVDKGASAQSFIERMTNFDKNLPNEKVLPKHSLLYEYFTVYNELTKVKYVTEGMRKPAFLSGEQKKAIVDLLFKTNRKVTVKQLKEDYFKKIECFDSVEISGVEDRFNASLGTYHDLLKIIKDKDFLDNEENEDILEDIVLTLTLFEDREMIEERLKTYAHLFDDKVMKQLKRRRYTGWGRLSRKLINGIRDKQSGKTILDFLKSDGFANRNFMQLIHDDSLTFKEDIQKAQVSGQGDSLHEHIANLAGSPAIKKGILQTVKVVDELVKVMGRHKPENIVIEMARENQTTQKGQKNSRERMKRIEEGIKELGSQILKEHPVENTQLQNEKLYLYYLQNGRDMYVDQELDINRLSDYDVDHIVPQSFLKDDSIDNKVLTRSDKARGKSDNVPSEEVVKKMKNYWRQLLNAKLITQRKFDNLTKAERGGLSELDKAGFIKRQLVETRQITKHVAQILDSRMNTKYDENDKLIREVKVITLKSKLVSDFRKDFQFYKVREINNYHHAHDAYLNAVVGTALIKKYPKLESEFVYGDYKVYDVRKMIAKSEQEIGKATAKYFFYSNIMNFFKTEITLANGEIRKRPLIETNGETGEIVWDKGRDFATVRKVLSMPQVNIVKKTEVQTGGFSKESILPKRNSDKLIARKKDWDPKKYGGFDSPTVAYSVLVVAKVEKGKSKKLKSVKELLGITIMERSSFEKNPIDFLEAKGYKEVKKDLIIKLPKYSLFELENGRKRMLASAGELQKGNELALPSKYVNFLYLASHYEKLKGSPEDNEQKQLFVEQHKHYLDEIIEQISEFSKRVILADANLDKVLSAYNKHRDKPIREQAENIIHLFTLTNLGAPAAFKYFDTTIDRKRYTSTKEVLDATLIHQSITGLYETRIDLSQLGGDGGGSSPAPGGSGGMDLLKPLTVERKGVKIKGYWNSQADITCVPKDLLQGEEPVRQQNVTTIHGTQEGDVYYVNLKIDGRRINTEVIGTTLDYAIITPGDVPWILKKPLELTIKLDLEEQQGTLLNNSILSKKGKEELKQLFEKYSALWQSWENQVGHRRIRPHKIATGTVKPTPQKQYHINPKAKPDIQIVINDLLKQGVLIQKESTMNTPVYPVPKPNGRWRMVLDYRAVNKVTPLIAVQNQHSYGILGSLFKGRYKTTIDLSNGFWAHPIVPEDYWITAFTWQGKQYCWTVLPQGFLNSPGLFNGDVVDLLQGIPNVEVYVDDVYISHDSEKEHLEYLDILFNRLKEAGYIISLKKSNIANSIVDFLGFQITNEGRGLTDTFKEKLENITAPTTLKQLQSILGKLNFARNFIPDFTELIAPLYALIPKSPKNYVPWQIEHSTTLETLITKLNGAEYLQGRKGDKTLIMKVNASYTTGYIRYYNEGEKKPISYVSIVFSKTELKFTELEKLLTTVHKGLLKALDLSMGQNIHVYSPIVSMQNIQKTPQTAKKALASRWLSWLSYLEDPRIRFFYDPQMPALKDLPAVDTGKDNKKHPSNFQHIFYTDGSAITSPTKEGHLNAGMGIVYFINKDGNLQKQQEWSISLGNHTAQFAEIAAFEFALKKCLPLGGNILVVTDSNYVAKAYNEELDVWASNGFVNNRKKPLKHISKWKSVADLKRLRPDVVVTHEPGHQKLDSSPHAYGNNLADQLATQASFKVHAGKRTADGSEFEKRTADGSEFESPKKKAKVE

SEQ ID NO: 1131 - protein, 2182 aa, synthetic construct
MPAAKRVKLDGGDKKYSIGLDIGTNSVGWAVITDEYKVPSKKFKVLGNTDRHSIKKNLIGALLFDSGETAEATRLKRTARRRYTRRKNRICYLQEIFSNEMAKVDDSFFHRLEESFLVEEDKKHERHPIFGNIVDEVAYHEKYPTIYHLRKKLVDSTDKADLRLIYLALAHMIKFRGHFLIEGDLNPDNSDVDKLFIQLVQTYNQLFEENPINASGVDAKAILSARLSKSRRLENLIAQLPGEKKNGLFGNLIALSLGLTPNFKSNFDLAEDAKLQLSKDTYDDDLDNLLAQIGDQYADLFLAAKNLSDAILLSDILRVNTEITKAPLSASMIKRYDEHHQDLTLLKALVRQQLPEKYKEIFFDQSKNGYAGYIDGGASQEEFYKFIKPILEKMDGTEELLVKLNREDLLRKQRTFDNGSIPHQIHLGELHAILRRQEDFYPFLKDNREKIEKILTFRIPYYVGPLARGNSRFAWMTRKSEETITPWNFEEVVDKGASAQSFIERMTNFDKNLPNEKVLPKHSLLYEYFTVYNELTKVKYVTEGMRKPAFLSGEQKKAIVDLLFKTNRKVTVKQLKEDYFKKIECFDSVEISGVEDRFNASLGTYHDLLKIIKDKDFLDNEENEDILEDIVLTLTLFEDREMIEERLKTYAHLFDDKVMKQLKRRRYTGWGRLSRKLINGIRDKQSGKTILDFLKSDGFANRNFMQLIHDDSLTFKEDIQKAQVSGQGDSLHEHIANLAGSPAIKKGILQTVKVVDELVKVMGRHKPENIVIEMARENQTTQKGQKNSRERMKRIEEGIKELGSQILKEHPVENTQLQNEKLYLYYLQNGRDMYVDQELDINRLSDYDVDHIVPQSFLKDDSIDNKVLTRSDKARGKSDNVPSEEVVKKMKNYWRQLLNAKLITQRKFDNLTKAERGGLSELDKAGFIKRQLVETRQITKHVAQILDSRMNTKYDENDKLIREVKVITLKSKLVSDFRKDFQFYKVREINNYHHAHDAYLNAVVGTALIKKYPKLESEFVYGDYKVYDVRKMIAKSEQEIGKATAKYFFYSNIMNFFKTEITLANGEIRKRPLIETNGETGEIVWDKGRDFATVRKVLSMPQVNIVKKTEVQTGGFSKESILPKRNSDKLIARKKDWDPKKYGGFDSPTVAYSVLVVAKVEKGKSKKLKSVKELLGITIMERSSFEKNPIDFLEAKGYKEVKKDLIIKLPKYSLFELENGRKRMLASAGELQKGNELALPSKYVNFLYLASHYEKLKGSPEDNEQKQLFVEQHKHYLDEIIEQISEFSKRVILADANLDKVLSAYNKHRDKPIREQAENIIHLFTLTNLGAPAAFKYFDTTIDRKRYTSTKEVLDATLIHQSITGLYETRIDLSQLGGDGGGGGGSGGGGSGGGGSGGGGSGGMDLLKPLTVERKGVKIKGYWNSQADITCVPKDLLQGEEPVRQQNVTTIHGTQEGDVYYVNLKIDGRRINTEVIGTTLDYAIITPGDVPWILKKPLELTIKLDLEEQQGTLLNNSILSKKGKEELKQLFEKYSALWQSWENQVGHRRIRPHKIATGTVKPTPQKQYHINPKAKPDIQIVINDLLKQGVLIQKESTMNTPVYPVPKPNGRWRMVLDYRAVNKVTPLIAVQNQHSYGILGSLFKGRYKTTIDLSNGFWAHPIVPEDYWITAFTWQGKQYCWTVLPQGFLNSPGLFNGDVVDLLQGIPNVEVYVDDVYISHDSEKEHLEYLDILFNRLKEAGYIISLKKSNIANSIVDFLGFQITNEGRGLTDTFKEKLENITAPTTLKQLQSILGKLNFARNFIPDFTELIAPLYALIPKSPKNYVPWQIEHSTTLETLITKLNGAEYLQGRKGDKTLIMKVNASYTTGYIRYYNEGEKKPISYVSIVFSKTELKFTELEKLLTTVHKGLLKALDLSMGQNIHVYSPIVSMQNIQKTPQTAKKALASRWLSWLSYLEDPRIRFFYDPQMPALKDLPAVDTGKDNKKHPSNFQHIFYTDGSAITSPTKEGHLNAGMGIVYFINKDGNLQKQQEWSISLGNHTAQFAEIAAFEFALKKCLPLGGNILVVTDSNYVAKAYNEELDVWASNGFVNNRKKPLKHISKWKSVADLKRLRPDVVVTHEPGHQKLDSSPHAYGNNLADQLATQASFKVHAGKRTADGSEFEKRTADGSEFESPKKKAKVE

SEQ ID NO: 1132 - protein, 2167 aa, synthetic construct
MPAAKRVKLDGGDKKYSIGLDIGTNSVGWAVITDEYKVPSKKFKVLGNTDRHSIKKNLIGALLFDSGETAEATRLKRTARRRYTRRKNRICYLQEIFSNEMAKVDDSFFHRLEESFLVEEDKKHERHPIFGNIVDEVAYHEKYPTIYHLRKKLVDSTDKADLRLIYLALAHMIKFRGHFLIEGDLNPDNSDVDKLFIQLVQTYNQLFEENPINASGVDAKAILSARLSKSRRLENLIAQLPGEKKNGLFGNLIALSLGLTPNFKSNFDLAEDAKLQLSKDTYDDDLDNLLAQIGDQYADLFLAAKNLSDAILLSDILRVNTEITKAPLSASMIKRYDEHHQDLTLLKALVRQQLPEKYKEIFFDQSKNGYAGYIDGGASQEEFYKFIKPILEKMDGTEELLVKLNREDLLRKQRTFDNGSIPHQIHLGELHAILRRQEDFYPFLKDNREKIEKILTFRIPYYVGPLARGNSRFAWMTRKSEETITPWNFEEVVDKGASAQSFIERMTNFDKNLPNEKVLPKHSLLYEYFTVYNELTKVKYVTEGMRKPAFLSGEQKKAIVDLLFKTNRKVTVKQLKEDYFKKIECFDSVEISGVEDRFNASLGTYHDLLKIIKDKDFLDNEENEDILEDIVLTLTLFEDREMIEERLKTYAHLFDDKVMKQLKRRRYTGWGRLSRKLINGIRDKQSGKTILDFLKSDGFANRNFMQLIHDDSLTFKEDIQKAQVSGQGDSLHEHIANLAGSPAIKKGILQTVKVVDELVKVMGRHKPENIVIEMARENQTTQKGQKNSRERMKRIEEGIKELGSQILKEHPVENTQLQNEKLYLYYLQNGRDMYVDQELDINRLSDYDVDHIVPQSFLKDDSIDNKVLTRSDKARGKSDNVPSEEVVKKMKNYWRQLLNAKLITQRKFDNLTKAERGGLSELDKAGFIKRQLVETRQITKHVAQILDSRMNTKYDENDKLIREVKVITLKSKLVSDFRKDFQFYKVREINNYHHAHDAYLNAVVGTALIKKYPKLESEFVYGDYKVYDVRKMIAKSEQEIGKATAKYFFYSNIMNFFKTEITLANGEIRKRPLIETNGETGEIVWDKGRDFATVRKVLSMPQVNIVKKTEVQTGGFSKESILPKRNSDKLIARKKDWDPKKYGGFDSPTVAYSVLVVAKVEKGKSKKLKSVKELLGITIMERSSFEKNPIDFLEAKGYKEVKKDLIIKLPKYSLFELENGRKRMLASAGELQKGNELALPSKYVNFLYLASHYEKLKGSPEDNEQKQLFVEQHKHYLDEIIEQISEFSKRVILADANLDKVLSAYNKHRDKPIREQAENIIHLFTLTNLGAPAAFKYFDTTIDRKRYTSTKEVLDATLIHQSITGLYETRIDLSQLGGDGGEAAAKGGMDLLKPLTVERKGVKIKGYWNSQADITCVPKDLLQGEEPVRQQNVTTIHGTQEGDVYYVNLKIDGRRINTEVIGTTLDYAIITPGDVPWILKKPLELTIKLDLEEQQGTLLNNSILSKKGKEELKQLFEKYSALWQSWENQVGHRRIRPHKIATGTVKPTPQKQYHINPKAKPDIQIVINDLLKQGVLIQKESTMNTPVYPVPKPNGRWRMVLDYRAVNKVTPLIAVQNQHSYGILGSLFKGRYKTTIDLSNGFWAHPIVPEDYWITAFTWQGKQYCWTVLPQGFLNSPGLFNGDVVDLLQGIPNVEVYVDDVYISHDSEKEHLEYLDILFNRLKEAGYIISLKKSNIANSIVDFLGFQITNEGRGLTDTFKEKLENITAPTTLKQLQSILGKLNFARNFIPDFTELIAPLYALIPKSPKNYVPWQIEHSTTLETLITKLNGAEYLQGRKGDKTLIMKVNASYTTGYIRYYNEGEKKPISYVSIVFSKTELKFTELEKLLTTVHKGLLKALDLSMGQNIHVYSPIVSMQNIQKTPQTAKKALASRWLSWLSYLEDPRIRFFYDPQMPALKDLPAVDTGKDNKKHPSNFQHIFYTDGSAITSPTKEGHLNAGMGIVYFINKDGNLQKQQEWSISLGNHTAQFAEIAAFEFALKKCLPLGGNILVVTDSNYVAKAYNEELDVWASNGFVNNRKKPLKHISKWKSVADLKRLRPDVVVTHEPGHQKLDSSPHAYGNNLADQLATQASFKVHAGKRTADGSEFEKRTADGSEFESPKKKAKVE

SEQ ID NO: 1133 - protein, 2174 aa, synthetic construct
MPAAKRVKLDGGDKKYSIGLDIGTNSVGWAVITDEYKVPSKKFKVLGNTDRHSIKKNLIGALLFDSGETAEATRLKRTARRRYTRRKNRICYLQEIFSNEMAKVDDSFFHRLEESFLVEEDKKHERHPIFGNIVDEVAYHEKYPTIYHLRKKLVDSTDKADLRLIYLALAHMIKFRGHFLIEGDLNPDNSDVDKLFIQLVQTYNQLFEENPINASGVDAKAILSARLSKSRRLENLIAQLPGEKKNGLFGNLIALSLGLTPNFKSNFDLAEDAKLQLSKDTYDDDLDNLLAQIGDQYADLFLAAKNLSDAILLSDILRVNTEITKAPLSASMIKRYDEHHQDLTLLKALVRQQLPEKYKEIFFDQSKNGYAGYIDGGASQEEFYKFIKPILEKMDGTEELLVKLNREDLLRKQRTFDNGSIPHQIHLGELHAILRRQEDFYPFLKDNREKIEKILTFRIPYYVGPLARGNSRFAWMTRKSEETITPWNFEEVVDKGASAQSFIERMTNFDKNLPNEKVLPKHSLLYEYFTVYNELTKVKYVTEGMRKPAFLSGEQKKAIVDLLFKTNRKVTVKQLKEDYFKKIECFDSVEISGVEDRFNASLGTYHDLLKIIKDKDFLDNEENEDILEDIVLTLTLFEDREMIEERLKTYAHLFDDKVMKQLKRRRYTGWGRLSRKLINGIRDKQSGKTILDFLKSDGFANRNFMQLIHDDSLTFKEDIQKAQVSGQGDSLHEHIANLAGSPAIKKGILQTVKVVDELVKVMGRHKPENIVIEMARENQTTQKGQKNSRERMKRIEEGIKELGSQILKEHPVENTQLQNEKLYLYYLQNGRDMYVDQELDINRLSDYDVDHIVPQSFLKDDSIDNKVLTRSDKARGKSDNVPSEEVVKKMKNYWRQLLNAKLITQRKFDNLTKAERGGLSELDKAGFIKRQLVETRQITKHVAQILDSRMNTKYDENDKLIREVKVITLKSKLVSDFRKDFQFYKVREINNYHHAHDAYLNAVVGTALIKKYPKLESEFVYGDYKVYDVRKMIAKSEQEIGKATAKYFFYSNIMNFFKTEITLANGEIRKRPLIETNGETGEIVWDKGRDFATVRKVLSMPQVNIVKKTEVQTGGFSKESILPKRNSDKLIARKKDWDPKKYGGFDSPTVAYSVLVVAKVEKGKSKKLKSVKELLGITIMERSSFEKNPIDFLEAKGYKEVKKDLIIKLPKYSLFELENGRKRMLASAGELQKGNELALPSKYVNFLYLASHYEKLKGSPEDNEQKQLFVEQHKHYLDEIIEQISEFSKRVILADANLDKVLSAYNKHRDKPIREQAENIIHLFTLTNLGAPAAFKYFDTTIDRKRYTSTKEVLDATLIHQSITGLYETRIDLSQLGGDGGGSAGSAAGSGEFGGMDLLKPLTVERKGVKIKGYWNSQADITCVPKDLLQGEEPVRQQNVTTIHGTQEGDVYYVNLKIDGRRINTEVIGTTLDYAIITPGDVPWILKKPLELTIKLDLEEQQGTLLNNSILSKKGKEELKQLFEKYSALWQSWENQVGHRRIRPHKIATGTVKPTPQKQYHINPKAKPDIQIVINDLLKQGVLIQKESTMNTPVYPVPKPNGRWRMVLDYRAVNKVTPLIAVQNQHSYGILGSLFKGRYKTTIDLSNGFWAHPIVPEDYWITAFTWQGKQYCWTVLPQGFLNSPGLFNGDVVDLLQGIPNVEVYVDDVYISHDSEKEHLEYLDILFNRLKEAGYIISLKKSNIANSIVDFLGFQITNEGRGLTDTFKEKLENITAPTTLKQLQSILGKLNFARNFIPDFTELIAPLYALIPKSPKNYVPWQIEHSTTLETLITKLNGAEYLQGRKGDKTLIMKVNASYTTGYIRYYNEGEKKPISYVSIVFSKTELKFTELEKLLTTVHKGLLKALDLSMGQNIHVYSPIVSMQNIQKTPQTAKKALASRWLSWLSYLEDPRIRFFYDPQMPALKDLPAVDTGKDNKKHPSNFQHIFYTDGSAITSPTKEGHLNAGMGIVYFINKDGNLQKQQEWSISLGNHTAQFAEIAAFEFALKKCLPLGGNILVVTDSNYVAKAYNEELDVWASNGFVNNRKKPLKHISKWKSVADLKRLRPDVVVTHEPGHQKLDSSPHAYGNNLADQLATQASFKVHAGKRTADGSEFEKRTADGSEFESPKKKAKVE

SEQ ID NO: 1134 - protein, 2109 aa, synthetic construct
MPAAKRVKLDGGDKKYSIGLDIGTNSVGWAVITDEYKVPSKKFKVLGNTDRHSIKKNLIGALLFDSGETAEATRLKRTARRRYTRRKNRICYLQEIFSNEMAKVDDSFFHRLEESFLVEEDKKHERHPIFGNIVDEVAYHEKYPTIYHLRKKLVDSTDKADLRLIYLALAHMIKFRGHFLIEGDLNPDNSDVDKLFIQLVQTYNQLFEENPINASGVDAKAILSARLSKSRRLENLIAQLPGEKKNGLFGNLIALSLGLTPNFKSNFDLAEDAKLQLSKDTYDDDLDNLLAQIGDQYADLFLAAKNLSDAILLSDILRVNTEITKAPLSASMIKRYDEHHQDLTLLKALVRQQLPEKYKEIFFDQSKNGYAGYIDGGASQEEFYKFIKPILEKMDGTEELLVKLNREDLLRKQRTFDNGSIPHQIHLGELHAILRRQEDFYPFLKDNREKIEKILTFRIPYYVGPLARGNSRFAWMTRKSEETITPWNFEEVVDKGASAQSFIERMTNFDKNLPNEKVLPKHSLLYEYFTVYNELTKVKYVTEGMRKPAFLSGEQKKAIVDLLFKTNRKVTVKQLKEDYFKKIECFDSVEISGVEDRFNASLGTYHDLLKIIKDKDFLDNEENEDILEDIVLTLTLFEDREMIEERLKTYAHLFDDKVMKQLKRRRYTGWGRLSRKLINGIRDKQSGKTILDFLKSDGFANRNFMQLIHDDSLTFKEDIQKAQVSGQGDSLHEHIANLAGSPAIKKGILQTVKVVDELVKVMGRHKPENIVIEMARENQTTQKGQKNSRERMKRIEEGIKELGSQILKEHPVENTQLQNEKLYLYYLQNGRDMYVDQELDINRLSDYDVDHIVPQSFLKDDSIDNKVLTRSDKARGKSDNVPSEEVVKKMKNYWRQLLNAKLITQRKFDNLTKAERGGLSELDKAGFIKRQLVETRQITKHVAQILDSRMNTKYDENDKLIREVKVITLKSKLVSDFRKDFQFYKVREINNYHHAHDAYLNAVVGTALIKKYPKLESEFVYGDYKVYDVRKMIAKSEQEIGKATAKYFFYSNIMNFFKTEITLANGEIRKRPLIETNGETGEIVWDKGRDFATVRKVLSMPQVNIVKKTEVQTGGFSKESILPKRNSDKLIARKKDWDPKKYGGFDSPTVAYSVLVVAKVEKGKSKKLKSVKELLGITIMERSSFEKNPIDFLEAKGYKEVKKDLIIKLPKYSLFELENGRKRMLASAGELQKGNELALPSKYVNFLYLASHYEKLKGSPEDNEQKQLFVEQHKHYLDEIIEQISEFSKRVILADANLDKVLSAYNKHRDKPIREQAENIIHLFTLTNLGAPAAFKYFDTTIDRKRYTSTKEVLDATLIHQSITGLYETRIDLSQLGGDGGEAAAKEAAAKEAAAKEAAAKEAAAKGGTLQLEEEYRLFEPESTQKQEMDIWLKNFPQAWAETGGMGTAHCQAPVLIQLKATATPISIRQYPMPHEAYQGIKPHIRRMLDQGILKPCQSPWNTPLLPVKKPGTEDYRPVQDLREVNKRVEDIHPTVPNPYNLLSTLPPSHPWYTVLDLKDAFFCLRLHSESQLLFAFEWRDPEIGLSGQLTWTRLPQGFKNSPTLFDEALHSDLADFRVRYPALVLLQYVDDLLLAAATRTECLEGTKALLETLGNKGYRASAKKAQICLQEVTYLGYSLKDGQRWLTKARKEAILSIPVPKNSRQVREFLGTAGYCRLWIPGFAELAAPLYPLTRPGTLFQWGTEQQLAFEDIKKALLSSPALGLPDITKPFELFIDENSGFAKGVLVQKLGPWKRPVAYLSKKLDTVASGWPPCLRMVAAIAILVKDAGKLTLGQPLTILTSHPVEALVRQPPNKWLSNARMTHYQAMLLDAERVHFGPTVSLNPATLLPLPSGGNHHDCLQILAETHGTRPDLTDQPLPDADLTWYTDGSSFIRNGEREAGAAVTTESEVIWAAPLPPGTSAQRAELIALTQALKMAEGKKLTVYTDSRYAFATTHVHGEIYRRRGLLTSEGKEIKNKNEILALLEALFLPKRLSIIHCPGHQKGDSPQAKGNRLADDTAKKAATETHSSLTVLPAGKRTADGSEFEKRTADGSEFESPKKKAKVE

SEQ ID NO: 1135 - protein, 2095 aa, synthetic construct
MPAAKRVKLDGGDKKYSIGLDIGTNSVGWAVITDEYKVPSKKFKVLGNTDRHSIKKNLIGALLFDSGETAEATRLKRTARRRYTRRKNRICYLQEIFSNEMAKVDDSFFHRLEESFLVEEDKKHERHPIFGNIVDEVAYHEKYPTIYHLRKKLVDSTDKADLRLIYLALAHMIKFRGHFLIEGDLNPDNSDVDKLFIQLVQTYNQLFEENPINASGVDAKAILSARLSKSRRLENLIAQLPGEKKNGLFGNLIALSLGLTPNFKSNFDLAEDAKLQLSKDTYDDDLDNLLAQIGDQYADLFLAAKNLSDAILLSDILRVNTEITKAPLSASMIKRYDEHHQDLTLLKALVRQQLPEKYKEIFFDQSKNGYAGYIDGGASQEEFYKFIKPILEKMDGTEELLVKLNREDLLRKQRTFDNGSIPHQIHLGELHAILRRQEDFYPFLKDNREKIEKILTFRIPYYVGPLARGNSRFAWMTRKSEETITPWNFEEVVDKGASAQSFIERMTNFDKNLPNEKVLPKHSLLYEYFTVYNELTKVKYVTEGMRKPAFLSGEQKKAIVDLLFKTNRKVTVKQLKEDYFKKIECFDSVEISGVEDRFNASLGTYHDLLKIIKDKDFLDNEENEDILEDIVLTLTLFEDREMIEERLKTYAHLFDDKVMKQLKRRRYTGWGRLSRKLINGIRDKQSGKTILDFLKSDGFANRNFMQLIHDDSLTFKEDIQKAQVSGQGDSLHEHIANLAGSPAIKKGILQTVKVVDELVKVMGRHKPENIVIEMARENQTTQKGQKNSRERMKRIEEGIKELGSQILKEHPVENTQLQNEKLYLYYLQNGRDMYVDQELDINRLSDYDVDHIVPQSFLKDDSIDNKVLTRSDKARGKSDNVPSEEVVKKMKNYWRQLLNAKLITQRKFDNLTKAERGGLSELDKAGFIKRQLVETRQITKHVAQILDSRMNTKYDENDKLIREVKVITLKSKLVSDFRKDFQFYKVREINNYHHAHDAYLNAVVGTALIKKYPKLESEFVYGDYKVYDVRKMIAKSEQEIGKATAKYFFYSNIMNFFKTEITLANGEIRKRPLIETNGETGEIVWDKGRDFATVRKVLSMPQVNIVKKTEVQTGGFSKESILPKRNSDKLIARKKDWDPKKYGGFDSPTVAYSVLVVAKVEKGKSKKLKSVKELLGITIMERSSFEKNPIDFLEAKGYKEVKKDLIIKLPKYSLFELENGRKRMLASAGELQKGNELALPSKYVNFLYLASHYEKLKGSPEDNEQKQLFVEQHKHYLDEIIEQISEFSKRVILADANLDKVLSAYNKHRDKPIREQAENIIHLFTLTNLGAPAAFKYFDTTIDRKRYTSTKEVLDATLIHQSITGLYETRIDLSQLGGDGGGGSEAAAKPAPGGTLQLEEEYRLFEPESTQKQEMDIWLKNFPQAWAETGGMGTAHCQAPVLIQLKATATPISIRQYPMPHEAYQGIKPHIRRMLDQGILKPCQSPWNTPLLPVKKPGTEDYRPVQDLREVNKRVEDIHPTVPNPYNLLSTLPPSHPWYTVLDLKDAFFCLRLHSESQLLFAFEWRDPEIGLSGQLTWTRLPQGFKNSPTLFDEALHSDLADFRVRYPALVLLQYVDDLLLAAATRTECLEGTKALLETLGNKGYRASAKKAQICLQEVTYLGYSLKDGQRWLTKARKEAILSIPVPKNSRQVREFLGTAGYCRLWIPGFAELAAPLYPLTRPGTLFQWGTEQQLAFEDIKKALLSSPALGLPDITKPFELFIDENSGFAKGVLVQKLGPWKRPVAYLSKKLDTVASGWPPCLRMVAAIAILVKDAGKLTLGQPLTILTSHPVEALVRQPPNKWLSNARMTHYQAMLLDAERVHFGPTVSLNPATLLPLPSGGNHHDCLQILAETHGTRPDLTDQPLPDADLTWYTDGSSFIRNGEREAGAAVTTESEVIWAAPLPPGTSAQRAELIALTQALKMAEGKKLTVYTDSRYAFATTHVHGEIYRRRGLLTSEGKEIKNKNEILALLEALFLPKRLSIIHCPGHQKGDSPQAKGNRLADDTAKKAATETHSSLTVLPAGKRTADGSEFEKRTADGSEFESPKKKAKVE

SEQ ID NO: 1136 - protein, 2093 aa, synthetic construct
MPAAKRVKLDGGDKKYSIGLDIGTNSVGWAVITDEYKVPSKKFKVLGNTDRHSIKKNLIGALLFDSGETAEATRLKRTARRRYTRRKNRICYLQEIFSNEMAKVDDSFFHRLEESFLVEEDKKHERHPIFGNIVDEVAYHEKYPTIYHLRKKLVDSTDKADLRLIYLALAHMIKFRGHFLIEGDLNPDNSDVDKLFIQLVQTYNQLFEENPINASGVDAKAILSARLSKSRRLENLIAQLPGEKKNGLFGNLIALSLGLTPNFKSNFDLAEDAKLQLSKDTYDDDLDNLLAQIGDQYADLFLAAKNLSDAILLSDILRVNTEITKAPLSASMIKRYDEHHQDLTLLKALVRQQLPEKYKEIFFDQSKNGYAGYIDGGASQEEFYKFIKPILEKMDGTEELLVKLNREDLLRKQRTFDNGSIPHQIHLGELHAILRRQEDFYPFLKDNREKIEKILTFRIPYYVGPLARGNSRFAWMTRKSEETITPWNFEEVVDKGASAQSFIERMTNFDKNLPNEKVLPKHSLLYEYFTVYNELTKVKYVTEGMRKPAFLSGEQKKAIVDLLFKTNRKVTVKQLKEDYFKKIECFDSVEISGVEDRFNASLGTYHDLLKIIKDKDFLDNEENEDILEDIVLTLTLFEDREMIEERLKTYAHLFDDKVMKQLKRRRYTGWGRLSRKLINGIRDKQSGKTILDFLKSDGFANRNFMQLIHDDSLTFKEDIQKAQVSGQGDSLHEHIANLAGSPAIKKGILQTVKVVDELVKVMGRHKPENIVIEMARENQTTQKGQKNSRERMKRIEEGIKELGSQILKEHPVENTQLQNEKLYLYYLQNGRDMYVDQELDINRLSDYDVDHIVPQSFLKDDSIDNKVLTRSDKARGKSDNVPSEEVVKKMKNYWRQLLNAKLITQRKFDNLTKAERGGLSELDKAGFIKRQLVETRQITKHVAQILDSRMNTKYDENDKLIREVKVITLKSKLVSDFRKDFQFYKVREINNYHHAHDAYLNAVVGTALIKKYPKLESEFVYGDYKVYDVRKMIAKSEQEIGKATAKYFFYSNIMNFFKTEITLANGEIRKRPLIETNGETGEIVWDKGRDFATVRKVLSMPQVNIVKKTEVQTGGFSKESILPKRNSDKLIARKKDWDPKKYGGFDSPTVAYSVLVVAKVEKGKSKKLKSVKELLGITIMERSSFEKNPIDFLEAKGYKEVKKDLIIKLPKYSLFELENGRKRMLASAGELQKGNELALPSKYVNFLYLASHYEKLKGSPEDNEQKQLFVEQHKHYLDEIIEQISEFSKRVILADANLDKVLSAYNKHRDKPIREQAENIIHLFTLTNLGAPAAFKYFDTTIDRKRYTSTKEVLDATLIHQSITGLYETRIDLSQLGGDGGPAPGSSGGGGGTLQLEEEYRLFEPESTQKQEMDIWLKNFPQAWAETGGMGTAHCQAPVLIQLKATATPISIRQYPMPHEAYQGIKPHIRRMLDQGILKPCQSPWNTPLLPVKKPGTEDYRPVQDLREVNKRVEDIHPTVPNPYNLLSTLPPSHPWYTVLDLKDAFFCLRLHSESQLLFAFEWRDPEIGLSGQLTWTRLPQGFKNSPTLFDEALHSDLADFRVRYPALVLLQYVDDLLLAAATRTECLEGTKALLETLGNKGYRASAKKAQICLQEVTYLGYSLKDGQRWLTKARKEAILSIPVPKNSRQVREFLGTAGYCRLWIPGFAELAAPLYPLTRPGTLFQWGTEQQLAFEDIKKALLSSPALGLPDITKPFELFIDENSGFAKGVLVQKLGPWKRPVAYLSKKLDTVASGWPPCLRMVAAIAILVKDAGKLTLGQPLTILTSHPVEALVRQPPNKWLSNARMTHYQAMLLDAERVHFGPTVSLNPATLLPLPSGGNHHDCLQILAETHGTRPDLTDQPLPDADLTWYTDGSSFIRNGEREAGAAVTTESEVIWAAPLPPGTSAQRAELIALTQALKMAEGKKLTVYTDSRYAFATTHVHGEIYRRRGLLTSEGKEIKNKNEILALLEALFLPKRLSIIHCPGHQKGDSPQAKGNRLADDTAKKAATETHSSLTVLPAGKRTADGSEFEKRTADGSEFESPKKKAKVE

SEQ ID NO: 1137 - protein, 2107 aa, synthetic construct
MPAAKRVKLDGGDKKYSIGLDIGTNSVGWAVITDEYKVPSKKFKVLGNTDRHSIKKNLIGALLFDSGETAEATRLKRTARRRYTRRKNRICYLQEIFSNEMAKVDDSFFHRLEESFLVEEDKKHERHPIFGNIVDEVAYHEKYPTIYHLRKKLVDSTDKADLRLIYLALAHMIKFRGHFLIEGDLNPDNSDVDKLFIQLVQTYNQLFEENPINASGVDAKAILSARLSKSRRLENLIAQLPGEKKNGLFGNLIALSLGLTPNFKSNFDLAEDAKLQLSKDTYDDDLDNLLAQIGDQYADLFLAAKNLSDAILLSDILRVNTEITKAPLSASMIKRYDEHHQDLTLLKALVRQQLPEKYKEIFFDQSKNGYAGYIDGGASQEEFYKFIKPILEKMDGTEELLVKLNREDLLRKQRTFDNGSIPHQIHLGELHAILRRQEDFYPFLKDNREKIEKILTFRIPYYVGPLARGNSRFAWMTRKSEETITPWNFEEVVDKGASAQSFIERMTNFDKNLPNEKVLPKHSLLYEYFTVYNELTKVKYVTEGMRKPAFLSGEQKKAIVDLLFKTNRKVTVKQLKEDYFKKIECFDSVEISGVEDRFNASLGTYHDLLKIIKDKDFLDNEENEDILEDIVLTLTLFEDREMIEERLKTYAHLFDDKVMKQLKRRRYTGWGRLSRKLINGIRDKQSGKTILDFLKSDGFANRNFMQLIHDDSLTFKEDIQKAQVSGQGDSLHEHIANLAGSPAIKKGILQTVKVVDELVKVMGRHKPENIVIEMARENQTTQKGQKNSRERMKRIEEGIKELGSQILKEHPVENTQLQNEKLYLYYLQNGRDMYVDQELDINRLSDYDVDHIVPQSFLKDDSIDNKVLTRSDKARGKSDNVPSEEVVKKMKNYWRQLLNAKLITQRKFDNLTKAERGGLSELDKAGFIKRQLVETRQITKHVAQILDSRMNTKYDENDKLIREVKVITLKSKLVSDFRKDFQFYKVREINNYHHAHDAYLNAVVGTALIKKYPKLESEFVYGDYKVYDVRKMIAKSEQEIGKATAKYFFYSNIMNFFKTEITLANGEIRKRPLIETNGETGEIVWDKGRDFATVRKVLSMPQVNIVKKTEVQTGGFSKESILPKRNSDKLIARKKDWDPKKYGGFDSPTVAYSVLVVAKVEKGKSKKLKSVKELLGITIMERSSFEKNPIDFLEAKGYKEVKKDLIIKLPKYSLFELENGRKRMLASAGELQKGNELALPSKYVNFLYLASHYEKLKGSPEDNEQKQLFVEQHKHYLDEIIEQISEFSKRVILADANLDKVLSAYNKHRDKPIREQAENIIHLFTLTNLGAPAAFKYFDTTIDRKRYTSTKEVLDATLIHQSITGLYETRIDLSQLGGDGGEAAAKEAAAKEAAAKEAAAKGGTAPLEEEYRLFLEAPIQNVTLLEQWKREIPKVWAEINPPGLASTQAPIHVQLLSTALPVRVRQYPITLEAKRSLRETIRKFRAAGILRPVHSPWNTPLLPVRKSGTSEYRMVQDLREVNKRVETIHPTVPNPYTLLSLLPPDRIWYSVLDLKDAFFCIPLAPESQLIFAFEWADAEEGESGQLTWTRLPQGFKNSPTLFNEALNRDLQGFRLDHPSVSLLQYVDDLLIAADTQAACLSATRDLLMTLAELGYRVSGKKAQLCQEEVTYLGFKIHKGSRSLSNSRTQAILQIPVPKTKRQVREFLGTIGYCRLWIPGFAELAQPLYAATRPGNDPLVWGEKEEEAFQSLKLALTQPPALALPSLDKPFQLFVEETSGAAKGVLTQALGPWKRPVAYLSKRLDPVAAGWPRCLRAIAAAALLTREASKLTFGQDIEITSSHNLESLLRSPPDKWLTNARITQYQVLLLDPPRVRFKQTAALNPATLLPETDDTLPIHHCLDTLDSLTSTRPDLTDQPLAQAEATLFTDGSSYIRDGKRYAGAAVVTLDSVIWAEPLPIGTSAQKAELIALTKALEWSKDKSVNIYTDSRYAFATLHVHGMIYRERGWLTAGGKAIKNAPEILALLTAVWLPKRVAVMHCKGHQKDDAPTSTGNRRADEVAREVAIRPLSTQATISAGKRTADGSEFEKRTADGSEFESPKKKAKVE

SEQ ID NO: 1138 - protein, 2100 aa, synthetic construct
MPAAKRVKLDGGDKKYSIGLDIGTNSVGWAVITDEYKVPSKKFKVLGNTDRHSIKKNLIGALLFDSGETAEATRLKRTARRRYTRRKNRICYLQEIFSNEMAKVDDSFFHRLEESFLVEEDKKHERHPIFGNIVDEVAYHEKYPTIYHLRKKLVDSTDKADLRLIYLALAHMIKFRGHFLIEGDLNPDNSDVDKLFIQLVQTYNQLFEENPINASGVDAKAILSARLSKSRRLENLIAQLPGEKKNGLFGNLIALSLGLTPNFKSNFDLAEDAKLQLSKDTYDDDLDNLLAQIGDQYADLFLAAKNLSDAILLSDILRVNTEITKAPLSASMIKRYDEHHQDLTLLKALVRQQLPEKYKEIFFDQSKNGYAGYIDGGASQEEFYKFIKPILEKMDGTEELLVKLNREDLLRKQRTFDNGSIPHQIHLGELHAILRRQEDFYPFLKDNREKIEKILTFRIPYYVGPLARGNSRFAWMTRKSEETITPWNFEEVVDKGASAQSFIERMTNFDKNLPNEKVLPKHSLLYEYFTVYNELTKVKYVTEGMRKPAFLSGEQKKAIVDLLFKTNRKVTVKQLKEDYFKKIECFDSVEISGVEDRFNASLGTYHDLLKIIKDKDFLDNEENEDILEDIVLTLTLFEDREMIEERLKTYAHLFDDKVMKQLKRRRYTGWGRLSRKLINGIRDKQSGKTILDFLKSDGFANRNFMQLIHDDSLTFKEDIQKAQVSGQGDSLHEHIANLAGSPAIKKGILQTVKVVDELVKVMGRHKPENIVIEMARENQTTQKGQKNSRERMKRIEEGIKELGSQILKEHPVENTQLQNEKLYLYYLQNGRDMYVDQELDINRLSDYDVDHIVPQSFLKDDSIDNKVLTRSDKARGKSDNVPSEEVVKKMKNYWRQLLNAKLITQRKFDNLTKAERGGLSELDKAGFIKRQLVETRQITKHVAQILDSRMNTKYDENDKLIREVKVITLKSKLVSDFRKDFQFYKVREINNYHHAHDAYLNAVVGTALIKKYPKLESEFVYGDYKVYDVRKMIAKSEQEIGKATAKYFFYSNIMNFFKTEITLANGEIRKRPLIETNGETGEIVWDKGRDFATVRKVLSMPQVNIVKKTEVQTGGFSKESILPKRNSDKLIARKKDWDPKKYGGFDSPTVAYSVLVVAKVEKGKSKKLKSVKELLGITIMERSSFEKNPIDFLEAKGYKEVKKDLIIKLPKYSLFELENGRKRMLASAGELQKGNELALPSKYVNFLYLASHYEKLKGSPEDNEQKQLFVEQHKHYLDEIIEQISEFSKRVILADANLDKVLSAYNKHRDKPIREQAENIIHLFTLTNLGAPAAFKYFDTTIDRKRYTSTKEVLDATLIHQSITGLYETRIDLSQLGGDGGPAPAPAPAPAPAPGGTAPLEEEYRLFLEAPIQNVTLLEQWKREIPKVWAEINPPGLASTQAPIHVQLLSTALPVRVRQYPITLEAKRSLRETIRKFRAAGILRPVHSPWNTPLLPVRKSGTSEYRMVQDLREVNKRVETIHPTVPNPYTLLSLLPPDRIWYSVLDLKDAFFCIPLAPESQLIFAFEWADAEEGESGQLTWTRLPQGFKNSPTLFNEALNRDLQGFRLDHPSVSLLQYVDDLLIAADTQAACLSATRDLLMTLAELGYRVSGKKAQLCQEEVTYLGFKIHKGSRSLSNSRTQAILQIPVPKTKRQVREFLGTIGYCRLWIPGFAELAQPLYAATRPGNDPLVWGEKEEEAFQSLKLALTQPPALALPSLDKPFQLFVEETSGAAKGVLTQALGPWKRPVAYLSKRLDPVAAGWPRCLRAIAAAALLTREASKLTFGQDIEITSSHNLESLLRSPPDKWLTNARITQYQVLLLDPPRVRFKQTAALNPATLLPETDDTLPIHHCLDTLDSLTSTRPDLTDQPLAQAEATLFTDGSSYIRDGKRYAGAAVVTLDSVIWAEPLPIGTSAQKAELIALTKALEWSKDKSVNIYTDSRYAFATLHVHGMIYRERGWLTAGGKAIKNAPEILALLTAVWLPKRVAVMHCKGHQKDDAPTSTGNRRADEVAREVAIRPLSTQATISAGKRTADGSEFEKRTADGSEFESPKKKAKVE

SEQ ID NO: 1139 - protein, 2098 aa, synthetic construct
MPAAKRVKLDGGDKKYSIGLDIGTNSVGWAVITDEYKVPSKKFKVLGNTDRHSIKKNLIGALLFDSGETAEATRLKRTARRRYTRRKNRICYLQEIFSNEMAKVDDSFFHRLEESFLVEEDKKHERHPIFGNIVDEVAYHEKYPTIYHLRKKLVDSTDKADLRLIYLALAHMIKFRGHFLIEGDLNPDNSDVDKLFIQLVQTYNQLFEENPINASGVDAKAILSARLSKSRRLENLIAQLPGEKKNGLFGNLIALSLGLTPNFKSNFDLAEDAKLQLSKDTYDDDLDNLLAQIGDQYADLFLAAKNLSDAILLSDILRVNTEITKAPLSASMIKRYDEHHQDLTLLKALVRQQLPEKYKEIFFDQSKNGYAGYIDGGASQEEFYKFIKPILEKMDGTEELLVKLNREDLLRKQRTFDNGSIPHQIHLGELHAILRRQEDFYPFLKDNREKIEKILTFRIPYYVGPLARGNSRFAWMTRKSEETITPWNFEEVVDKGASAQSFIERMTNFDKNLPNEKVLPKHSLLYEYFTVYNELTKVKYVTEGMRKPAFLSGEQKKAIVDLLFKTNRKVTVKQLKEDYFKKIECFDSVEISGVEDRFNASLGTYHDLLKIIKDKDFLDNEENEDILEDIVLTLTLFEDREMIEERLKTYAHLFDDKVMKQLKRRRYTGWGRLSRKLINGIRDKQSGKTILDFLKSDGFANRNFMQLIHDDSLTFKEDIQKAQVSGQGDSLHEHIANLAGSPAIKKGILQTVKVVDELVKVMGRHKPENIVIEMARENQTTQKGQKNSRERMKRIEEGIKELGSQILKEHPVENTQLQNEKLYLYYLQNGRDMYVDQELDINRLSDYDVDHIVPQSFLKDDSIDNKVLTRSDKARGKSDNVPSEEVVKKMKNYWRQLLNAKLITQRKFDNLTKAERGGLSELDKAGFIKRQLVETRQITKHVAQILDSRMNTKYDENDKLIREVKVITLKSKLVSDFRKDFQFYKVREINNYHHAHDAYLNAVVGTALIKKYPKLESEFVYGDYKVYDVRKMIAKSEQEIGKATAKYFFYSNIMNFFKTEITLANGEIRKRPLIETNGETGEIVWDKGRDFATVRKVLSMPQVNIVKKTEVQTGGFSKESILPKRNSDKLIARKKDWDPKKYGGFDSPTVAYSVLVVAKVEKGKSKKLKSVKELLGITIMERSSFEKNPIDFLEAKGYKEVKKDLIIKLPKYSLFELENGRKRMLASAGELQKGNELALPSKYVNFLYLASHYEKLKGSPEDNEQKQLFVEQHKHYLDEIIEQISEFSKRVILADANLDKVLSAYNKHRDKPIREQAENIIHLFTLTNLGAPAAFKYFDTTIDRKRYTSTKEVLDATLIHQSITGLYETRIDLSQLGGDGGEAAAKGGSPAPGGTAPLEEEYRLFLEAPIQNVTLLEQWKREIPKVWAEINPPGLASTQAPIHVQLLSTALPVRVRQYPITLEAKRSLRETIRKFRAAGILRPVHSPWNTPLLPVRKSGTSEYRMVQDLREVNKRVETIHPTVPNPYTLLSLLPPDRIWYSVLDLKDAFFCIPLAPESQLIFAFEWADAEEGESGQLTWTRLPQGFKNSPTLFNEALNRDLQGFRLDHPSVSLLQYVDDLLIAADTQAACLSATRDLLMTLAELGYRVSGKKAQLCQEEVTYLGFKIHKGSRSLSNSRTQAILQIPVPKTKRQVREFLGTIGYCRLWIPGFAELAQPLYAATRPGNDPLVWGEKEEEAFQSLKLALTQPPALALPSLDKPFQLFVEETSGAAKGVLTQALGPWKRPVAYLSKRLDPVAAGWPRCLRAIAAAALLTREASKLTFGQDIEITSSHNLESLLRSPPDKWLTNARITQYQVLLLDPPRVRFKQTAALNPATLLPETDDTLPIHHCLDTLDSLTSTRPDLTDQPLAQAEATLFTDGSSYIRDGKRYAGAAVVTLDSVIWAEPLPIGTSAQKAELIALTKALEWSKDKSVNIYTDSRYAFATLHVHGMIYRERGWLTAGGKAIKNAPEILALLTAVWLPKRVAVMHCKGHQKDDAPTSTGNRRADEVAREVAIRPLSTQATISAGKRTADGSEFEKRTADGSEFESPKKKAKVE

SEQ ID NO: 1140 - protein, 2096 aa, synthetic construct
MPAAKRVKLDGGDKKYSIGLDIGTNSVGWAVITDEYKVPSKKFKVLGNTDRHSIKKNLIGALLFDSGETAEATRLKRTARRRYTRRKNRICYLQEIFSNEMAKVDDSFFHRLEESFLVEEDKKHERHPIFGNIVDEVAYHEKYPTIYHLRKKLVDSTDKADLRLIYLALAHMIKFRGHFLIEGDLNPDNSDVDKLFIQLVQTYNQLFEENPINASGVDAKAILSARLSKSRRLENLIAQLPGEKKNGLFGNLIALSLGLTPNFKSNFDLAEDAKLQLSKDTYDDDLDNLLAQIGDQYADLFLAAKNLSDAILLSDILRVNTEITKAPLSASMIKRYDEHHQDLTLLKALVRQQLPEKYKEIFFDQSKNGYAGYIDGGASQEEFYKFIKPILEKMDGTEELLVKLNREDLLRKQRTFDNGSIPHQIHLGELHAILRRQEDFYPFLKDNREKIEKILTFRIPYYVGPLARGNSRFAWMTRKSEETITPWNFEEVVDKGASAQSFIERMTNFDKNLPNEKVLPKHSLLYEYFTVYNELTKVKYVTEGMRKPAFLSGEQKKAIVDLLFKTNRKVTVKQLKEDYFKKIECFDSVEISGVEDRFNASLGTYHDLLKIIKDKDFLDNEENEDILEDIVLTLTLFEDREMIEERLKTYAHLFDDKVMKQLKRRRYTGWGRLSRKLINGIRDKQSGKTILDFLKSDGFANRNFMQLIHDDSLTFKEDIQKAQVSGQGDSLHEHIANLAGSPAIKKGILQTVKVVDELVKVMGRHKPENIVIEMARENQTTQKGQKNSRERMKRIEEGIKELGSQILKEHPVENTQLQNEKLYLYYLQNGRDMYVDQELDINRLSDYDVDHIVPQSFLKDDSIDNKVLTRSDKARGKSDNVPSEEVVKKMKNYWRQLLNAKLITQRKFDNLTKAERGGLSELDKAGFIKRQLVETRQITKHVAQILDSRMNTKYDENDKLIREVKVITLKSKLVSDFRKDFQFYKVREINNYHHAHDAYLNAVVGTALIKKYPKLESEFVYGDYKVYDVRKMIAKSEQEIGKATAKYFFYSNIMNFFKTEITLANGEIRKRPLIETNGETGEIVWDKGRDFATVRKVLSMPQVNIVKKTEVQTGGFSKESILPKRNSDKLIARKKDWDPKKYGGFDSPTVAYSVLVVAKVEKGKSKKLKSVKELLGITIMERSSFEKNPIDFLEAKGYKEVKKDLIIKLPKYSLFELENGRKRMLASAGELQKGNELALPSKYVNFLYLASHYEKLKGSPEDNEQKQLFVEQHKHYLDEIIEQISEFSKRVILADANLDKVLSAYNKHRDKPIREQAENIIHLFTLTNLGAPAAFKYFDTTIDRKRYTSTKEVLDATLIHQSITGLYETRIDLSQLGGDGGGGGPAPGSSGGTAPLEEEYRLFLEAPIQNVTLLEQWKREIPKVWAEINPPGLASTQAPIHVQLLSTALPVRVRQYPITLEAKRSLRETIRKFRAAGILRPVHSPWNTPLLPVRKSGTSEYRMVQDLREVNKRVETIHPTVPNPYTLLSLLPPDRIWYSVLDLKDAFFCIPLAPESQLIFAFEWADAEEGESGQLTWTRLPQGFKNSPTLFNEALNRDLQGFRLDHPSVSLLQYVDDLLIAADTQAACLSATRDLLMTLAELGYRVSGKKAQLCQEEVTYLGFKIHKGSRSLSNSRTQAILQIPVPKTKRQVREFLGTIGYCRLWIPGFAELAQPLYAATRPGNDPLVWGEKEEEAFQSLKLALTQPPALALPSLDKPFQLFVEETSGAAKGVLTQALGPWKRPVAYLSKRLDPVAAGWPRCLRAIAAAALLTREASKLTFGQDIEITSSHNLESLLRSPPDKWLTNARITQYQVLLLDPPRVRFKQTAALNPATLLPETDDTLPIHHCLDTLDSLTSTRPDLTDQPLAQAEATLFTDGSSYIRDGKRYAGAAVVTLDSVIWAEPLPIGTSAQKAELIALTKALEWSKDKSVNIYTDSRYAFATLHVHGMIYRERGWLTAGGKAIKNAPEILALLTAVWLPKRVAVMHCKGHQKDDAPTSTGNRRADEVAREVAIRPLSTQATISAGKRTADGSEFEKRTADGSEFESPKKKAKVE

SEQ ID NO: 1141 - protein, 2095 aa, synthetic construct
MPAAKRVKLDGGDKKYSIGLDIGTNSVGWAVITDEYKVPSKKFKVLGNTDRHSIKKNLIGALLFDSGETAEATRLKRTARRRYTRRKNRICYLQEIFSNEMAKVDDSFFHRLEESFLVEEDKKHERHPIFGNIVDEVAYHEKYPTIYHLRKKLVDSTDKADLRLIYLALAHMIKFRGHFLIEGDLNPDNSDVDKLFIQLVQTYNQLFEENPINASGVDAKAILSARLSKSRRLENLIAQLPGEKKNGLFGNLIALSLGLTPNFKSNFDLAEDAKLQLSKDTYDDDLDNLLAQIGDQYADLFLAAKNLSDAILLSDILRVNTEITKAPLSASMIKRYDEHHQDLTLLKALVRQQLPEKYKEIFFDQSKNGYAGYIDGGASQEEFYKFIKPILEKMDGTEELLVKLNREDLLRKQRTFDNGSIPHQIHLGELHAILRRQEDFYPFLKDNREKIEKILTFRIPYYVGPLARGNSRFAWMTRKSEETITPWNFEEVVDKGASAQSFIERMTNFDKNLPNEKVLPKHSLLYEYFTVYNELTKVKYVTEGMRKPAFLSGEQKKAIVDLLFKTNRKVTVKQLKEDYFKKIECFDSVEISGVEDRFNASLGTYHDLLKIIKDKDFLDNEENEDILEDIVLTLTLFEDREMIEERLKTYAHLFDDKVMKQLKRRRYTGWGRLSRKLINGIRDKQSGKTILDFLKSDGFANRNFMQLIHDDSLTFKEDIQKAQVSGQGDSLHEHIANLAGSPAIKKGILQTVKVVDELVKVMGRHKPENIVIEMARENQTTQKGQKNSRERMKRIEEGIKELGSQILKEHPVENTQLQNEKLYLYYLQNGRDMYVDQELDINRLSDYDVDHIVPQSFLKDDSIDNKVLTRSDKARGKSDNVPSEEVVKKMKNYWRQLLNAKLITQRKFDNLTKAERGGLSELDKAGFIKRQLVETRQITKHVAQILDSRMNTKYDENDKLIREVKVITLKSKLVSDFRKDFQFYKVREINNYHHAHDAYLNAVVGTALIKKYPKLESEFVYGDYKVYDVRKMIAKSEQEIGKATAKYFFYSNIMNFFKTEITLANGEIRKRPLIETNGETGEIVWDKGRDFATVRKVLSMPQVNIVKKTEVQTGGFSKESILPKRNSDKLIARKKDWDPKKYGGFDSPTVAYSVLVVAKVEKGKSKKLKSVKELLGITIMERSSFEKNPIDFLEAKGYKEVKKDLIIKLPKYSLFELENGRKRMLASAGELQKGNELALPSKYVNFLYLASHYEKLKGSPEDNEQKQLFVEQHKHYLDEIIEQISEFSKRVILADANLDKVLSAYNKHRDKPIREQAENIIHLFTLTNLGAPAAFKYFDTTIDRKRYTSTKEVLDATLIHQSITGLYETRIDLSQLGGDGGEAAAKGGGGGTAPLEEEYRLFLEAPIQNVTLLEQWKREIPKVWAEINPPGLASTQAPIHVQLLSTALPVRVRQYPITLEAKRSLRETIRKFRAAGILRPVHSPWNTPLLPVRKSGTSEYRMVQDLREVNKRVETIHPTVPNPYTLLSLLPPDRIWYSVLDLKDAFFCIPLAPESQLIFAFEWADAEEGESGQLTWTRLPQGFKNSPTLFNEALNRDLQGFRLDHPSVSLLQYVDDLLIAADTQAACLSATRDLLMTLAELGYRVSGKKAQLCQEEVTYLGFKIHKGSRSLSNSRTQAILQIPVPKTKRQVREFLGTIGYCRLWIPGFAELAQPLYAATRPGNDPLVWGEKEEEAFQSLKLALTQPPALALPSLDKPFQLFVEETSGAAKGVLTQALGPWKRPVAYLSKRLDPVAAGWPRCLRAIAAAALLTREASKLTFGQDIEITSSHNLESLLRSPPDKWLTNARITQYQVLLLDPPRVRFKQTAALNPATLLPETDDTLPIHHCLDTLDSLTSTRPDLTDQPLAQAEATLFTDGSSYIRDGKRYAGAAVVTLDSVIWAEPLPIGTSAQKAELIALTKALEWSKDKSVNIYTDSRYAFATLHVHGMIYRERGWLTAGGKAIKNAPEILALLTAVWLPKRVAVMHCKGHQKDDAPTSTGNRRADEVAREVAIRPLSTQATISAGKRTADGSEFEKRTADGSEFESPKKKAKVE

SEQ ID NO: 1142 - protein, 2098 aa, synthetic construct
MPAAKRVKLDGGDKKYSIGLDIGTNSVGWAVITDEYKVPSKKFKVLGNTDRHSIKKNLIGALLFDSGETAEATRLKRTARRRYTRRKNRICYLQEIFSNEMAKVDDSFFHRLEESFLVEEDKKHERHPIFGNIVDEVAYHEKYPTIYHLRKKLVDSTDKADLRLIYLALAHMIKFRGHFLIEGDLNPDNSDVDKLFIQLVQTYNQLFEENPINASGVDAKAILSARLSKSRRLENLIAQLPGEKKNGLFGNLIALSLGLTPNFKSNFDLAEDAKLQLSKDTYDDDLDNLLAQIGDQYADLFLAAKNLSDAILLSDILRVNTEITKAPLSASMIKRYDEHHQDLTLLKALVRQQLPEKYKEIFFDQSKNGYAGYIDGGASQEEFYKFIKPILEKMDGTEELLVKLNREDLLRKQRTFDNGSIPHQIHLGELHAILRRQEDFYPFLKDNREKIEKILTFRIPYYVGPLARGNSRFAWMTRKSEETITPWNFEEVVDKGASAQSFIERMTNFDKNLPNEKVLPKHSLLYEYFTVYNELTKVKYVTEGMRKPAFLSGEQKKAIVDLLFKTNRKVTVKQLKEDYFKKIECFDSVEISGVEDRFNASLGTYHDLLKIIKDKDFLDNEENEDILEDIVLTLTLFEDREMIEERLKTYAHLFDDKVMKQLKRRRYTGWGRLSRKLINGIRDKQSGKTILDFLKSDGFANRNFMQLIHDDSLTFKEDIQKAQVSGQGDSLHEHIANLAGSPAIKKGILQTVKVVDELVKVMGRHKPENIVIEMARENQTTQKGQKNSRERMKRIEEGIKELGSQILKEHPVENTQLQNEKLYLYYLQNGRDMYVDQELDINRLSDYDVDHIVPQSFLKDDSIDNKVLTRSDKARGKSDNVPSEEVVKKMKNYWRQLLNAKLITQRKFDNLTKAERGGLSELDKAGFIKRQLVETRQITKHVAQILDSRMNTKYDENDKLIREVKVITLKSKLVSDFRKDFQFYKVREINNYHHAHDAYLNAVVGTALIKKYPKLESEFVYGDYKVYDVRKMIAKSEQEIGKATAKYFFYSNIMNFFKTEITLANGEIRKRPLIETNGETGEIVWDKGRDFATVRKVLSMPQVNIVKKTEVQTGGFSKESILPKRNSDKLIARKKDWDPKKYGGFDSPTVAYSVLVVAKVEKGKSKKLKSVKELLGITIMERSSFEKNPIDFLEAKGYKEVKKDLIIKLPKYSLFELENGRKRMLASAGELQKGNELALPSKYVNFLYLASHYEKLKGSPEDNEQKQLFVEQHKHYLDEIIEQISEFSKRVILADANLDKVLSAYNKHRDKPIREQAENIIHLFTLTNLGAPAAFKYFDTTIDRKRYTSTKEVLDATLIHQSITGLYETRIDLSQLGGDGGGGGEAAAKGSSGGTAPLEEEYRLFLEAPIQNVTLLEQWKREIPKVWAEINPPGLASTQAPIHVQLLSTALPVRVRQYPITLEAKRSLRETIRKFRAAGILRPVHSPWNTPLLPVRKSGTSEYRMVQDLREVNKRVETIHPTVPNPYTLLSLLPPDRIWYSVLDLKDAFFCIPLAPESQLIFAFEWADAEEGESGQLTWTRLPQGFKNSPTLFNEALNRDLQGFRLDHPSVSLLQYVDDLLIAADTQAACLSATRDLLMTLAELGYRVSGKKAQLCQEEVTYLGFKIHKGSRSLSNSRTQAILQIPVPKTKRQVREFLGTIGYCRLWIPGFAELAQPLYAATRPGNDPLVWGEKEEEAFQSLKLALTQPPALALPSLDKPFQLFVEETSGAAKGVLTQALGPWKRPVAYLSKRLDPVAAGWPRCLRAIAAAALLTREASKLTFGQDIEITSSHNLESLLRSPPDKWLTNARITQYQVLLLDPPRVRFKQTAALNPATLLPETDDTLPIHHCLDTLDSLTSTRPDLTDQPLAQAEATLFTDGSSYIRDGKRYAGAAVVTLDSVIWAEPLPIGTSAQKAELIALTKALEWSKDKSVNIYTDSRYAFATLHVHGMIYRERGWLTAGGKAIKNAPEILALLTAVWLPKRVAVMHCKGHQKDDAPTSTGNRRADEVAREVAIRPLSTQATISAGKRTADGSEFEKRTADGSEFESPKKKAKVE

SEQ ID NO: 1143 - protein, 2102 aa, synthetic construct
MPAAKRVKLDGGDKKYSIGLDIGTNSVGWAVITDEYKVPSKKFKVLGNTDRHSIKKNLIGALLFDSGETAEATRLKRTARRRYTRRKNRICYLQEIFSNEMAKVDDSFFHRLEESFLVEEDKKHERHPIFGNIVDEVAYHEKYPTIYHLRKKLVDSTDKADLRLIYLALAHMIKFRGHFLIEGDLNPDNSDVDKLFIQLVQTYNQLFEENPINASGVDAKAILSARLSKSRRLENLIAQLPGEKKNGLFGNLIALSLGLTPNFKSNFDLAEDAKLQLSKDTYDDDLDNLLAQIGDQYADLFLAAKNLSDAILLSDILRVNTEITKAPLSASMIKRYDEHHQDLTLLKALVRQQLPEKYKEIFFDQSKNGYAGYIDGGASQEEFYKFIKPILEKMDGTEELLVKLNREDLLRKQRTFDNGSIPHQIHLGELHAILRRQEDFYPFLKDNREKIEKILTFRIPYYVGPLARGNSRFAWMTRKSEETITPWNFEEVVDKGASAQSFIERMTNFDKNLPNEKVLPKHSLLYEYFTVYNELTKVKYVTEGMRKPAFLSGEQKKAIVDLLFKTNRKVTVKQLKEDYFKKIECFDSVEISGVEDRFNASLGTYHDLLKIIKDKDFLDNEENEDILEDIVLTLTLFEDREMIEERLKTYAHLFDDKVMKQLKRRRYTGWGRLSRKLINGIRDKQSGKTILDFLKSDGFANRNFMQLIHDDSLTFKEDIQKAQVSGQGDSLHEHIANLAGSPAIKKGILQTVKVVDELVKVMGRHKPENIVIEMARENQTTQKGQKNSRERMKRIEEGIKELGSQILKEHPVENTQLQNEKLYLYYLQNGRDMYVDQELDINRLSDYDVDHIVPQSFLKDDSIDNKVLTRSDKARGKSDNVPSEEVVKKMKNYWRQLLNAKLITQRKFDNLTKAERGGLSELDKAGFIKRQLVETRQITKHVAQILDSRMNTKYDENDKLIREVKVITLKSKLVSDFRKDFQFYKVREINNYHHAHDAYLNAVVGTALIKKYPKLESEFVYGDYKVYDVRKMIAKSEQEIGKATAKYFFYSNIMNFFKTEITLANGEIRKRPLIETNGETGEIVWDKGRDFATVRKVLSMPQVNIVKKTEVQTGGFSKESILPKRNSDKLIARKKDWDPKKYGGFDSPTVAYSVLVVAKVEKGKSKKLKSVKELLGITIMERSSFEKNPIDFLEAKGYKEVKKDLIIKLPKYSLFELENGRKRMLASAGELQKGNELALPSKYVNFLYLASHYEKLKGSPEDNEQKQLFVEQHKHYLDEIIEQISEFSKRVILADANLDKVLSAYNKHRDKPIREQAENIIHLFTLTNLGAPAAFKYFDTTIDRKRYTSTKEVLDATLIHQSITGLYETRIDLSQLGGDGGGSSGSSGSSGSSGSSGGTAPLEEEYRLFLEAPIQNVTLLEQWKREIPKVWAEINPPGLASTQAPIHVQLLSTALPVRVRQYPITLEAKRSLRETIRKFRAAGILRPVHSPWNTPLLPVRKSGTSEYRMVQDLREVNKRVETIHPTVPNPYTLLSLLPPDRIWYSVLDLKDAFFCIPLAPESQLIFAFEWADAEEGESGQLTWTRLPQGFKNSPTLFNEALNRDLQGFRLDHPSVSLLQYVDDLLIAADTQAACLSATRDLLMTLAELGYRVSGKKAQLCQEEVTYLGFKIHKGSRSLSNSRTQAILQIPVPKTKRQVREFLGTIGYCRLWIPGFAELAQPLYAATRPGNDPLVWGEKEEEAFQSLKLALTQPPALALPSLDKPFQLFVEETSGAAKGVLTQALGPWKRPVAYLSKRLDPVAAGWPRCLRAIAAAALLTREASKLTFGQDIEITSSHNLESLLRSPPDKWLTNARITQYQVLLLDPPRVRFKQTAALNPATLLPETDDTLPIHHCLDTLDSLTSTRPDLTDQPLAQAEATLFTDGSSYIRDGKRYAGAAVVTLDSVIWAEPLPIGTSAQKAELIALTKALEWSKDKSVNIYTDSRYAFATLHVHGMIYRERGWLTAGGKAIKNAPEILALLTAVWLPKRVAVMHCKGHQKDDAPTSTGNRRADEVAREVAIRPLSTQATISAGKRTADGSEFEKRTADGSEFESPKKKAKVE

SEQ ID NO: 1144 - protein, 2090 aa, synthetic construct
MPAAKRVKLDGGDKKYSIGLDIGTNSVGWAVITDEYKVPSKKFKVLGNTDRHSIKKNLIGALLFDSGETAEATRLKRTARRRYTRRKNRICYLQEIFSNEMAKVDDSFFHRLEESFLVEEDKKHERHPIFGNIVDEVAYHEKYPTIYHLRKKLVDSTDKADLRLIYLALAHMIKFRGHFLIEGDLNPDNSDVDKLFIQLVQTYNQLFEENPINASGVDAKAILSARLSKSRRLENLIAQLPGEKKNGLFGNLIALSLGLTPNFKSNFDLAEDAKLQLSKDTYDDDLDNLLAQIGDQYADLFLAAKNLSDAILLSDILRVNTEITKAPLSASMIKRYDEHHQDLTLLKALVRQQLPEKYKEIFFDQSKNGYAGYIDGGASQEEFYKFIKPILEKMDGTEELLVKLNREDLLRKQRTFDNGSIPHQIHLGELHAILRRQEDFYPFLKDNREKIEKILTFRIPYYVGPLARGNSRFAWMTRKSEETITPWNFEEVVDKGASAQSFIERMTNFDKNLPNEKVLPKHSLLYEYFTVYNELTKVKYVTEGMRKPAFLSGEQKKAIVDLLFKTNRKVTVKQLKEDYFKKIECFDSVEISGVEDRFNASLGTYHDLLKIIKDKDFLDNEENEDILEDIVLTLTLFEDREMIEERLKTYAHLFDDKVMKQLKRRRYTGWGRLSRKLINGIRDKQSGKTILDFLKSDGFANRNFMQLIHDDSLTFKEDIQKAQVSGQGDSLHEHIANLAGSPAIKKGILQTVKVVDELVKVMGRHKPENIVIEMARENQTTQKGQKNSRERMKRIEEGIKELGSQILKEHPVENTQLQNEKLYLYYLQNGRDMYVDQELDINRLSDYDVDHIVPQSFLKDDSIDNKVLTRSDKARGKSDNVPSEEVVKKMKNYWRQLLNAKLITQRKFDNLTKAERGGLSELDKAGFIKRQLVETRQITKHVAQILDSRMNTKYDENDKLIREVKVITLKSKLVSDFRKDFQFYKVREINNYHHAHDAYLNAVVGTALIKKYPKLESEFVYGDYKVYDVRKMIAKSEQEIGKATAKYFFYSNIMNFFKTEITLANGEIRKRPLIETNGETGEIVWDKGRDFATVRKVLSMPQVNIVKKTEVQTGGFSKESILPKRNSDKLIARKKDWDPKKYGGFDSPTVAYSVLVVAKVEKGKSKKLKSVKELLGITIMERSSFEKNPIDFLEAKGYKEVKKDLIIKLPKYSLFELENGRKRMLASAGELQKGNELALPSKYVNFLYLASHYEKLKGSPEDNEQKQLFVEQHKHYLDEIIEQISEFSKRVILADANLDKVLSAYNKHRDKPIREQAENIIHLFTLTNLGAPAAFKYFDTTIDRKRYTSTKEVLDATLIHQSITGLYETRIDLSQLGGDGGGGSGGTAPLEEEYRLFLEAPIQNVTLLEQWKREIPKVWAEINPPGLASTQAPIHVQLLSTALPVRVRQYPITLEAKRSLRETIRKFRAAGILRPVHSPWNTPLLPVRKSGTSEYRMVQDLREVNKRVETIHPTVPNPYTLLSLLPPDRIWYSVLDLKDAFFCIPLAPESQLIFAFEWADAEEGESGQLTWTRLPQGFKNSPTLFNEALNRDLQGFRLDHPSVSLLQYVDDLLIAADTQAACLSATRDLLMTLAELGYRVSGKKAQLCQEEVTYLGFKIHKGSRSLSNSRTQAILQIPVPKTKRQVREFLGTIGYCRLWIPGFAELAQPLYAATRPGNDPLVWGEKEEEAFQSLKLALTQPPALALPSLDKPFQLFVEETSGAAKGVLTQALGPWKRPVAYLSKRLDPVAAGWPRCLRAIAAAALLTREASKLTFGQDIEITSSHNLESLLRSPPDKWLTNARITQYQVLLLDPPRVRFKQTAALNPATLLPETDDTLPIHHCLDTLDSLTSTRPDLTDQPLAQAEATLFTDGSSYIRDGKRYAGAAVVTLDSVIWAEPLPIGTSAQKAELIALTKALEWSKDKSVNIYTDSRYAFATLHVHGMIYRERGWLTAGGKAIKNAPEILALLTAVWLPKRVAVMHCKGHQKDDAPTSTGNRRADEVAREVAIRPLSTQATISAGKRTADGSEFEKRTADGSEFESPKKKAKVE

SEQ ID NO: 1145 - protein, 2098 aa, synthetic construct
MPAAKRVKLDGGDKKYSIGLDIGTNSVGWAVITDEYKVPSKKFKVLGNTDRHSIKKNLIGALLFDSGETAEATRLKRTARRRYTRRKNRICYLQEIFSNEMAKVDDSFFHRLEESFLVEEDKKHERHPIFGNIVDEVAYHEKYPTIYHLRKKLVDSTDKADLRLIYLALAHMIKFRGHFLIEGDLNPDNSDVDKLFIQLVQTYNQLFEENPINASGVDAKAILSARLSKSRRLENLIAQLPGEKKNGLFGNLIALSLGLTPNFKSNFDLAEDAKLQLSKDTYDDDLDNLLAQIGDQYADLFLAAKNLSDAILLSDILRVNTEITKAPLSASMIKRYDEHHQDLTLLKALVRQQLPEKYKEIFFDQSKNGYAGYIDGGASQEEFYKFIKPILEKMDGTEELLVKLNREDLLRKQRTFDNGSIPHQIHLGELHAILRRQEDFYPFLKDNREKIEKILTFRIPYYVGPLARGNSRFAWMTRKSEETITPWNFEEVVDKGASAQSFIERMTNFDKNLPNEKVLPKHSLLYEYFTVYNELTKVKYVTEGMRKPAFLSGEQKKAIVDLLFKTNRKVTVKQLKEDYFKKIECFDSVEISGVEDRFNASLGTYHDLLKIIKDKDFLDNEENEDILEDIVLTLTLFEDREMIEERLKTYAHLFDDKVMKQLKRRRYTGWGRLSRKLINGIRDKQSGKTILDFLKSDGFANRNFMQLIHDDSLTFKEDIQKAQVSGQGDSLHEHIANLAGSPAIKKGILQTVKVVDELVKVMGRHKPENIVIEMARENQTTQKGQKNSRERMKRIEEGIKELGSQILKEHPVENTQLQNEKLYLYYLQNGRDMYVDQELDINRLSDYDVDHIVPQSFLKDDSIDNKVLTRSDKARGKSDNVPSEEVVKKMKNYWRQLLNAKLITQRKFDNLTKAERGGLSELDKAGFIKRQLVETRQITKHVAQILDSRMNTKYDENDKLIREVKVITLKSKLVSDFRKDFQFYKVREINNYHHAHDAYLNAVVGTALIKKYPKLESEFVYGDYKVYDVRKMIAKSEQEIGKATAKYFFYSNIMNFFKTEITLANGEIRKRPLIETNGETGEIVWDKGRDFATVRKVLSMPQVNIVKKTEVQTGGFSKESILPKRNSDKLIARKKDWDPKKYGGFDSPTVAYSVLVVAKVEKGKSKKLKSVKELLGITIMERSSFEKNPIDFLEAKGYKEVKKDLIIKLPKYSLFELENGRKRMLASAGELQKGNELALPSKYVNFLYLASHYEKLKGSPEDNEQKQLFVEQHKHYLDEIIEQISEFSKRVILADANLDKVLSAYNKHRDKPIREQAENIIHLFTLTNLGAPAAFKYFDTTIDRKRYTSTKEVLDATLIHQSITGLYETRIDLSQLGGDGGEAAAKPAPGSSGGTAPLEEEYRLFLEAPIQNVTLLEQWKREIPKVWAEINPPGLASTQAPIHVQLLSTALPVRVRQYPITLEAKRSLRETIRKFRAAGILRPVHSPWNTPLLPVRKSGTSEYRMVQDLREVNKRVETIHPTVPNPYTLLSLLPPDRIWYSVLDLKDAFFCIPLAPESQLIFAFEWADAEEGESGQLTWTRLPQGFKNSPTLFNEALNRDLQGFRLDHPSVSLLQYVDDLLIAADTQAACLSATRDLLMTLAELGYRVSGKKAQLCQEEVTYLGFKIHKGSRSLSNSRTQAILQIPVPKTKRQVREFLGTIGYCRLWIPGFAELAQPLYAATRPGNDPLVWGEKEEEAFQSLKLALTQPPALALPSLDKPFQLFVEETSGAAKGVLTQALGPWKRPVAYLSKRLDPVAAGWPRCLRAIAAAALLTREASKLTFGQDIEITSSHNLESLLRSPPDKWLTNARITQYQVLLLDPPRVRFKQTAALNPATLLPETDDTLPIHHCLDTLDSLTSTRPDLTDQPLAQAEATLFTDGSSYIRDGKRYAGAAVVTLDSVIWAEPLPIGTSAQKAELIALTKALEWSKDKSVNIYTDSRYAFATLHVHGMIYRERGWLTAGGKAIKNAPEILALLTAVWLPKRVAVMHCKGHQKDDAPTSTGNRRADEVAREVAIRPLSTQATISAGKRTADGSEFEKRTADGSEFESPKKKAKVE

SEQ ID NO: 1146 - protein, 2133 aa, synthetic construct
MPAAKRVKLDGGDKKYSIGLDIGTNSVGWAVITDEYKVPSKKFKVLGNTDRHSIKKNLIGALLFDSGETAEATRLKRTARRRYTRRKNRICYLQEIFSNEMAKVDDSFFHRLEESFLVEEDKKHERHPIFGNIVDEVAYHEKYPTIYHLRKKLVDSTDKADLRLIYLALAHMIKFRGHFLIEGDLNPDNSDVDKLFIQLVQTYNQLFEENPINASGVDAKAILSARLSKSRRLENLIAQLPGEKKNGLFGNLIALSLGLTPNFKSNFDLAEDAKLQLSKDTYDDDLDNLLAQIGDQYADLFLAAKNLSDAILLSDILRVNTEITKAPLSASMIKRYDEHHQDLTLLKALVRQQLPEKYKEIFFDQSKNGYAGYIDGGASQEEFYKFIKPILEKMDGTEELLVKLNREDLLRKQRTFDNGSIPHQIHLGELHAILRRQEDFYPFLKDNREKIEKILTFRIPYYVGPLARGNSRFAWMTRKSEETITPWNFEEVVDKGASAQSFIERMTNFDKNLPNEKVLPKHSLLYEYFTVYNELTKVKYVTEGMRKPAFLSGEQKKAIVDLLFKTNRKVTVKQLKEDYFKKIECFDSVEISGVEDRFNASLGTYHDLLKIIKDKDFLDNEENEDILEDIVLTLTLFEDREMIEERLKTYAHLFDDKVMKQLKRRRYTGWGRLSRKLINGIRDKQSGKTILDFLKSDGFANRNFMQLIHDDSLTFKEDIQKAQVSGQGDSLHEHIANLAGSPAIKKGILQTVKVVDELVKVMGRHKPENIVIEMARENQTTQKGQKNSRERMKRIEEGIKELGSQILKEHPVENTQLQNEKLYLYYLQNGRDMYVDQELDINRLSDYDVDHIVPQSFLKDDSIDNKVLTRSDKARGKSDNVPSEEVVKKMKNYWRQLLNAKLITQRKFDNLTKAERGGLSELDKAGFIKRQLVETRQITKHVAQILDSRMNTKYDENDKLIREVKVITLKSKLVSDFRKDFQFYKVREINNYHHAHDAYLNAVVGTALIKKYPKLESEFVYGDYKVYDVRKMIAKSEQEIGKATAKYFFYSNIMNFFKTEITLANGEIRKRPLIETNGETGEIVWDKGRDFATVRKVLSMPQVNIVKKTEVQTGGFSKESILPKRNSDKLIARKKDWDPKKYGGFDSPTVAYSVLVVAKVEKGKSKKLKSVKELLGITIMERSSFEKNPIDFLEAKGYKEVKKDLIIKLPKYSLFELENGRKRMLASAGELQKGNELALPSKYVNFLYLASHYEKLKGSPEDNEQKQLFVEQHKHYLDEIIEQISEFSKRVILADANLDKVLSAYNKHRDKPIREQAENIIHLFTLTNLGAPAAFKYFDTTIDRKRYTSTKEVLDATLIHQSITGLYETRIDLSQLGGDGGAEAAAKEAAAKEAAAKEAAAKALEAEAAAKEAAAKEAAAKEAAAKAGGTAPLEEEYRLFLEAPIQNVTLLEQWKREIPKVWAEINPPGLASTQAPIHVQLLSTALPVRVRQYPITLEAKRSLRETIRKFRAAGILRPVHSPWNTPLLPVRKSGTSEYRMVQDLREVNKRVETIHPTVPNPYTLLSLLPPDRIWYSVLDLKDAFFCIPLAPESQLIFAFEWADAEEGESGQLTWTRLPQGFKNSPTLFNEALNRDLQGFRLDHPSVSLLQYVDDLLIAADTQAACLSATRDLLMTLAELGYRVSGKKAQLCQEEVTYLGFKIHKGSRSLSNSRTQAILQIPVPKTKRQVREFLGTIGYCRLWIPGFAELAQPLYAATRPGNDPLVWGEKEEEAFQSLKLALTQPPALALPSLDKPFQLFVEETSGAAKGVLTQALGPWKRPVAYLSKRLDPVAAGWPRCLRAIAAAALLTREASKLTFGQDIEITSSHNLESLLRSPPDKWLTNARITQYQVLLLDPPRVRFKQTAALNPATLLPETDDTLPIHHCLDTLDSLTSTRPDLTDQPLAQAEATLFTDGSSYIRDGKRYAGAAVVTLDSVIWAEPLPIGTSAQKAELIALTKALEWSKDKSVNIYTDSRYAFATLHVHGMIYRERGWLTAGGKAIKNAPEILALLTAVWLPKRVAVMHCKGHQKDDAPTSTGNRRADEVAREVAIRPLSTQATISAGKRTADGSEFEKRTADGSEFESPKKKAKVE

SEQ ID NO: 1147 - protein, 2098 aa, synthetic construct
MPAAKRVKLDGGDKKYSIGLDIGTNSVGWAVITDEYKVPSKKFKVLGNTDRHSIKKNLIGALLFDSGETAEATRLKRTARRRYTRRKNRICYLQEIFSNEMAKVDDSFFHRLEESFLVEEDKKHERHPIFGNIVDEVAYHEKYPTIYHLRKKLVDSTDKADLRLIYLALAHMIKFRGHFLIEGDLNPDNSDVDKLFIQLVQTYNQLFEENPINASGVDAKAILSARLSKSRRLENLIAQLPGEKKNGLFGNLIALSLGLTPNFKSNFDLAEDAKLQLSKDTYDDDLDNLLAQIGDQYADLFLAAKNLSDAILLSDILRVNTEITKAPLSASMIKRYDEHHQDLTLLKALVRQQLPEKYKEIFFDQSKNGYAGYIDGGASQEEFYKFIKPILEKMDGTEELLVKLNREDLLRKQRTFDNGSIPHQIHLGELHAILRRQEDFYPFLKDNREKIEKILTFRIPYYVGPLARGNSRFAWMTRKSEETITPWNFEEVVDKGASAQSFIERMTNFDKNLPNEKVLPKHSLLYEYFTVYNELTKVKYVTEGMRKPAFLSGEQKKAIVDLLFKTNRKVTVKQLKEDYFKKIECFDSVEISGVEDRFNASLGTYHDLLKIIKDKDFLDNEENEDILEDIVLTLTLFEDREMIEERLKTYAHLFDDKVMKQLKRRRYTGWGRLSRKLINGIRDKQSGKTILDFLKSDGFANRNFMQLIHDDSLTFKEDIQKAQVSGQGDSLHEHIANLAGSPAIKKGILQTVKVVDELVKVMGRHKPENIVIEMARENQTTQKGQKNSRERMKRIEEGIKELGSQILKEHPVENTQLQNEKLYLYYLQNGRDMYVDQELDINRLSDYDVDHIVPQSFLKDDSIDNKVLTRSDKARGKSDNVPSEEVVKKMKNYWRQLLNAKLITQRKFDNLTKAERGGLSELDKAGFIKRQLVETRQITKHVAQILDSRMNTKYDENDKLIREVKVITLKSKLVSDFRKDFQFYKVREINNYHHAHDAYLNAVVGTALIKKYPKLESEFVYGDYKVYDVRKMIAKSEQEIGKATAKYFFYSNIMNFFKTEITLANGEIRKRPLIETNGETGEIVWDKGRDFATVRKVLSMPQVNIVKKTEVQTGGFSKESILPKRNSDKLIARKKDWDPKKYGGFDSPTVAYSVLVVAKVEKGKSKKLKSVKELLGITIMERSSFEKNPIDFLEAKGYKEVKKDLIIKLPKYSLFELENGRKRMLASAGELQKGNELALPSKYVNFLYLASHYEKLKGSPEDNEQKQLFVEQHKHYLDEIIEQISEFSKRVILADANLDKVLSAYNKHRDKPIREQAENIIHLFTLTNLGAPAAFKYFDTTIDRKRYTSTKEVLDATLIHQSITGLYETRIDLSQLGGDGGGGSEAAAKPAPGGTAPLEEEYRLFLEAPIQNVTLLEQWKREIPKVWAEINPPGLASTQAPIHVQLLSTALPVRVRQYPITLEAKRSLRETIRKFRAAGILRPVHSPWNTPLLPVRKSGTSEYRMVQDLREVNKRVETIHPTVPNPYTLLSLLPPDRIWYSVLDLKDAFFCIPLAPESQLIFAFEWADAEEGESGQLTWTRLPQGFKNSPTLFNEALNRDLQGFRLDHPSVSLLQYVDDLLIAADTQAACLSATRDLLMTLAELGYRVSGKKAQLCQEEVTYLGFKIHKGSRSLSNSRTQAILQIPVPKTKRQVREFLGTIGYCRLWIPGFAELAQPLYAATRPGNDPLVWGEKEEEAFQSLKLALTQPPALALPSLDKPFQLFVEETSGAAKGVLTQALGPWKRPVAYLSKRLDPVAAGWPRCLRAIAAAALLTREASKLTFGQDIEITSSHNLESLLRSPPDKWLTNARITQYQVLLLDPPRVRFKQTAALNPATLLPETDDTLPIHHCLDTLDSLTSTRPDLTDQPLAQAEATLFTDGSSYIRDGKRYAGAAVVTLDSVIWAEPLPIGTSAQKAELIALTKALEWSKDKSVNIYTDSRYAFATLHVHGMIYRERGWLTAGGKAIKNAPEILALLTAVWLPKRVAVMHCKGHQKDDAPTSTGNRRADEVAREVAIRPLSTQATISAGKRTADGSEFEKRTADGSEFESPKKKAKVE

SEQ ID NO: 1148 - protein, 2090 aa, synthetic construct
MPAAKRVKLDGGDKKYSIGLDIGTNSVGWAVITDEYKVPSKKFKVLGNTDRHSIKKNLIGALLFDSGETAEATRLKRTARRRYTRRKNRICYLQEIFSNEMAKVDDSFFHRLEESFLVEEDKKHERHPIFGNIVDEVAYHEKYPTIYHLRKKLVDSTDKADLRLIYLALAHMIKFRGHFLIEGDLNPDNSDVDKLFIQLVQTYNQLFEENPINASGVDAKAILSARLSKSRRLENLIAQLPGEKKNGLFGNLIALSLGLTPNFKSNFDLAEDAKLQLSKDTYDDDLDNLLAQIGDQYADLFLAAKNLSDAILLSDILRVNTEITKAPLSASMIKRYDEHHQDLTLLKALVRQQLPEKYKEIFFDQSKNGYAGYIDGGASQEEFYKFIKPILEKMDGTEELLVKLNREDLLRKQRTFDNGSIPHQIHLGELHAILRRQEDFYPFLKDNREKIEKILTFRIPYYVGPLARGNSRFAWMTRKSEETITPWNFEEVVDKGASAQSFIERMTNFDKNLPNEKVLPKHSLLYEYFTVYNELTKVKYVTEGMRKPAFLSGEQKKAIVDLLFKTNRKVTVKQLKEDYFKKIECFDSVEISGVEDRFNASLGTYHDLLKIIKDKDFLDNEENEDILEDIVLTLTLFEDREMIEERLKTYAHLFDDKVMKQLKRRRYTGWGRLSRKLINGIRDKQSGKTILDFLKSDGFANRNFMQLIHDDSLTFKEDIQKAQVSGQGDSLHEHIANLAGSPAIKKGILQTVKVVDELVKVMGRHKPENIVIEMARENQTTQKGQKNSRERMKRIEEGIKELGSQILKEHPVENTQLQNEKLYLYYLQNGRDMYVDQELDINRLSDYDVDHIVPQSFLKDDSIDNKVLTRSDKARGKSDNVPSEEVVKKMKNYWRQLLNAKLITQRKFDNLTKAERGGLSELDKAGFIKRQLVETRQITKHVAQILDSRMNTKYDENDKLIREVKVITLKSKLVSDFRKDFQFYKVREINNYHHAHDAYLNAVVGTALIKKYPKLESEFVYGDYKVYDVRKMIAKSEQEIGKATAKYFFYSNIMNFFKTEITLANGEIRKRPLIETNGETGEIVWDKGRDFATVRKVLSMPQVNIVKKTEVQTGGFSKESILPKRNSDKLIARKKDWDPKKYGGFDSPTVAYSVLVVAKVEKGKSKKLKSVKELLGITIMERSSFEKNPIDFLEAKGYKEVKKDLIIKLPKYSLFELENGRKRMLASAGELQKGNELALPSKYVNFLYLASHYEKLKGSPEDNEQKQLFVEQHKHYLDEIIEQISEFSKRVILADANLDKVLSAYNKHRDKPIREQAENIIHLFTLTNLGAPAAFKYFDTTIDRKRYTSTKEVLDATLIHQSITGLYETRIDLSQLGGDGGPAPGGTAPLEEEYRLFLEAPIQNVTLLEQWKREIPKVWAEINPPGLASTQAPIHVQLLSTALPVRVRQYPITLEAKRSLRETIRKFRAAGILRPVHSPWNTPLLPVRKSGTSEYRMVQDLREVNKRVETIHPTVPNPYTLLSLLPPDRIWYSVLDLKDAFFCIPLAPESQLIFAFEWADAEEGESGQLTWTRLPQGFKNSPTLFNEALNRDLQGFRLDHPSVSLLQYVDDLLIAADTQAACLSATRDLLMTLAELGYRVSGKKAQLCQEEVTYLGFKIHKGSRSLSNSRTQAILQIPVPKTKRQVREFLGTIGYCRLWIPGFAELAQPLYAATRPGNDPLVWGEKEEEAFQSLKLALTQPPALALPSLDKPFQLFVEETSGAAKGVLTQALGPWKRPVAYLSKRLDPVAAGWPRCLRAIAAAALLTREASKLTFGQDIEITSSHNLESLLRSPPDKWLTNARITQYQVLLLDPPRVRFKQTAALNPATLLPETDDTLPIHHCLDTLDSLTSTRPDLTDQPLAQAEATLFTDGSSYIRDGKRYAGAAVVTLDSVIWAEPLPIGTSAQKAELIALTKALEWSKDKSVNIYTDSRYAFATLHVHGMIYRERGWLTAGGKAIKNAPEILALLTAVWLPKRVAVMHCKGHQKDDAPTSTGNRRADEVAREVAIRPLSTQATISAGKRTADGSEFEKRTADGSEFESPKKKAKVE

SEQ ID NO: 1149 - protein, 2092 aa, synthetic construct
MPAAKRVKLDGGDKKYSIGLDIGTNSVGWAVITDEYKVPSKKFKVLGNTDRHSIKKNLIGALLFDSGETAEATRLKRTARRRYTRRKNRICYLQEIFSNEMAKVDDSFFHRLEESFLVEEDKKHERHPIFGNIVDEVAYHEKYPTIYHLRKKLVDSTDKADLRLIYLALAHMIKFRGHFLIEGDLNPDNSDVDKLFIQLVQTYNQLFEENPINASGVDAKAILSARLSKSRRLENLIAQLPGEKKNGLFGNLIALSLGLTPNFKSNFDLAEDAKLQLSKDTYDDDLDNLLAQIGDQYADLFLAAKNLSDAILLSDILRVNTEITKAPLSASMIKRYDEHHQDLTLLKALVRQQLPEKYKEIFFDQSKNGYAGYIDGGASQEEFYKFIKPILEKMDGTEELLVKLNREDLLRKQRTFDNGSIPHQIHLGELHAILRRQEDFYPFLKDNREKIEKILTFRIPYYVGPLARGNSRFAWMTRKSEETITPWNFEEVVDKGASAQSFIERMTNFDKNLPNEKVLPKHSLLYEYFTVYNELTKVKYVTEGMRKPAFLSGEQKKAIVDLLFKTNRKVTVKQLKEDYFKKIECFDSVEISGVEDRFNASLGTYHDLLKIIKDKDFLDNEENEDILEDIVLTLTLFEDREMIEERLKTYAHLFDDKVMKQLKRRRYTGWGRLSRKLINGIRDKQSGKTILDFLKSDGFANRNFMQLIHDDSLTFKEDIQKAQVSGQGDSLHEHIANLAGSPAIKKGILQTVKVVDELVKVMGRHKPENIVIEMARENQTTQKGQKNSRERMKRIEEGIKELGSQILKEHPVENTQLQNEKLYLYYLQNGRDMYVDQELDINRLSDYDVDHIVPQSFLKDDSIDNKVLTRSDKARGKSDNVPSEEVVKKMKNYWRQLLNAKLITQRKFDNLTKAERGGLSELDKAGFIKRQLVETRQITKHVAQILDSRMNTKYDENDKLIREVKVITLKSKLVSDFRKDFQFYKVREINNYHHAHDAYLNAVVGTALIKKYPKLESEFVYGDYKVYDVRKMIAKSEQEIGKATAKYFFYSNIMNFFKTEITLANGEIRKRPLIETNGETGEIVWDKGRDFATVRKVLSMPQVNIVKKTEVQTGGFSKESILPKRNSDKLIARKKDWDPKKYGGFDSPTVAYSVLVVAKVEKGKSKKLKSVKELLGITIMERSSFEKNPIDFLEAKGYKEVKKDLIIKLPKYSLFELENGRKRMLASAGELQKGNELALPSKYVNFLYLASHYEKLKGSPEDNEQKQLFVEQHKHYLDEIIEQISEFSKRVILADANLDKVLSAYNKHRDKPIREQAENIIHLFTLTNLGAPAAFKYFDTTIDRKRYTSTKEVLDATLIHQSITGLYETRIDLSQLGGDGGPAPAPGGTAPLEEEYRLFLEAPIQNVTLLEQWKREIPKVWAEINPPGLASTQAPIHVQLLSTALPVRVRQYPITLEAKRSLRETIRKFRAAGILRPVHSPWNTPLLPVRKSGTSEYRMVQDLREVNKRVETIHPTVPNPYTLLSLLPPDRIWYSVLDLKDAFFCIPLAPESQLIFAFEWADAEEGESGQLTWTRLPQGFKNSPTLFNEALNRDLQGFRLDHPSVSLLQYVDDLLIAADTQAACLSATRDLLMTLAELGYRVSGKKAQLCQEEVTYLGFKIHKGSRSLSNSRTQAILQIPVPKTKRQVREFLGTIGYCRLWIPGFAELAQPLYAATRPGNDPLVWGEKEEEAFQSLKLALTQPPALALPSLDKPFQLFVEETSGAAKGVLTQALGPWKRPVAYLSKRLDPVAAGWPRCLRAIAAAALLTREASKLTFGQDIEITSSHNLESLLRSPPDKWLTNARITQYQVLLLDPPRVRFKQTAALNPATLLPETDDTLPIHHCLDTLDSLTSTRPDLTDQPLAQAEATLFTDGSSYIRDGKRYAGAAVVTLDSVIWAEPLPIGTSAQKAELIALTKALEWSKDKSVNIYTDSRYAFATLHVHGMIYRERGWLTAGGKAIKNAPEILALLTAVWLPKRVAVMHCKGHQKDDAPTSTGNRRADEVAREVAIRPLSTQATISAGKRTADGSEFEKRTADGSEFESPKKKAKVE

SEQ ID NO: 1150 - protein, 2096 aa, synthetic construct
MPAAKRVKLDGGDKKYSIGLDIGTNSVGWAVITDEYKVPSKKFKVLGNTDRHSIKKNLIGALLFDSGETAEATRLKRTARRRYTRRKNRICYLQEIFSNEMAKVDDSFFHRLEESFLVEEDKKHERHPIFGNIVDEVAYHEKYPTIYHLRKKLVDSTDKADLRLIYLALAHMIKFRGHFLIEGDLNPDNSDVDKLFIQLVQTYNQLFEENPINASGVDAKAILSARLSKSRRLENLIAQLPGEKKNGLFGNLIALSLGLTPNFKSNFDLAEDAKLQLSKDTYDDDLDNLLAQIGDQYADLFLAAKNLSDAILLSDILRVNTEITKAPLSASMIKRYDEHHQDLTLLKALVRQQLPEKYKEIFFDQSKNGYAGYIDGGASQEEFYKFIKPILEKMDGTEELLVKLNREDLLRKQRTFDNGSIPHQIHLGELHAILRRQEDFYPFLKDNREKIEKILTFRIPYYVGPLARGNSRFAWMTRKSEETITPWNFEEVVDKGASAQSFIERMTNFDKNLPNEKVLPKHSLLYEYFTVYNELTKVKYVTEGMRKPAFLSGEQKKAIVDLLFKTNRKVTVKQLKEDYFKKIECFDSVEISGVEDRFNASLGTYHDLLKIIKDKDFLDNEENEDILEDIVLTLTLFEDREMIEERLKTYAHLFDDKVMKQLKRRRYTGWGRLSRKLINGIRDKQSGKTILDFLKSDGFANRNFMQLIHDDSLTFKEDIQKAQVSGQGDSLHEHIANLAGSPAIKKGILQTVKVVDELVKVMGRHKPENIVIEMARENQTTQKGQKNSRERMKRIEEGIKELGSQILKEHPVENTQLQNEKLYLYYLQNGRDMYVDQELDINRLSDYDVDHIVPQSFLKDDSIDNKVLTRSDKARGKSDNVPSEEVVKKMKNYWRQLLNAKLITQRKFDNLTKAERGGLSELDKAGFIKRQLVETRQITKHVAQILDSRMNTKYDENDKLIREVKVITLKSKLVSDFRKDFQFYKVREINNYHHAHDAYLNAVVGTALIKKYPKLESEFVYGDYKVYDVRKMIAKSEQEIGKATAKYFFYSNIMNFFKTEITLANGEIRKRPLIETNGETGEIVWDKGRDFATVRKVLSMPQVNIVKKTEVQTGGFSKESILPKRNSDKLIARKKDWDPKKYGGFDSPTVAYSVLVVAKVEKGKSKKLKSVKELLGITIMERSSFEKNPIDFLEAKGYKEVKKDLIIKLPKYSLFELENGRKRMLASAGELQKGNELALPSKYVNFLYLASHYEKLKGSPEDNEQKQLFVEQHKHYLDEIIEQISEFSKRVILADANLDKVLSAYNKHRDKPIREQAENIIHLFTLTNLGAPAAFKYFDTTIDRKRYTSTKEVLDATLIHQSITGLYETRIDLSQLGGDGGGGSPAPGGGGGTAPLEEEYRLFLEAPIQNVTLLEQWKREIPKVWAEINPPGLASTQAPIHVQLLSTALPVRVRQYPITLEAKRSLRETIRKFRAAGILRPVHSPWNTPLLPVRKSGTSEYRMVQDLREVNKRVETIHPTVPNPYTLLSLLPPDRIWYSVLDLKDAFFCIPLAPESQLIFAFEWADAEEGESGQLTWTRLPQGFKNSPTLFNEALNRDLQGFRLDHPSVSLLQYVDDLLIAADTQAACLSATRDLLMTLAELGYRVSGKKAQLCQEEVTYLGFKIHKGSRSLSNSRTQAILQIPVPKTKRQVREFLGTIGYCRLWIPGFAELAQPLYAATRPGNDPLVWGEKEEEAFQSLKLALTQPPALALPSLDKPFQLFVEETSGAAKGVLTQALGPWKRPVAYLSKRLDPVAAGWPRCLRAIAAAALLTREASKLTFGQDIEITSSHNLESLLRSPPDKWLTNARITQYQVLLLDPPRVRFKQTAALNPATLLPETDDTLPIHHCLDTLDSLTSTRPDLTDQPLAQAEATLFTDGSSYIRDGKRYAGAAVVTLDSVIWAEPLPIGTSAQKAELIALTKALEWSKDKSVNIYTDSRYAFATLHVHGMIYRERGWLTAGGKAIKNAPEILALLTAVWLPKRVAVMHCKGHQKDDAPTSTGNRRADEVAREVAIRPLSTQATISAGKRTADGSEFEKRTADGSEFESPKKKAKVE

SEQ ID NO: 1151 - protein, 2098 aa, synthetic construct
MPAAKRVKLDGGDKKYSIGLDIGTNSVGWAVITDEYKVPSKKFKVLGNTDRHSIKKNLIGALLFDSGETAEATRLKRTARRRYTRRKNRICYLQEIFSNEMAKVDDSFFHRLEESFLVEEDKKHERHPIFGNIVDEVAYHEKYPTIYHLRKKLVDSTDKADLRLIYLALAHMIKFRGHFLIEGDLNPDNSDVDKLFIQLVQTYNQLFEENPINASGVDAKAILSARLSKSRRLENLIAQLPGEKKNGLFGNLIALSLGLTPNFKSNFDLAEDAKLQLSKDTYDDDLDNLLAQIGDQYADLFLAAKNLSDAILLSDILRVNTEITKAPLSASMIKRYDEHHQDLTLLKALVRQQLPEKYKEIFFDQSKNGYAGYIDGGASQEEFYKFIKPILEKMDGTEELLVKLNREDLLRKQRTFDNGSIPHQIHLGELHAILRRQEDFYPFLKDNREKIEKILTFRIPYYVGPLARGNSRFAWMTRKSEETITPWNFEEVVDKGASAQSFIERMTNFDKNLPNEKVLPKHSLLYEYFTVYNELTKVKYVTEGMRKPAFLSGEQKKAIVDLLFKTNRKVTVKQLKEDYFKKIECFDSVEISGVEDRFNASLGTYHDLLKIIKDKDFLDNEENEDILEDIVLTLTLFEDREMIEERLKTYAHLFDDKVMKQLKRRRYTGWGRLSRKLINGIRDKQSGKTILDFLKSDGFANRNFMQLIHDDSLTFKEDIQKAQVSGQGDSLHEHIANLAGSPAIKKGILQTVKVVDELVKVMGRHKPENIVIEMARENQTTQKGQKNSRERMKRIEEGIKELGSQILKEHPVENTQLQNEKLYLYYLQNGRDMYVDQELDINRLSDYDVDHIVPQSFLKDDSIDNKVLTRSDKARGKSDNVPSEEVVKKMKNYWRQLLNAKLITQRKFDNLTKAERGGLSELDKAGFIKRQLVETRQITKHVAQILDSRMNTKYDENDKLIREVKVITLKSKLVSDFRKDFQFYKVREINNYHHAHDAYLNAVVGTALIKKYPKLESEFVYGDYKVYDVRKMIAKSEQEIGKATAKYFFYSNIMNFFKTEITLANGEIRKRPLIETNGETGEIVWDKGRDFATVRKVLSMPQVNIVKKTEVQTGGFSKESILPKRNSDKLIARKKDWDPKKYGGFDSPTVAYSVLVVAKVEKGKSKKLKSVKELLGITIMERSSFEKNPIDFLEAKGYKEVKKDLIIKLPKYSLFELENGRKRMLASAGELQKGNELALPSKYVNFLYLASHYEKLKGSPEDNEQKQLFVEQHKHYLDEIIEQISEFSKRVILADANLDKVLSAYNKHRDKPIREQAENIIHLFTLTNLGAPAAFKYFDTTIDRKRYTSTKEVLDATLIHQSITGLYETRIDLSQLGGDGGGSSGGGEAAAKGGTAPLEEEYRLFLEAPIQNVTLLEQWKREIPKVWAEINPPGLASTQAPIHVQLLSTALPVRVRQYPITLEAKRSLRETIRKFRAAGILRPVHSPWNTPLLPVRKSGTSEYRMVQDLREVNKRVETIHPTVPNPYTLLSLLPPDRIWYSVLDLKDAFFCIPLAPESQLIFAFEWADAEEGESGQLTWTRLPQGFKNSPTLFNEALNRDLQGFRLDHPSVSLLQYVDDLLIAADTQAACLSATRDLLMTLAELGYRVSGKKAQLCQEEVTYLGFKIHKGSRSLSNSRTQAILQIPVPKTKRQVREFLGTIGYCRLWIPGFAELAQPLYAATRPGNDPLVWGEKEEEAFQSLKLALTQPPALALPSLDKPFQLFVEETSGAAKGVLTQALGPWKRPVAYLSKRLDPVAAGWPRCLRAIAAAALLTREASKLTFGQDIEITSSHNLESLLRSPPDKWLTNARITQYQVLLLDPPRVRFKQTAALNPATLLPETDDTLPIHHCLDTLDSLTSTRPDLTDQPLAQAEATLFTDGSSYIRDGKRYAGAAVVTLDSVIWAEPLPIGTSAQKAELIALTKALEWSKDKSVNIYTDSRYAFATLHVHGMIYRERGWLTAGGKAIKNAPEILALLTAVWLPKRVAVMHCKGHQKDDAPTSTGNRRADEVAREVAIRPLSTQATISAGKRTADGSEFEKRTADGSEFESPKKKAKVE

SEQ ID NO: 1152 - protein, 2097 aa, synthetic construct
MPAAKRVKLDGGDKKYSIGLDIGTNSVGWAVITDEYKVPSKKFKVLGNTDRHSIKKNLIGALLFDSGETAEATRLKRTARRRYTRRKNRICYLQEIFSNEMAKVDDSFFHRLEESFLVEEDKKHERHPIFGNIVDEVAYHEKYPTIYHLRKKLVDSTDKADLRLIYLALAHMIKFRGHFLIEGDLNPDNSDVDKLFIQLVQTYNQLFEENPINASGVDAKAILSARLSKSRRLENLIAQLPGEKKNGLFGNLIALSLGLTPNFKSNFDLAEDAKLQLSKDTYDDDLDNLLAQIGDQYADLFLAAKNLSDAILLSDILRVNTEITKAPLSASMIKRYDEHHQDLTLLKALVRQQLPEKYKEIFFDQSKNGYAGYIDGGASQEEFYKFIKPILEKMDGTEELLVKLNREDLLRKQRTFDNGSIPHQIHLGELHAILRRQEDFYPFLKDNREKIEKILTFRIPYYVGPLARGNSRFAWMTRKSEETITPWNFEEVVDKGASAQSFIERMTNFDKNLPNEKVLPKHSLLYEYFTVYNELTKVKYVTEGMRKPAFLSGEQKKAIVDLLFKTNRKVTVKQLKEDYFKKIECFDSVEISGVEDRFNASLGTYHDLLKIIKDKDFLDNEENEDILEDIVLTLTLFEDREMIEERLKTYAHLFDDKVMKQLKRRRYTGWGRLSRKLINGIRDKQSGKTILDFLKSDGFANRNFMQLIHDDSLTFKEDIQKAQVSGQGDSLHEHIANLAGSPAIKKGILQTVKVVDELVKVMGRHKPENIVIEMARENQTTQKGQKNSRERMKRIEEGIKELGSQILKEHPVENTQLQNEKLYLYYLQNGRDMYVDQELDINRLSDYDVDHIVPQSFLKDDSIDNKVLTRSDKARGKSDNVPSEEVVKKMKNYWRQLLNAKLITQRKFDNLTKAERGGLSELDKAGFIKRQLVETRQITKHVAQILDSRMNTKYDENDKLIREVKVITLKSKLVSDFRKDFQFYKVREINNYHHAHDAYLNAVVGTALIKKYPKLESEFVYGDYKVYDVRKMIAKSEQEIGKATAKYFFYSNIMNFFKTEITLANGEIRKRPLIETNGETGEIVWDKGRDFATVRKVLSMPQVNIVKKTEVQTGGFSKESILPKRNSDKLIARKKDWDPKKYGGFDSPTVAYSVLVVAKVEKGKSKKLKSVKELLGITIMERSSFEKNPIDFLEAKGYKEVKKDLIIKLPKYSLFELENGRKRMLASAGELQKGNELALPSKYVNFLYLASHYEKLKGSPEDNEQKQLFVEQHKHYLDEIIEQISEFSKRVILADANLDKVLSAYNKHRDKPIREQAENIIHLFTLTNLGAPAAFKYFDTTIDRKRYTSTKEVLDATLIHQSITGLYETRIDLSQLGGDGGEAAAKEAAAKGGTAPLEEEYRLFLEAPIQNVTLLEQWKREIPKVWAEINPPGLASTQAPIHVQLLSTALPVRVRQYPITLEAKRSLRETIRKFRAAGILRPVHSPWNTPLLPVRKSGTSEYRMVQDLREVNKRVETIHPTVPNPYTLLSLLPPDRIWYSVLDLKDAFFCIPLAPESQLIFAFEWADAEEGESGQLTWTRLPQGFKNSPTLFNEALNRDLQGFRLDHPSVSLLQYVDDLLIAADTQAACLSATRDLLMTLAELGYRVSGKKAQLCQEEVTYLGFKIHKGSRSLSNSRTQAILQIPVPKTKRQVREFLGTIGYCRLWIPGFAELAQPLYAATRPGNDPLVWGEKEEEAFQSLKLALTQPPALALPSLDKPFQLFVEETSGAAKGVLTQALGPWKRPVAYLSKRLDPVAAGWPRCLRAIAAAALLTREASKLTFGQDIEITSSHNLESLLRSPPDKWLTNARITQYQVLLLDPPRVRFKQTAALNPATLLPETDDTLPIHHCLDTLDSLTSTRPDLTDQPLAQAEATLFTDGSSYIRDGKRYAGAAVVTLDSVIWAEPLPIGTSAQKAELIALTKALEWSKDKSVNIYTDSRYAFATLHVHGMIYRERGWLTAGGKAIKNAPEILALLTAVWLPKRVAVMHCKGHQKDDAPTSTGNRRADEVAREVAIRPLSTQATISAGKRTADGSEFEKRTADGSEFESPKKKAKVE

SEQ ID NO: 1153 - protein, 2096 aa, synthetic construct
MPAAKRVKLDGGDKKYSIGLDIGTNSVGWAVITDEYKVPSKKFKVLGNTDRHSIKKNLIGALLFDSGETAEATRLKRTARRRYTRRKNRICYLQEIFSNEMAKVDDSFFHRLEESFLVEEDKKHERHPIFGNIVDEVAYHEKYPTIYHLRKKLVDSTDKADLRLIYLALAHMIKFRGHFLIEGDLNPDNSDVDKLFIQLVQTYNQLFEENPINASGVDAKAILSARLSKSRRLENLIAQLPGEKKNGLFGNLIALSLGLTPNFKSNFDLAEDAKLQLSKDTYDDDLDNLLAQIGDQYADLFLAAKNLSDAILLSDILRVNTEITKAPLSASMIKRYDEHHQDLTLLKALVRQQLPEKYKEIFFDQSKNGYAGYIDGGASQEEFYKFIKPILEKMDGTEELLVKLNREDLLRKQRTFDNGSIPHQIHLGELHAILRRQEDFYPFLKDNREKIEKILTFRIPYYVGPLARGNSRFAWMTRKSEETITPWNFEEVVDKGASAQSFIERMTNFDKNLPNEKVLPKHSLLYEYFTVYNELTKVKYVTEGMRKPAFLSGEQKKAIVDLLFKTNRKVTVKQLKEDYFKKIECFDSVEISGVEDRFNASLGTYHDLLKIIKDKDFLDNEENEDILEDIVLTLTLFEDREMIEERLKTYAHLFDDKVMKQLKRRRYTGWGRLSRKLINGIRDKQSGKTILDFLKSDGFANRNFMQLIHDDSLTFKEDIQKAQVSGQGDSLHEHIANLAGSPAIKKGILQTVKVVDELVKVMGRHKPENIVIEMARENQTTQKGQKNSRERMKRIEEGIKELGSQILKEHPVENTQLQNEKLYLYYLQNGRDMYVDQELDINRLSDYDVDHIVPQSFLKDDSIDNKVLTRSDKARGKSDNVPSEEVVKKMKNYWRQLLNAKLITQRKFDNLTKAERGGLSELDKAGFIKRQLVETRQITKHVAQILDSRMNTKYDENDKLIREVKVITLKSKLVSDFRKDFQFYKVREINNYHHAHDAYLNAVVGTALIKKYPKLESEFVYGDYKVYDVRKMIAKSEQEIGKATAKYFFYSNIMNFFKTEITLANGEIRKRPLIETNGETGEIVWDKGRDFATVRKVLSMPQVNIVKKTEVQTGGFSKESILPKRNSDKLIARKKDWDPKKYGGFDSPTVAYSVLVVAKVEKGKSKKLKSVKELLGITIMERSSFEKNPIDFLEAKGYKEVKKDLIIKLPKYSLFELENGRKRMLASAGELQKGNELALPSKYVNFLYLASHYEKLKGSPEDNEQKQLFVEQHKHYLDEIIEQISEFSKRVILADANLDKVLSAYNKHRDKPIREQAENIIHLFTLTNLGAPAAFKYFDTTIDRKRYTSTKEVLDATLIHQSITGLYETRIDLSQLGGDGGGGSPAPGSSGGTAPLEEEYRLFLEAPIQNVTLLEQWKREIPKVWAEINPPGLASTQAPIHVQLLSTALPVRVRQYPITLEAKRSLRETIRKFRAAGILRPVHSPWNTPLLPVRKSGTSEYRMVQDLREVNKRVETIHPTVPNPYTLLSLLPPDRIWYSVLDLKDAFFCIPLAPESQLIFAFEWADAEEGESGQLTWTRLPQGFKNSPTLFNEALNRDLQGFRLDHPSVSLLQYVDDLLIAADTQAACLSATRDLLMTLAELGYRVSGKKAQLCQEEVTYLGFKIHKGSRSLSNSRTQAILQIPVPKTKRQVREFLGTIGYCRLWIPGFAELAQPLYAATRPGNDPLVWGEKEEEAFQSLKLALTQPPALALPSLDKPFQLFVEETSGAAKGVLTQALGPWKRPVAYLSKRLDPVAAGWPRCLRAIAAAALLTREASKLTFGQDIEITSSHNLESLLRSPPDKWLTNARITQYQVLLLDPPRVRFKQTAALNPATLLPETDDTLPIHHCLDTLDSLTSTRPDLTDQPLAQAEATLFTDGSSYIRDGKRYAGAAVVTLDSVIWAEPLPIGTSAQKAELIALTKALEWSKDKSVNIYTDSRYAFATLHVHGMIYRERGWLTAGGKAIKNAPEILALLTAVWLPKRVAVMHCKGHQKDDAPTSTGNRRADEVAREVAIRPLSTQATISAGKRTADGSEFEKRTADGSEFESPKKKAKVE

SEQ ID NO: 1154 - protein, 2098 aa, synthetic construct
MPAAKRVKLDGGDKKYSIGLDIGTNSVGWAVITDEYKVPSKKFKVLGNTDRHSIKKNLIGALLFDSGETAEATRLKRTARRRYTRRKNRICYLQEIFSNEMAKVDDSFFHRLEESFLVEEDKKHERHPIFGNIVDEVAYHEKYPTIYHLRKKLVDSTDKADLRLIYLALAHMIKFRGHFLIEGDLNPDNSDVDKLFIQLVQTYNQLFEENPINASGVDAKAILSARLSKSRRLENLIAQLPGEKKNGLFGNLIALSLGLTPNFKSNFDLAEDAKLQLSKDTYDDDLDNLLAQIGDQYADLFLAAKNLSDAILLSDILRVNTEITKAPLSASMIKRYDEHHQDLTLLKALVRQQLPEKYKEIFFDQSKNGYAGYIDGGASQEEFYKFIKPILEKMDGTEELLVKLNREDLLRKQRTFDNGSIPHQIHLGELHAILRRQEDFYPFLKDNREKIEKILTFRIPYYVGPLARGNSRFAWMTRKSEETITPWNFEEVVDKGASAQSFIERMTNFDKNLPNEKVLPKHSLLYEYFTVYNELTKVKYVTEGMRKPAFLSGEQKKAIVDLLFKTNRKVTVKQLKEDYFKKIECFDSVEISGVEDRFNASLGTYHDLLKIIKDKDFLDNEENEDILEDIVLTLTLFEDREMIEERLKTYAHLFDDKVMKQLKRRRYTGWGRLSRKLINGIRDKQSGKTILDFLKSDGFANRNFMQLIHDDSLTFKEDIQKAQVSGQGDSLHEHIANLAGSPAIKKGILQTVKVVDELVKVMGRHKPENIVIEMARENQTTQKGQKNSRERMKRIEEGIKELGSQILKEHPVENTQLQNEKLYLYYLQNGRDMYVDQELDINRLSDYDVDHIVPQSFLKDDSIDNKVLTRSDKARGKSDNVPSEEVVKKMKNYWRQLLNAKLITQRKFDNLTKAERGGLSELDKAGFIKRQLVETRQITKHVAQILDSRMNTKYDENDKLIREVKVITLKSKLVSDFRKDFQFYKVREINNYHHAHDAYLNAVVGTALIKKYPKLESEFVYGDYKVYDVRKMIAKSEQEIGKATAKYFFYSNIMNFFKTEITLANGEIRKRPLIETNGETGEIVWDKGRDFATVRKVLSMPQVNIVKKTEVQTGGFSKESILPKRNSDKLIARKKDWDPKKYGGFDSPTVAYSVLVVAKVEKGKSKKLKSVKELLGITIMERSSFEKNPIDFLEAKGYKEVKKDLIIKLPKYSLFELENGRKRMLASAGELQKGNELALPSKYVNFLYLASHYEKLKGSPEDNEQKQLFVEQHKHYLDEIIEQISEFSKRVILADANLDKVLSAYNKHRDKPIREQAENIIHLFTLTNLGAPAAFKYFDTTIDRKRYTSTKEVLDATLIHQSITGLYETRIDLSQLGGDGGGGGEAAAKGGSGGTAPLEEEYRLFLEAPIQNVTLLEQWKREIPKVWAEINPPGLASTQAPIHVQLLSTALPVRVRQYPITLEAKRSLRETIRKFRAAGILRPVHSPWNTPLLPVRKSGTSEYRMVQDLREVNKRVETIHPTVPNPYTLLSLLPPDRIWYSVLDLKDAFFCIPLAPESQLIFAFEWADAEEGESGQLTWTRLPQGFKNSPTLFNEALNRDLQGFRLDHPSVSLLQYVDDLLIAADTQAACLSATRDLLMTLAELGYRVSGKKAQLCQEEVTYLGFKIHKGSRSLSNSRTQAILQIPVPKTKRQVREFLGTIGYCRLWIPGFAELAQPLYAATRPGNDPLVWGEKEEEAFQSLKLALTQPPALALPSLDKPFQLFVEETSGAAKGVLTQALGPWKRPVAYLSKRLDPVAAGWPRCLRAIAAAALLTREASKLTFGQDIEITSSHNLESLLRSPPDKWLTNARITQYQVLLLDPPRVRFKQTAALNPATLLPETDDTLPIHHCLDTLDSLTSTRPDLTDQPLAQAEATLFTDGSSYIRDGKRYAGAAVVTLDSVIWAEPLPIGTSAQKAELIALTKALEWSKDKSVNIYTDSRYAFATLHVHGMIYRERGWLTAGGKAIKNAPEILALLTAVWLPKRVAVMHCKGHQKDDAPTSTGNRRADEVAREVAIRPLSTQATISAGKRTADGSEFEKRTADGSEFESPKKKAKVE

SEQ ID NO: 1155 - protein, 2098 aa, synthetic construct
MPAAKRVKLDGGDKKYSIGLDIGTNSVGWAVITDEYKVPSKKFKVLGNTDRHSIKKNLIGALLFDSGETAEATRLKRTARRRYTRRKNRICYLQEIFSNEMAKVDDSFFHRLEESFLVEEDKKHERHPIFGNIVDEVAYHEKYPTIYHLRKKLVDSTDKADLRLIYLALAHMIKFRGHFLIEGDLNPDNSDVDKLFIQLVQTYNQLFEENPINASGVDAKAILSARLSKSRRLENLIAQLPGEKKNGLFGNLIALSLGLTPNFKSNFDLAEDAKLQLSKDTYDDDLDNLLAQIGDQYADLFLAAKNLSDAILLSDILRVNTEITKAPLSASMIKRYDEHHQDLTLLKALVRQQLPEKYKEIFFDQSKNGYAGYIDGGASQEEFYKFIKPILEKMDGTEELLVKLNREDLLRKQRTFDNGSIPHQIHLGELHAILRRQEDFYPFLKDNREKIEKILTFRIPYYVGPLARGNSRFAWMTRKSEETITPWNFEEVVDKGASAQSFIERMTNFDKNLPNEKVLPKHSLLYEYFTVYNELTKVKYVTEGMRKPAFLSGEQKKAIVDLLFKTNRKVTVKQLKEDYFKKIECFDSVEISGVEDRFNASLGTYHDLLKIIKDKDFLDNEENEDILEDIVLTLTLFEDREMIEERLKTYAHLFDDKVMKQLKRRRYTGWGRLSRKLINGIRDKQSGKTILDFLKSDGFANRNFMQLIHDDSLTFKEDIQKAQVSGQGDSLHEHIANLAGSPAIKKGILQTVKVVDELVKVMGRHKPENIVIEMARENQTTQKGQKNSRERMKRIEEGIKELGSQILKEHPVENTQLQNEKLYLYYLQNGRDMYVDQELDINRLSDYDVDHIVPQSFLKDDSIDNKVLTRSDKARGKSDNVPSEEVVKKMKNYWRQLLNAKLITQRKFDNLTKAERGGLSELDKAGFIKRQLVETRQITKHVAQILDSRMNTKYDENDKLIREVKVITLKSKLVSDFRKDFQFYKVREINNYHHAHDAYLNAVVGTALIKKYPKLESEFVYGDYKVYDVRKMIAKSEQEIGKATAKYFFYSNIMNFFKTEITLANGEIRKRPLIETNGETGEIVWDKGRDFATVRKVLSMPQVNIVKKTEVQTGGFSKESILPKRNSDKLIARKKDWDPKKYGGFDSPTVAYSVLVVAKVEKGKSKKLKSVKELLGITIMERSSFEKNPIDFLEAKGYKEVKKDLIIKLPKYSLFELENGRKRMLASAGELQKGNELALPSKYVNFLYLASHYEKLKGSPEDNEQKQLFVEQHKHYLDEIIEQISEFSKRVILADANLDKVLSAYNKHRDKPIREQAENIIHLFTLTNLGAPAAFKYFDTTIDRKRYTSTKEVLDATLIHQSITGLYETRIDLSQLGGDGGGGGEAAAKPAPGGTAPLEEEYRLFLEAPIQNVTLLEQWKREIPKVWAEINPPGLASTQAPIHVQLLSTALPVRVRQYPITLEAKRSLRETIRKFRAAGILRPVHSPWNTPLLPVRKSGTSEYRMVQDLREVNKRVETIHPTVPNPYTLLSLLPPDRIWYSVLDLKDAFFCIPLAPESQLIFAFEWADAEEGESGQLTWTRLPQGFKNSPTLFNEALNRDLQGFRLDHPSVSLLQYVDDLLIAADTQAACLSATRDLLMTLAELGYRVSGKKAQLCQEEVTYLGFKIHKGSRSLSNSRTQAILQIPVPKTKRQVREFLGTIGYCRLWIPGFAELAQPLYAATRPGNDPLVWGEKEEEAFQSLKLALTQPPALALPSLDKPFQLFVEETSGAAKGVLTQALGPWKRPVAYLSKRLDPVAAGWPRCLRAIAAAALLTREASKLTFGQDIEITSSHNLESLLRSPPDKWLTNARITQYQVLLLDPPRVRFKQTAALNPATLLPETDDTLPIHHCLDTLDSLTSTRPDLTDQPLAQAEATLFTDGSSYIRDGKRYAGAAVVTLDSVIWAEPLPIGTSAQKAELIALTKALEWSKDKSVNIYTDSRYAFATLHVHGMIYRERGWLTAGGKAIKNAPEILALLTAVWLPKRVAVMHCKGHQKDDAPTSTGNRRADEVAREVAIRPLSTQATISAGKRTADGSEFEKRTADGSEFESPKKKAKVE

SEQ ID NO: 1156 - protein, 2098 aa, synthetic construct
MPAAKRVKLDGGDKKYSIGLDIGTNSVGWAVITDEYKVPSKKFKVLGNTDRHSIKKNLIGALLFDSGETAEATRLKRTARRRYTRRKNRICYLQEIFSNEMAKVDDSFFHRLEESFLVEEDKKHERHPIFGNIVDEVAYHEKYPTIYHLRKKLVDSTDKADLRLIYLALAHMIKFRGHFLIEGDLNPDNSDVDKLFIQLVQTYNQLFEENPINASGVDAKAILSARLSKSRRLENLIAQLPGEKKNGLFGNLIALSLGLTPNFKSNFDLAEDAKLQLSKDTYDDDLDNLLAQIGDQYADLFLAAKNLSDAILLSDILRVNTEITKAPLSASMIKRYDEHHQDLTLLKALVRQQLPEKYKEIFFDQSKNGYAGYIDGGASQEEFYKFIKPILEKMDGTEELLVKLNREDLLRKQRTFDNGSIPHQIHLGELHAILRRQEDFYPFLKDNREKIEKILTFRIPYYVGPLARGNSRFAWMTRKSEETITPWNFEEVVDKGASAQSFIERMTNFDKNLPNEKVLPKHSLLYEYFTVYNELTKVKYVTEGMRKPAFLSGEQKKAIVDLLFKTNRKVTVKQLKEDYFKKIECFDSVEISGVEDRFNASLGTYHDLLKIIKDKDFLDNEENEDILEDIVLTLTLFEDREMIEERLKTYAHLFDDKVMKQLKRRRYTGWGRLSRKLINGIRDKQSGKTILDFLKSDGFANRNFMQLIHDDSLTFKEDIQKAQVSGQGDSLHEHIANLAGSPAIKKGILQTVKVVDELVKVMGRHKPENIVIEMARENQTTQKGQKNSRERMKRIEEGIKELGSQILKEHPVENTQLQNEKLYLYYLQNGRDMYVDQELDINRLSDYDVDHIVPQSFLKDDSIDNKVLTRSDKARGKSDNVPSEEVVKKMKNYWRQLLNAKLITQRKFDNLTKAERGGLSELDKAGFIKRQLVETRQITKHVAQILDSRMNTKYDENDKLIREVKVITLKSKLVSDFRKDFQFYKVREINNYHHAHDAYLNAVVGTALIKKYPKLESEFVYGDYKVYDVRKMIAKSEQEIGKATAKYFFYSNIMNFFKTEITLANGEIRKRPLIETNGETGEIVWDKGRDFATVRKVLSMPQVNIVKKTEVQTGGFSKESILPKRNSDKLIARKKDWDPKKYGGFDSPTVAYSVLVVAKVEKGKSKKLKSVKELLGITIMERSSFEKNPIDFLEAKGYKEVKKDLIIKLPKYSLFELENGRKRMLASAGELQKGNELALPSKYVNFLYLASHYEKLKGSPEDNEQKQLFVEQHKHYLDEIIEQISEFSKRVILADANLDKVLSAYNKHRDKPIREQAENIIHLFTLTNLGAPAAFKYFDTTIDRKRYTSTKEVLDATLIHQSITGLYETRIDLSQLGGDGGEAAAKPAPGGSGGTAPLEEEYRLFLEAPIQNVTLLEQWKREIPKVWAEINPPGLASTQAPIHVQLLSTALPVRVRQYPITLEAKRSLRETIRKFRAAGILRPVHSPWNTPLLPVRKSGTSEYRMVQDLREVNKRVETIHPTVPNPYTLLSLLPPDRIWYSVLDLKDAFFCIPLAPESQLIFAFEWADAEEGESGQLTWTRLPQGFKNSPTLFNEALNRDLQGFRLDHPSVSLLQYVDDLLIAADTQAACLSATRDLLMTLAELGYRVSGKKAQLCQEEVTYLGFKIHKGSRSLSNSRTQAILQIPVPKTKRQVREFLGTIGYCRLWIPGFAELAQPLYAATRPGNDPLVWGEKEEEAFQSLKLALTQPPALALPSLDKPFQLFVEETSGAAKGVLTQALGPWKRPVAYLSKRLDPVAAGWPRCLRAIAAAALLTREASKLTFGQDIEITSSHNLESLLRSPPDKWLTNARITQYQVLLLDPPRVRFKQTAALNPATLLPETDDTLPIHHCLDTLDSLTSTRPDLTDQPLAQAEATLFTDGSSYIRDGKRYAGAAVVTLDSVIWAEPLPIGTSAQKAELIALTKALEWSKDKSVNIYTDSRYAFATLHVHGMIYRERGWLTAGGKAIKNAPEILALLTAVWLPKRVAVMHCKGHQKDDAPTSTGNRRADEVAREVAIRPLSTQATISAGKRTADGSEFEKRTADGSEFESPKKKAKVE

SEQ ID NO: 1157 - protein, 2098 aa, synthetic construct
MPAAKRVKLDGGDKKYSIGLDIGTNSVGWAVITDEYKVPSKKFKVLGNTDRHSIKKNLIGALLFDSGETAEATRLKRTARRRYTRRKNRICYLQEIFSNEMAKVDDSFFHRLEESFLVEEDKKHERHPIFGNIVDEVAYHEKYPTIYHLRKKLVDSTDKADLRLIYLALAHMIKFRGHFLIEGDLNPDNSDVDKLFIQLVQTYNQLFEENPINASGVDAKAILSARLSKSRRLENLIAQLPGEKKNGLFGNLIALSLGLTPNFKSNFDLAEDAKLQLSKDTYDDDLDNLLAQIGDQYADLFLAAKNLSDAILLSDILRVNTEITKAPLSASMIKRYDEHHQDLTLLKALVRQQLPEKYKEIFFDQSKNGYAGYIDGGASQEEFYKFIKPILEKMDGTEELLVKLNREDLLRKQRTFDNGSIPHQIHLGELHAILRRQEDFYPFLKDNREKIEKILTFRIPYYVGPLARGNSRFAWMTRKSEETITPWNFEEVVDKGASAQSFIERMTNFDKNLPNEKVLPKHSLLYEYFTVYNELTKVKYVTEGMRKPAFLSGEQKKAIVDLLFKTNRKVTVKQLKEDYFKKIECFDSVEISGVEDRFNASLGTYHDLLKIIKDKDFLDNEENEDILEDIVLTLTLFEDREMIEERLKTYAHLFDDKVMKQLKRRRYTGWGRLSRKLINGIRDKQSGKTILDFLKSDGFANRNFMQLIHDDSLTFKEDIQKAQVSGQGDSLHEHIANLAGSPAIKKGILQTVKVVDELVKVMGRHKPENIVIEMARENQTTQKGQKNSRERMKRIEEGIKELGSQILKEHPVENTQLQNEKLYLYYLQNGRDMYVDQELDINRLSDYDVDHIVPQSFLKDDSIDNKVLTRSDKARGKSDNVPSEEVVKKMKNYWRQLLNAKLITQRKFDNLTKAERGGLSELDKAGFIKRQLVETRQITKHVAQILDSRMNTKYDENDKLIREVKVITLKSKLVSDFRKDFQFYKVREINNYHHAHDAYLNAVVGTALIKKYPKLESEFVYGDYKVYDVRKMIAKSEQEIGKATAKYFFYSNIMNFFKTEITLANGEIRKRPLIETNGETGEIVWDKGRDFATVRKVLSMPQVNIVKKTEVQTGGFSKESILPKRNSDKLIARKKDWDPKKYGGFDSPTVAYSVLVVAKVEKGKSKKLKSVKELLGITIMERSSFEKNPIDFLEAKGYKEVKKDLIIKLPKYSLFELENGRKRMLASAGELQKGNELALPSKYVNFLYLASHYEKLKGSPEDNEQKQLFVEQHKHYLDEIIEQISEFSKRVILADANLDKVLSAYNKHRDKPIREQAENIIHLFTLTNLGAPAAFKYFDTTIDRKRYTSTKEVLDATLIHQSITGLYETRIDLSQLGGDGGEAAAKGGGGGSGGTAPLEEEYRLFLEAPIQNVTLLEQWKREIPKVWAEINPPGLASTQAPIHVQLLSTALPVRVRQYPITLEAKRSLRETIRKFRAAGILRPVHSPWNTPLLPVRKSGTSEYRMVQDLREVNKRVETIHPTVPNPYTLLSLLPPDRIWYSVLDLKDAFFCIPLAPESQLIFAFEWADAEEGESGQLTWTRLPQGFKNSPTLFNEALNRDLQGFRLDHPSVSLLQYVDDLLIAADTQAACLSATRDLLMTLAELGYRVSGKKAQLCQEEVTYLGFKIHKGSRSLSNSRTQAILQIPVPKTKRQVREFLGTIGYCRLWIPGFAELAQPLYAATRPGNDPLVWGEKEEEAFQSLKLALTQPPALALPSLDKPFQLFVEETSGAAKGVLTQALGPWKRPVAYLSKRLDPVAAGWPRCLRAIAAAALLTREASKLTFGQDIEITSSHNLESLLRSPPDKWLTNARITQYQVLLLDPPRVRFKQTAALNPATLLPETDDTLPIHHCLDTLDSLTSTRPDLTDQPLAQAEATLFTDGSSYIRDGKRYAGAAVVTLDSVIWAEPLPIGTSAQKAELIALTKALEWSKDKSVNIYTDSRYAFATLHVHGMIYRERGWLTAGGKAIKNAPEILALLTAVWLPKRVAVMHCKGHQKDDAPTSTGNRRADEVAREVAIRPLSTQATISAGKRTADGSEFEKRTADGSEFESPKKKAKVE

SEQ ID NO: 1158 - protein, 2102 aa, synthetic construct
MPAAKRVKLDGGDKKYSIGLDIGTNSVGWAVITDEYKVPSKKFKVLGNTDRHSIKKNLIGALLFDSGETAEATRLKRTARRRYTRRKNRICYLQEIFSNEMAKVDDSFFHRLEESFLVEEDKKHERHPIFGNIVDEVAYHEKYPTIYHLRKKLVDSTDKADLRLIYLALAHMIKFRGHFLIEGDLNPDNSDVDKLFIQLVQTYNQLFEENPINASGVDAKAILSARLSKSRRLENLIAQLPGEKKNGLFGNLIALSLGLTPNFKSNFDLAEDAKLQLSKDTYDDDLDNLLAQIGDQYADLFLAAKNLSDAILLSDILRVNTEITKAPLSASMIKRYDEHHQDLTLLKALVRQQLPEKYKEIFFDQSKNGYAGYIDGGASQEEFYKFIKPILEKMDGTEELLVKLNREDLLRKQRTFDNGSIPHQIHLGELHAILRRQEDFYPFLKDNREKIEKILTFRIPYYVGPLARGNSRFAWMTRKSEETITPWNFEEVVDKGASAQSFIERMTNFDKNLPNEKVLPKHSLLYEYFTVYNELTKVKYVTEGMRKPAFLSGEQKKAIVDLLFKTNRKVTVKQLKEDYFKKIECFDSVEISGVEDRFNASLGTYHDLLKIIKDKDFLDNEENEDILEDIVLTLTLFEDREMIEERLKTYAHLFDDKVMKQLKRRRYTGWGRLSRKLINGIRDKQSGKTILDFLKSDGFANRNFMQLIHDDSLTFKEDIQKAQVSGQGDSLHEHIANLAGSPAIKKGILQTVKVVDELVKVMGRHKPENIVIEMARENQTTQKGQKNSRERMKRIEEGIKELGSQILKEHPVENTQLQNEKLYLYYLQNGRDMYVDQELDINRLSDYDVDHIVPQSFLKDDSIDNKVLTRSDKARGKSDNVPSEEVVKKMKNYWRQLLNAKLITQRKFDNLTKAERGGLSELDKAGFIKRQLVETRQITKHVAQILDSRMNTKYDENDKLIREVKVITLKSKLVSDFRKDFQFYKVREINNYHHAHDAYLNAVVGTALIKKYPKLESEFVYGDYKVYDVRKMIAKSEQEIGKATAKYFFYSNIMNFFKTEITLANGEIRKRPLIETNGETGEIVWDKGRDFATVRKVLSMPQVNIVKKTEVQTGGFSKESILPKRNSDKLIARKKDWDPKKYGGFDSPTVAYSVLVVAKVEKGKSKKLKSVKELLGITIMERSSFEKNPIDFLEAKGYKEVKKDLIIKLPKYSLFELENGRKRMLASAGELQKGNELALPSKYVNFLYLASHYEKLKGSPEDNEQKQLFVEQHKHYLDEIIEQISEFSKRVILADANLDKVLSAYNKHRDKPIREQAENIIHLFTLTNLGAPAAFKYFDTTIDRKRYTSTKEVLDATLIHQSITGLYETRIDLSQLGGDGGGGGGSEAAAKGGGGSGGTAPLEEEYRLFLEAPIQNVTLLEQWKREIPKVWAEINPPGLASTQAPIHVQLLSTALPVRVRQYPITLEAKRSLRETIRKFRAAGILRPVHSPWNTPLLPVRKSGTSEYRMVQDLREVNKRVETIHPTVPNPYTLLSLLPPDRIWYSVLDLKDAFFCIPLAPESQLIFAFEWADAEEGESGQLTWTRLPQGFKNSPTLFNEALNRDLQGFRLDHPSVSLLQYVDDLLIAADTQAACLSATRDLLMTLAELGYRVSGKKAQLCQEEVTYLGFKIHKGSRSLSNSRTQAILQIPVPKTKRQVREFLGTIGYCRLWIPGFAELAQPLYAATRPGNDPLVWGEKEEEAFQSLKLALTQPPALALPSLDKPFQLFVEETSGAAKGVLTQALGPWKRPVAYLSKRLDPVAAGWPRCLRAIAAAALLTREASKLTFGQDIEITSSHNLESLLRSPPDKWLTNARITQYQVLLLDPPRVRFKQTAALNPATLLPETDDTLPIHHCLDTLDSLTSTRPDLTDQPLAQAEATLFTDGSSYIRDGKRYAGAAVVTLDSVIWAEPLPIGTSAQKAELIALTKALEWSKDKSVNIYTDSRYAFATLHVHGMIYRERGWLTAGGKAIKNAPEILALLTAVWLPKRVAVMHCKGHQKDDAPTSTGNRRADEVAREVAIRPLSTQATISAGKRTADGSEFEKRTADGSEFESPKKKAKVE

SEQ ID NO: 1159 - protein, 2096 aa, synthetic construct
MPAAKRVKLDGGDKKYSIGLDIGTNSVGWAVITDEYKVPSKKFKVLGNTDRHSIKKNLIGALLFDSGETAEATRLKRTARRRYTRRKNRICYLQEIFSNEMAKVDDSFFHRLEESFLVEEDKKHERHPIFGNIVDEVAYHEKYPTIYHLRKKLVDSTDKADLRLIYLALAHMIKFRGHFLIEGDLNPDNSDVDKLFIQLVQTYNQLFEENPINASGVDAKAILSARLSKSRRLENLIAQLPGEKKNGLFGNLIALSLGLTPNFKSNFDLAEDAKLQLSKDTYDDDLDNLLAQIGDQYADLFLAAKNLSDAILLSDILRVNTEITKAPLSASMIKRYDEHHQDLTLLKALVRQQLPEKYKEIFFDQSKNGYAGYIDGGASQEEFYKFIKPILEKMDGTEELLVKLNREDLLRKQRTFDNGSIPHQIHLGELHAILRRQEDFYPFLKDNREKIEKILTFRIPYYVGPLARGNSRFAWMTRKSEETITPWNFEEVVDKGASAQSFIERMTNFDKNLPNEKVLPKHSLLYEYFTVYNELTKVKYVTEGMRKPAFLSGEQKKAIVDLLFKTNRKVTVKQLKEDYFKKIECFDSVEISGVEDRFNASLGTYHDLLKIIKDKDFLDNEENEDILEDIVLTLTLFEDREMIEERLKTYAHLFDDKVMKQLKRRRYTGWGRLSRKLINGIRDKQSGKTILDFLKSDGFANRNFMQLIHDDSLTFKEDIQKAQVSGQGDSLHEHIANLAGSPAIKKGILQTVKVVDELVKVMGRHKPENIVIEMARENQTTQKGQKNSRERMKRIEEGIKELGSQILKEHPVENTQLQNEKLYLYYLQNGRDMYVDQELDINRLSDYDVDHIVPQSFLKDDSIDNKVLTRSDKARGKSDNVPSEEVVKKMKNYWRQLLNAKLITQRKFDNLTKAERGGLSELDKAGFIKRQLVETRQITKHVAQILDSRMNTKYDENDKLIREVKVITLKSKLVSDFRKDFQFYKVREINNYHHAHDAYLNAVVGTALIKKYPKLESEFVYGDYKVYDVRKMIAKSEQEIGKATAKYFFYSNIMNFFKTEITLANGEIRKRPLIETNGETGEIVWDKGRDFATVRKVLSMPQVNIVKKTEVQTGGFSKESILPKRNSDKLIARKKDWDPKKYGGFDSPTVAYSVLVVAKVEKGKSKKLKSVKELLGITIMERSSFEKNPIDFLEAKGYKEVKKDLIIKLPKYSLFELENGRKRMLASAGELQKGNELALPSKYVNFLYLASHYEKLKGSPEDNEQKQLFVEQHKHYLDEIIEQISEFSKRVILADANLDKVLSAYNKHRDKPIREQAENIIHLFTLTNLGAPAAFKYFDTTIDRKRYTSTKEVLDATLIHQSITGLYETRIDLSQLGGDGGPAPGGGGGSGGTAPLEEEYRLFLEAPIQNVTLLEQWKREIPKVWAEINPPGLASTQAPIHVQLLSTALPVRVRQYPITLEAKRSLRETIRKFRAAGILRPVHSPWNTPLLPVRKSGTSEYRMVQDLREVNKRVETIHPTVPNPYTLLSLLPPDRIWYSVLDLKDAFFCIPLAPESQLIFAFEWADAEEGESGQLTWTRLPQGFKNSPTLFNEALNRDLQGFRLDHPSVSLLQYVDDLLIAADTQAACLSATRDLLMTLAELGYRVSGKKAQLCQEEVTYLGFKIHKGSRSLSNSRTQAILQIPVPKTKRQVREFLGTIGYCRLWIPGFAELAQPLYAATRPGNDPLVWGEKEEEAFQSLKLALTQPPALALPSLDKPFQLFVEETSGAAKGVLTQALGPWKRPVAYLSKRLDPVAAGWPRCLRAIAAAALLTREASKLTFGQDIEITSSHNLESLLRSPPDKWLTNARITQYQVLLLDPPRVRFKQTAALNPATLLPETDDTLPIHHCLDTLDSLTSTRPDLTDQPLAQAEATLFTDGSSYIRDGKRYAGAAVVTLDSVIWAEPLPIGTSAQKAELIALTKALEWSKDKSVNIYTDSRYAFATLHVHGMIYRERGWLTAGGKAIKNAPEILALLTAVWLPKRVAVMHCKGHQKDDAPTSTGNRRADEVAREVAIRPLSTQATISAGKRTADGSEFEKRTADGSEFESPKKKAKVE

SEQ ID NO: 1160 - protein, 2098 aa, synthetic construct
MPAAKRVKLDGGDKKYSIGLDIGTNSVGWAVITDEYKVPSKKFKVLGNTDRHSIKKNLIGALLFDSGETAEATRLKRTARRRYTRRKNRICYLQEIFSNEMAKVDDSFFHRLEESFLVEEDKKHERHPIFGNIVDEVAYHEKYPTIYHLRKKLVDSTDKADLRLIYLALAHMIKFRGHFLIEGDLNPDNSDVDKLFIQLVQTYNQLFEENPINASGVDAKAILSARLSKSRRLENLIAQLPGEKKNGLFGNLIALSLGLTPNFKSNFDLAEDAKLQLSKDTYDDDLDNLLAQIGDQYADLFLAAKNLSDAILLSDILRVNTEITKAPLSASMIKRYDEHHQDLTLLKALVRQQLPEKYKEIFFDQSKNGYAGYIDGGASQEEFYKFIKPILEKMDGTEELLVKLNREDLLRKQRTFDNGSIPHQIHLGELHAILRRQEDFYPFLKDNREKIEKILTFRIPYYVGPLARGNSRFAWMTRKSEETITPWNFEEVVDKGASAQSFIERMTNFDKNLPNEKVLPKHSLLYEYFTVYNELTKVKYVTEGMRKPAFLSGEQKKAIVDLLFKTNRKVTVKQLKEDYFKKIECFDSVEISGVEDRFNASLGTYHDLLKIIKDKDFLDNEENEDILEDIVLTLTLFEDREMIEERLKTYAHLFDDKVMKQLKRRRYTGWGRLSRKLINGIRDKQSGKTILDFLKSDGFANRNFMQLIHDDSLTFKEDIQKAQVSGQGDSLHEHIANLAGSPAIKKGILQTVKVVDELVKVMGRHKPENIVIEMARENQTTQKGQKNSRERMKRIEEGIKELGSQILKEHPVENTQLQNEKLYLYYLQNGRDMYVDQELDINRLSDYDVDHIVPQSFLKDDSIDNKVLTRSDKARGKSDNVPSEEVVKKMKNYWRQLLNAKLITQRKFDNLTKAERGGLSELDKAGFIKRQLVETRQITKHVAQILDSRMNTKYDENDKLIREVKVITLKSKLVSDFRKDFQFYKVREINNYHHAHDAYLNAVVGTALIKKYPKLESEFVYGDYKVYDVRKMIAKSEQEIGKATAKYFFYSNIMNFFKTEITLANGEIRKRPLIETNGETGEIVWDKGRDFATVRKVLSMPQVNIVKKTEVQTGGFSKESILPKRNSDKLIARKKDWDPKKYGGFDSPTVAYSVLVVAKVEKGKSKKLKSVKELLGITIMERSSFEKNPIDFLEAKGYKEVKKDLIIKLPKYSLFELENGRKRMLASAGELQKGNELALPSKYVNFLYLASHYEKLKGSPEDNEQKQLFVEQHKHYLDEIIEQISEFSKRVILADANLDKVLSAYNKHRDKPIREQAENIIHLFTLTNLGAPAAFKYFDTTIDRKRYTSTKEVLDATLIHQSITGLYETRIDLSQLGGDGGGGSPAPEAAAKGGTAPLEEEYRLFLEAPIQNVTLLEQWKREIPKVWAEINPPGLASTQAPIHVQLLSTALPVRVRQYPITLEAKRSLRETIRKFRAAGILRPVHSPWNTPLLPVRKSGTSEYRMVQDLREVNKRVETIHPTVPNPYTLLSLLPPDRIWYSVLDLKDAFFCIPLAPESQLIFAFEWADAEEGESGQLTWTRLPQGFKNSPTLFNEALNRDLQGFRLDHPSVSLLQYVDDLLIAADTQAACLSATRDLLMTLAELGYRVSGKKAQLCQEEVTYLGFKIHKGSRSLSNSRTQAILQIPVPKTKRQVREFLGTIGYCRLWIPGFAELAQPLYAATRPGNDPLVWGEKEEEAFQSLKLALTQPPALALPSLDKPFQLFVEETSGAAKGVLTQALGPWKRPVAYLSKRLDPVAAGWPRCLRAIAAAALLTREASKLTFGQDIEITSSHNLESLLRSPPDKWLTNARITQYQVLLLDPPRVRFKQTAALNPATLLPETDDTLPIHHCLDTLDSLTSTRPDLTDQPLAQAEATLFTDGSSYIRDGKRYAGAAVVTLDSVIWAEPLPIGTSAQKAELIALTKALEWSKDKSVNIYTDSRYAFATLHVHGMIYRERGWLTAGGKAIKNAPEILALLTAVWLPKRVAVMHCKGHQKDDAPTSTGNRRADEVAREVAIRPLSTQATISAGKRTADGSEFEKRTADGSEFESPKKKAKVE

SEQ ID NO: 1161 - protein, 2098 aa, synthetic construct
MPAAKRVKLDGGDKKYSIGLDIGTNSVGWAVITDEYKVPSKKFKVLGNTDRHSIKKNLIGALLFDSGETAEATRLKRTARRRYTRRKNRICYLQEIFSNEMAKVDDSFFHRLEESFLVEEDKKHERHPIFGNIVDEVAYHEKYPTIYHLRKKLVDSTDKADLRLIYLALAHMIKFRGHFLIEGDLNPDNSDVDKLFIQLVQTYNQLFEENPINASGVDAKAILSARLSKSRRLENLIAQLPGEKKNGLFGNLIALSLGLTPNFKSNFDLAEDAKLQLSKDTYDDDLDNLLAQIGDQYADLFLAAKNLSDAILLSDILRVNTEITKAPLSASMIKRYDEHHQDLTLLKALVRQQLPEKYKEIFFDQSKNGYAGYIDGGASQEEFYKFIKPILEKMDGTEELLVKLNREDLLRKQRTFDNGSIPHQIHLGELHAILRRQEDFYPFLKDNREKIEKILTFRIPYYVGPLARGNSRFAWMTRKSEETITPWNFEEVVDKGASAQSFIERMTNFDKNLPNEKVLPKHSLLYEYFTVYNELTKVKYVTEGMRKPAFLSGEQKKAIVDLLFKTNRKVTVKQLKEDYFKKIECFDSVEISGVEDRFNASLGTYHDLLKIIKDKDFLDNEENEDILEDIVLTLTLFEDREMIEERLKTYAHLFDDKVMKQLKRRRYTGWGRLSRKLINGIRDKQSGKTILDFLKSDGFANRNFMQLIHDDSLTFKEDIQKAQVSGQGDSLHEHIANLAGSPAIKKGILQTVKVVDELVKVMGRHKPENIVIEMARENQTTQKGQKNSRERMKRIEEGIKELGSQILKEHPVENTQLQNEKLYLYYLQNGRDMYVDQELDINRLSDYDVDHIVPQSFLKDDSIDNKVLTRSDKARGKSDNVPSEEVVKKMKNYWRQLLNAKLITQRKFDNLTKAERGGLSELDKAGFIKRQLVETRQITKHVAQILDSRMNTKYDENDKLIREVKVITLKSKLVSDFRKDFQFYKVREINNYHHAHDAYLNAVVGTALIKKYPKLESEFVYGDYKVYDVRKMIAKSEQEIGKATAKYFFYSNIMNFFKTEITLANGEIRKRPLIETNGETGEIVWDKGRDFATVRKVLSMPQVNIVKKTEVQTGGFSKESILPKRNSDKLIARKKDWDPKKYGGFDSPTVAYSVLVVAKVEKGKSKKLKSVKELLGITIMERSSFEKNPIDFLEAKGYKEVKKDLIIKLPKYSLFELENGRKRMLASAGELQKGNELALPSKYVNFLYLASHYEKLKGSPEDNEQKQLFVEQHKHYLDEIIEQISEFSKRVILADANLDKVLSAYNKHRDKPIREQAENIIHLFTLTNLGAPAAFKYFDTTIDRKRYTSTKEVLDATLIHQSITGLYETRIDLSQLGGDGGPAPEAAAKGGSGGTAPLEEEYRLFLEAPIQNVTLLEQWKREIPKVWAEINPPGLASTQAPIHVQLLSTALPVRVRQYPITLEAKRSLRETIRKFRAAGILRPVHSPWNTPLLPVRKSGTSEYRMVQDLREVNKRVETIHPTVPNPYTLLSLLPPDRIWYSVLDLKDAFFCIPLAPESQLIFAFEWADAEEGESGQLTWTRLPQGFKNSPTLFNEALNRDLQGFRLDHPSVSLLQYVDDLLIAADTQAACLSATRDLLMTLAELGYRVSGKKAQLCQEEVTYLGFKIHKGSRSLSNSRTQAILQIPVPKTKRQVREFLGTIGYCRLWIPGFAELAQPLYAATRPGNDPLVWGEKEEEAFQSLKLALTQPPALALPSLDKPFQLFVEETSGAAKGVLTQALGPWKRPVAYLSKRLDPVAAGWPRCLRAIAAAALLTREASKLTFGQDIEITSSHNLESLLRSPPDKWLTNARITQYQVLLLDPPRVRFKQTAALNPATLLPETDDTLPIHHCLDTLDSLTSTRPDLTDQPLAQAEATLFTDGSSYIRDGKRYAGAAVVTLDSVIWAEPLPIGTSAQKAELIALTKALEWSKDKSVNIYTDSRYAFATLHVHGMIYRERGWLTAGGKAIKNAPEILALLTAVWLPKRVAVMHCKGHQKDDAPTSTGNRRADEVAREVAIRPLSTQATISAGKRTADGSEFEKRTADGSEFESPKKKAKVE

SEQ ID NO: 1162 - protein, 2098 aa, synthetic construct
MPAAKRVKLDGGDKKYSIGLDIGTNSVGWAVITDEYKVPSKKFKVLGNTDRHSIKKNLIGALLFDSGETAEATRLKRTARRRYTRRKNRICYLQEIFSNEMAKVDDSFFHRLEESFLVEEDKKHERHPIFGNIVDEVAYHEKYPTIYHLRKKLVDSTDKADLRLIYLALAHMIKFRGHFLIEGDLNPDNSDVDKLFIQLVQTYNQLFEENPINASGVDAKAILSARLSKSRRLENLIAQLPGEKKNGLFGNLIALSLGLTPNFKSNFDLAEDAKLQLSKDTYDDDLDNLLAQIGDQYADLFLAAKNLSDAILLSDILRVNTEITKAPLSASMIKRYDEHHQDLTLLKALVRQQLPEKYKEIFFDQSKNGYAGYIDGGASQEEFYKFIKPILEKMDGTEELLVKLNREDLLRKQRTFDNGSIPHQIHLGELHAILRRQEDFYPFLKDNREKIEKILTFRIPYYVGPLARGNSRFAWMTRKSEETITPWNFEEVVDKGASAQSFIERMTNFDKNLPNEKVLPKHSLLYEYFTVYNELTKVKYVTEGMRKPAFLSGEQKKAIVDLLFKTNRKVTVKQLKEDYFKKIECFDSVEISGVEDRFNASLGTYHDLLKIIKDKDFLDNEENEDILEDIVLTLTLFEDREMIEERLKTYAHLFDDKVMKQLKRRRYTGWGRLSRKLINGIRDKQSGKTILDFLKSDGFANRNFMQLIHDDSLTFKEDIQKAQVSGQGDSLHEHIANLAGSPAIKKGILQTVKVVDELVKVMGRHKPENIVIEMARENQTTQKGQKNSRERMKRIEEGIKELGSQILKEHPVENTQLQNEKLYLYYLQNGRDMYVDQELDINRLSDYDVDHIVPQSFLKDDSIDNKVLTRSDKARGKSDNVPSEEVVKKMKNYWRQLLNAKLITQRKFDNLTKAERGGLSELDKAGFIKRQLVETRQITKHVAQILDSRMNTKYDENDKLIREVKVITLKSKLVSDFRKDFQFYKVREINNYHHAHDAYLNAVVGTALIKKYPKLESEFVYGDYKVYDVRKMIAKSEQEIGKATAKYFFYSNIMNFFKTEITLANGEIRKRPLIETNGETGEIVWDKGRDFATVRKVLSMPQVNIVKKTEVQTGGFSKESILPKRNSDKLIARKKDWDPKKYGGFDSPTVAYSVLVVAKVEKGKSKKLKSVKELLGITIMERSSFEKNPIDFLEAKGYKEVKKDLIIKLPKYSLFELENGRKRMLASAGELQKGNELALPSKYVNFLYLASHYEKLKGSPEDNEQKQLFVEQHKHYLDEIIEQISEFSKRVILADANLDKVLSAYNKHRDKPIREQAENIIHLFTLTNLGAPAAFKYFDTTIDRKRYTSTKEVLDATLIHQSITGLYETRIDLSQLGGDGGGSSEAAAKGGGGGTAPLEEEYRLFLEAPIQNVTLLEQWKREIPKVWAEINPPGLASTQAPIHVQLLSTALPVRVRQYPITLEAKRSLRETIRKFRAAGILRPVHSPWNTPLLPVRKSGTSEYRMVQDLREVNKRVETIHPTVPNPYTLLSLLPPDRIWYSVLDLKDAFFCIPLAPESQLIFAFEWADAEEGESGQLTWTRLPQGFKNSPTLFNEALNRDLQGFRLDHPSVSLLQYVDDLLIAADTQAACLSATRDLLMTLAELGYRVSGKKAQLCQEEVTYLGFKIHKGSRSLSNSRTQAILQIPVPKTKRQVREFLGTIGYCRLWIPGFAELAQPLYAATRPGNDPLVWGEKEEEAFQSLKLALTQPPALALPSLDKPFQLFVEETSGAAKGVLTQALGPWKRPVAYLSKRLDPVAAGWPRCLRAIAAAALLTREASKLTFGQDIEITSSHNLESLLRSPPDKWLTNARITQYQVLLLDPPRVRFKQTAALNPATLLPETDDTLPIHHCLDTLDSLTSTRPDLTDQPLAQAEATLFTDGSSYIRDGKRYAGAAVVTLDSVIWAEPLPIGTSAQKAELIALTKALEWSKDKSVNIYTDSRYAFATLHVHGMIYRERGWLTAGGKAIKNAPEILALLTAVWLPKRVAVMHCKGHQKDDAPTSTGNRRADEVAREVAIRPLSTQATISAGKRTADGSEFEKRTADGSEFESPKKKAKVE

SEQ ID NO: 1163 - protein, 2096 aa, synthetic construct
MPAAKRVKLDGGDKKYSIGLDIGTNSVGWAVITDEYKVPSKKFKVLGNTDRHSIKKNLIGALLFDSGETAEATRLKRTARRRYTRRKNRICYLQEIFSNEMAKVDDSFFHRLEESFLVEEDKKHERHPIFGNIVDEVAYHEKYPTIYHLRKKLVDSTDKADLRLIYLALAHMIKFRGHFLIEGDLNPDNSDVDKLFIQLVQTYNQLFEENPINASGVDAKAILSARLSKSRRLENLIAQLPGEKKNGLFGNLIALSLGLTPNFKSNFDLAEDAKLQLSKDTYDDDLDNLLAQIGDQYADLFLAAKNLSDAILLSDILRVNTEITKAPLSASMIKRYDEHHQDLTLLKALVRQQLPEKYKEIFFDQSKNGYAGYIDGGASQEEFYKFIKPILEKMDGTEELLVKLNREDLLRKQRTFDNGSIPHQIHLGELHAILRRQEDFYPFLKDNREKIEKILTFRIPYYVGPLARGNSRFAWMTRKSEETITPWNFEEVVDKGASAQSFIERMTNFDKNLPNEKVLPKHSLLYEYFTVYNELTKVKYVTEGMRKPAFLSGEQKKAIVDLLFKTNRKVTVKQLKEDYFKKIECFDSVEISGVEDRFNASLGTYHDLLKIIKDKDFLDNEENEDILEDIVLTLTLFEDREMIEERLKTYAHLFDDKVMKQLKRRRYTGWGRLSRKLINGIRDKQSGKTILDFLKSDGFANRNFMQLIHDDSLTFKEDIQKAQVSGQGDSLHEHIANLAGSPAIKKGILQTVKVVDELVKVMGRHKPENIVIEMARENQTTQKGQKNSRERMKRIEEGIKELGSQILKEHPVENTQLQNEKLYLYYLQNGRDMYVDQELDINRLSDYDVDHIVPQSFLKDDSIDNKVLTRSDKARGKSDNVPSEEVVKKMKNYWRQLLNAKLITQRKFDNLTKAERGGLSELDKAGFIKRQLVETRQITKHVAQILDSRMNTKYDENDKLIREVKVITLKSKLVSDFRKDFQFYKVREINNYHHAHDAYLNAVVGTALIKKYPKLESEFVYGDYKVYDVRKMIAKSEQEIGKATAKYFFYSNIMNFFKTEITLANGEIRKRPLIETNGETGEIVWDKGRDFATVRKVLSMPQVNIVKKTEVQTGGFSKESILPKRNSDKLIARKKDWDPKKYGGFDSPTVAYSVLVVAKVEKGKSKKLKSVKELLGITIMERSSFEKNPIDFLEAKGYKEVKKDLIIKLPKYSLFELENGRKRMLASAGELQKGNELALPSKYVNFLYLASHYEKLKGSPEDNEQKQLFVEQHKHYLDEIIEQISEFSKRVILADANLDKVLSAYNKHRDKPIREQAENIIHLFTLTNLGAPAAFKYFDTTIDRKRYTSTKEVLDATLIHQSITGLYETRIDLSQLGGDGGGGGGGSPAPGGTAPLEEEYRLFLEAPIQNVTLLEQWKREIPKVWAEINPPGLASTQAPIHVQLLSTALPVRVRQYPITLEAKRSLRETIRKFRAAGILRPVHSPWNTPLLPVRKSGTSEYRMVQDLREVNKRVETIHPTVPNPYTLLSLLPPDRIWYSVLDLKDAFFCIPLAPESQLIFAFEWADAEEGESGQLTWTRLPQGFKNSPTLFNEALNRDLQGFRLDHPSVSLLQYVDDLLIAADTQAACLSATRDLLMTLAELGYRVSGKKAQLCQEEVTYLGFKIHKGSRSLSNSRTQAILQIPVPKTKRQVREFLGTIGYCRLWIPGFAELAQPLYAATRPGNDPLVWGEKEEEAFQSLKLALTQPPALALPSLDKPFQLFVEETSGAAKGVLTQALGPWKRPVAYLSKRLDPVAAGWPRCLRAIAAAALLTREASKLTFGQDIEITSSHNLESLLRSPPDKWLTNARITQYQVLLLDPPRVRFKQTAALNPATLLPETDDTLPIHHCLDTLDSLTSTRPDLTDQPLAQAEATLFTDGSSYIRDGKRYAGAAVVTLDSVIWAEPLPIGTSAQKAELIALTKALEWSKDKSVNIYTDSRYAFATLHVHGMIYRERGWLTAGGKAIKNAPEILALLTAVWLPKRVAVMHCKGHQKDDAPTSTGNRRADEVAREVAIRPLSTQATISAGKRTADGSEFEKRTADGSEFESPKKKAKVE

SEQ ID NO: 1164 - protein, 2098 aa, synthetic construct
MPAAKRVKLDGGDKKYSIGLDIGTNSVGWAVITDEYKVPSKKFKVLGNTDRHSIKKNLIGALLFDSGETAEATRLKRTARRRYTRRKNRICYLQEIFSNEMAKVDDSFFHRLEESFLVEEDKKHERHPIFGNIVDEVAYHEKYPTIYHLRKKLVDSTDKADLRLIYLALAHMIKFRGHFLIEGDLNPDNSDVDKLFIQLVQTYNQLFEENPINASGVDAKAILSARLSKSRRLENLIAQLPGEKKNGLFGNLIALSLGLTPNFKSNFDLAEDAKLQLSKDTYDDDLDNLLAQIGDQYADLFLAAKNLSDAILLSDILRVNTEITKAPLSASMIKRYDEHHQDLTLLKALVRQQLPEKYKEIFFDQSKNGYAGYIDGGASQEEFYKFIKPILEKMDGTEELLVKLNREDLLRKQRTFDNGSIPHQIHLGELHAILRRQEDFYPFLKDNREKIEKILTFRIPYYVGPLARGNSRFAWMTRKSEETITPWNFEEVVDKGASAQSFIERMTNFDKNLPNEKVLPKHSLLYEYFTVYNELTKVKYVTEGMRKPAFLSGEQKKAIVDLLFKTNRKVTVKQLKEDYFKKIECFDSVEISGVEDRFNASLGTYHDLLKIIKDKDFLDNEENEDILEDIVLTLTLFEDREMIEERLKTYAHLFDDKVMKQLKRRRYTGWGRLSRKLINGIRDKQSGKTILDFLKSDGFANRNFMQLIHDDSLTFKEDIQKAQVSGQGDSLHEHIANLAGSPAIKKGILQTVKVVDELVKVMGRHKPENIVIEMARENQTTQKGQKNSRERMKRIEEGIKELGSQILKEHPVENTQLQNEKLYLYYLQNGRDMYVDQELDINRLSDYDVDHIVPQSFLKDDSIDNKVLTRSDKARGKSDNVPSEEVVKKMKNYWRQLLNAKLITQRKFDNLTKAERGGLSELDKAGFIKRQLVETRQITKHVAQILDSRMNTKYDENDKLIREVKVITLKSKLVSDFRKDFQFYKVREINNYHHAHDAYLNAVVGTALIKKYPKLESEFVYGDYKVYDVRKMIAKSEQEIGKATAKYFFYSNIMNFFKTEITLANGEIRKRPLIETNGETGEIVWDKGRDFATVRKVLSMPQVNIVKKTEVQTGGFSKESILPKRNSDKLIARKKDWDPKKYGGFDSPTVAYSVLVVAKVEKGKSKKLKSVKELLGITIMERSSFEKNPIDFLEAKGYKEVKKDLIIKLPKYSLFELENGRKRMLASAGELQKGNELALPSKYVNFLYLASHYEKLKGSPEDNEQKQLFVEQHKHYLDEIIEQISEFSKRVILADANLDKVLSAYNKHRDKPIREQAENIIHLFTLTNLGAPAAFKYFDTTIDRKRYTSTKEVLDATLIHQSITGLYETRIDLSQLGGDGGGSSPAPEAAAKGGTAPLEEEYRLFLEAPIQNVTLLEQWKREIPKVWAEINPPGLASTQAPIHVQLLSTALPVRVRQYPITLEAKRSLRETIRKFRAAGILRPVHSPWNTPLLPVRKSGTSEYRMVQDLREVNKRVETIHPTVPNPYTLLSLLPPDRIWYSVLDLKDAFFCIPLAPESQLIFAFEWADAEEGESGQLTWTRLPQGFKNSPTLFNEALNRDLQGFRLDHPSVSLLQYVDDLLIAADTQAACLSATRDLLMTLAELGYRVSGKKAQLCQEEVTYLGFKIHKGSRSLSNSRTQAILQIPVPKTKRQVREFLGTIGYCRLWIPGFAELAQPLYAATRPGNDPLVWGEKEEEAFQSLKLALTQPPALALPSLDKPFQLFVEETSGAAKGVLTQALGPWKRPVAYLSKRLDPVAAGWPRCLRAIAAAALLTREASKLTFGQDIEITSSHNLESLLRSPPDKWLTNARITQYQVLLLDPPRVRFKQTAALNPATLLPETDDTLPIHHCLDTLDSLTSTRPDLTDQPLAQAEATLFTDGSSYIRDGKRYAGAAVVTLDSVIWAEPLPIGTSAQKAELIALTKALEWSKDKSVNIYTDSRYAFATLHVHGMIYRERGWLTAGGKAIKNAPEILALLTAVWLPKRVAVMHCKGHQKDDAPTSTGNRRADEVAREVAIRPLSTQATISAGKRTADGSEFEKRTADGSEFESPKKKAKVE

SEQ ID NO: 1165 - protein, 2096 aa, synthetic construct
MPAAKRVKLDGGDKKYSIGLDIGTNSVGWAVITDEYKVPSKKFKVLGNTDRHSIKKNLIGALLFDSGETAEATRLKRTARRRYTRRKNRICYLQEIFSNEMAKVDDSFFHRLEESFLVEEDKKHERHPIFGNIVDEVAYHEKYPTIYHLRKKLVDSTDKADLRLIYLALAHMIKFRGHFLIEGDLNPDNSDVDKLFIQLVQTYNQLFEENPINASGVDAKAILSARLSKSRRLENLIAQLPGEKKNGLFGNLIALSLGLTPNFKSNFDLAEDAKLQLSKDTYDDDLDNLLAQIGDQYADLFLAAKNLSDAILLSDILRVNTEITKAPLSASMIKRYDEHHQDLTLLKALVRQQLPEKYKEIFFDQSKNGYAGYIDGGASQEEFYKFIKPILEKMDGTEELLVKLNREDLLRKQRTFDNGSIPHQIHLGELHAILRRQEDFYPFLKDNREKIEKILTFRIPYYVGPLARGNSRFAWMTRKSEETITPWNFEEVVDKGASAQSFIERMTNFDKNLPNEKVLPKHSLLYEYFTVYNELTKVKYVTEGMRKPAFLSGEQKKAIVDLLFKTNRKVTVKQLKEDYFKKIECFDSVEISGVEDRFNASLGTYHDLLKIIKDKDFLDNEENEDILEDIVLTLTLFEDREMIEERLKTYAHLFDDKVMKQLKRRRYTGWGRLSRKLINGIRDKQSGKTILDFLKSDGFANRNFMQLIHDDSLTFKEDIQKAQVSGQGDSLHEHIANLAGSPAIKKGILQTVKVVDELVKVMGRHKPENIVIEMARENQTTQKGQKNSRERMKRIEEGIKELGSQILKEHPVENTQLQNEKLYLYYLQNGRDMYVDQELDINRLSDYDVDHIVPQSFLKDDSIDNKVLTRSDKARGKSDNVPSEEVVKKMKNYWRQLLNAKLITQRKFDNLTKAERGGLSELDKAGFIKRQLVETRQITKHVAQILDSRMNTKYDENDKLIREVKVITLKSKLVSDFRKDFQFYKVREINNYHHAHDAYLNAVVGTALIKKYPKLESEFVYGDYKVYDVRKMIAKSEQEIGKATAKYFFYSNIMNFFKTEITLANGEIRKRPLIETNGETGEIVWDKGRDFATVRKVLSMPQVNIVKKTEVQTGGFSKESILPKRNSDKLIARKKDWDPKKYGGFDSPTVAYSVLVVAKVEKGKSKKLKSVKELLGITIMERSSFEKNPIDFLEAKGYKEVKKDLIIKLPKYSLFELENGRKRMLASAGELQKGNELALPSKYVNFLYLASHYEKLKGSPEDNEQKQLFVEQHKHYLDEIIEQISEFSKRVILADANLDKVLSAYNKHRDKPIREQAENIIHLFTLTNLGAPAAFKYFDTTIDRKRYTSTKEVLDATLIHQSITGLYETRIDLSQLGGDGGGSSGGSPAPGGTAPLEEEYRLFLEAPIQNVTLLEQWKREIPKVWAEINPPGLASTQAPIHVQLLSTALPVRVRQYPITLEAKRSLRETIRKFRAAGILRPVHSPWNTPLLPVRKSGTSEYRMVQDLREVNKRVETIHPTVPNPYTLLSLLPPDRIWYSVLDLKDAFFCIPLAPESQLIFAFEWADAEEGESGQLTWTRLPQGFKNSPTLFNEALNRDLQGFRLDHPSVSLLQYVDDLLIAADTQAACLSATRDLLMTLAELGYRVSGKKAQLCQEEVTYLGFKIHKGSRSLSNSRTQAILQIPVPKTKRQVREFLGTIGYCRLWIPGFAELAQPLYAATRPGNDPLVWGEKEEEAFQSLKLALTQPPALALPSLDKPFQLFVEETSGAAKGVLTQALGPWKRPVAYLSKRLDPVAAGWPRCLRAIAAAALLTREASKLTFGQDIEITSSHNLESLLRSPPDKWLTNARITQYQVLLLDPPRVRFKQTAALNPATLLPETDDTLPIHHCLDTLDSLTSTRPDLTDQPLAQAEATLFTDGSSYIRDGKRYAGAAVVTLDSVIWAEPLPIGTSAQKAELIALTKALEWSKDKSVNIYTDSRYAFATLHVHGMIYRERGWLTAGGKAIKNAPEILALLTAVWLPKRVAVMHCKGHQKDDAPTSTGNRRADEVAREVAIRPLSTQATISAGKRTADGSEFEKRTADGSEFESPKKKAKVE

SEQ ID NO: 1166 - protein, 2093 aa, synthetic construct
MPAAKRVKLDGGDKKYSIGLDIGTNSVGWAVITDEYKVPSKKFKVLGNTDRHSIKKNLIGALLFDSGETAEATRLKRTARRRYTRRKNRICYLQEIFSNEMAKVDDSFFHRLEESFLVEEDKKHERHPIFGNIVDEVAYHEKYPTIYHLRKKLVDSTDKADLRLIYLALAHMIKFRGHFLIEGDLNPDNSDVDKLFIQLVQTYNQLFEENPINASGVDAKAILSARLSKSRRLENLIAQLPGEKKNGLFGNLIALSLGLTPNFKSNFDLAEDAKLQLSKDTYDDDLDNLLAQIGDQYADLFLAAKNLSDAILLSDILRVNTEITKAPLSASMIKRYDEHHQDLTLLKALVRQQLPEKYKEIFFDQSKNGYAGYIDGGASQEEFYKFIKPILEKMDGTEELLVKLNREDLLRKQRTFDNGSIPHQIHLGELHAILRRQEDFYPFLKDNREKIEKILTFRIPYYVGPLARGNSRFAWMTRKSEETITPWNFEEVVDKGASAQSFIERMTNFDKNLPNEKVLPKHSLLYEYFTVYNELTKVKYVTEGMRKPAFLSGEQKKAIVDLLFKTNRKVTVKQLKEDYFKKIECFDSVEISGVEDRFNASLGTYHDLLKIIKDKDFLDNEENEDILEDIVLTLTLFEDREMIEERLKTYAHLFDDKVMKQLKRRRYTGWGRLSRKLINGIRDKQSGKTILDFLKSDGFANRNFMQLIHDDSLTFKEDIQKAQVSGQGDSLHEHIANLAGSPAIKKGILQTVKVVDELVKVMGRHKPENIVIEMARENQTTQKGQKNSRERMKRIEEGIKELGSQILKEHPVENTQLQNEKLYLYYLQNGRDMYVDQELDINRLSDYDVDHIVPQSFLKDDSIDNKVLTRSDKARGKSDNVPSEEVVKKMKNYWRQLLNAKLITQRKFDNLTKAERGGLSELDKAGFIKRQLVETRQITKHVAQILDSRMNTKYDENDKLIREVKVITLKSKLVSDFRKDFQFYKVREINNYHHAHDAYLNAVVGTALIKKYPKLESEFVYGDYKVYDVRKMIAKSEQEIGKATAKYFFYSNIMNFFKTEITLANGEIRKRPLIETNGETGEIVWDKGRDFATVRKVLSMPQVNIVKKTEVQTGGFSKESILPKRNSDKLIARKKDWDPKKYGGFDSPTVAYSVLVVAKVEKGKSKKLKSVKELLGITIMERSSFEKNPIDFLEAKGYKEVKKDLIIKLPKYSLFELENGRKRMLASAGELQKGNELALPSKYVNFLYLASHYEKLKGSPEDNEQKQLFVEQHKHYLDEIIEQISEFSKRVILADANLDKVLSAYNKHRDKPIREQAENIIHLFTLTNLGAPAAFKYFDTTIDRKRYTSTKEVLDATLIHQSITGLYETRIDLSQLGGDGGGGSGSSGGTAPLEEEYRLFLEAPIQNVTLLEQWKREIPKVWAEINPPGLASTQAPIHVQLLSTALPVRVRQYPITLEAKRSLRETIRKFRAAGILRPVHSPWNTPLLPVRKSGTSEYRMVQDLREVNKRVETIHPTVPNPYTLLSLLPPDRIWYSVLDLKDAFFCIPLAPESQLIFAFEWADAEEGESGQLTWTRLPQGFKNSPTLFNEALNRDLQGFRLDHPSVSLLQYVDDLLIAADTQAACLSATRDLLMTLAELGYRVSGKKAQLCQEEVTYLGFKIHKGSRSLSNSRTQAILQIPVPKTKRQVREFLGTIGYCRLWIPGFAELAQPLYAATRPGNDPLVWGEKEEEAFQSLKLALTQPPALALPSLDKPFQLFVEETSGAAKGVLTQALGPWKRPVAYLSKRLDPVAAGWPRCLRAIAAAALLTREASKLTFGQDIEITSSHNLESLLRSPPDKWLTNARITQYQVLLLDPPRVRFKQTAALNPATLLPETDDTLPIHHCLDTLDSLTSTRPDLTDQPLAQAEATLFTDGSSYIRDGKRYAGAAVVTLDSVIWAEPLPIGTSAQKAELIALTKALEWSKDKSVNIYTDSRYAFATLHVHGMIYRERGWLTAGGKAIKNAPEILALLTAVWLPKRVAVMHCKGHQKDDAPTSTGNRRADEVAREVAIRPLSTQATISAGKRTADGSEFEKRTADGSEFESPKKKAKVE

SEQ ID NO: 1167 - protein, 2098 aa, synthetic construct
MPAAKRVKLDGGDKKYSIGLDIGTNSVGWAVITDEYKVPSKKFKVLGNTDRHSIKKNLIGALLFDSGETAEATRLKRTARRRYTRRKNRICYLQEIFSNEMAKVDDSFFHRLEESFLVEEDKKHERHPIFGNIVDEVAYHEKYPTIYHLRKKLVDSTDKADLRLIYLALAHMIKFRGHFLIEGDLNPDNSDVDKLFIQLVQTYNQLFEENPINASGVDAKAILSARLSKSRRLENLIAQLPGEKKNGLFGNLIALSLGLTPNFKSNFDLAEDAKLQLSKDTYDDDLDNLLAQIGDQYADLFLAAKNLSDAILLSDILRVNTEITKAPLSASMIKRYDEHHQDLTLLKALVRQQLPEKYKEIFFDQSKNGYAGYIDGGASQEEFYKFIKPILEKMDGTEELLVKLNREDLLRKQRTFDNGSIPHQIHLGELHAILRRQEDFYPFLKDNREKIEKILTFRIPYYVGPLARGNSRFAWMTRKSEETITPWNFEEVVDKGASAQSFIERMTNFDKNLPNEKVLPKHSLLYEYFTVYNELTKVKYVTEGMRKPAFLSGEQKKAIVDLLFKTNRKVTVKQLKEDYFKKIECFDSVEISGVEDRFNASLGTYHDLLKIIKDKDFLDNEENEDILEDIVLTLTLFEDREMIEERLKTYAHLFDDKVMKQLKRRRYTGWGRLSRKLINGIRDKQSGKTILDFLKSDGFANRNFMQLIHDDSLTFKEDIQKAQVSGQGDSLHEHIANLAGSPAIKKGILQTVKVVDELVKVMGRHKPENIVIEMARENQTTQKGQKNSRERMKRIEEGIKELGSQILKEHPVENTQLQNEKLYLYYLQNGRDMYVDQELDINRLSDYDVDHIVPQSFLKDDSIDNKVLTRSDKARGKSDNVPSEEVVKKMKNYWRQLLNAKLITQRKFDNLTKAERGGLSELDKAGFIKRQLVETRQITKHVAQILDSRMNTKYDENDKLIREVKVITLKSKLVSDFRKDFQFYKVREINNYHHAHDAYLNAVVGTALIKKYPKLESEFVYGDYKVYDVRKMIAKSEQEIGKATAKYFFYSNIMNFFKTEITLANGEIRKRPLIETNGETGEIVWDKGRDFATVRKVLSMPQVNIVKKTEVQTGGFSKESILPKRNSDKLIARKKDWDPKKYGGFDSPTVAYSVLVVAKVEKGKSKKLKSVKELLGITIMERSSFEKNPIDFLEAKGYKEVKKDLIIKLPKYSLFELENGRKRMLASAGELQKGNELALPSKYVNFLYLASHYEKLKGSPEDNEQKQLFVEQHKHYLDEIIEQISEFSKRVILADANLDKVLSAYNKHRDKPIREQAENIIHLFTLTNLGAPAAFKYFDTTIDRKRYTSTKEVLDATLIHQSITGLYETRIDLSQLGGDGGEAAAKPAPGGGGGTAPLEEEYRLFLEAPIQNVTLLEQWKREIPKVWAEINPPGLASTQAPIHVQLLSTALPVRVRQYPITLEAKRSLRETIRKFRAAGILRPVHSPWNTPLLPVRKSGTSEYRMVQDLREVNKRVETIHPTVPNPYTLLSLLPPDRIWYSVLDLKDAFFCIPLAPESQLIFAFEWADAEEGESGQLTWTRLPQGFKNSPTLFNEALNRDLQGFRLDHPSVSLLQYVDDLLIAADTQAACLSATRDLLMTLAELGYRVSGKKAQLCQEEVTYLGFKIHKGSRSLSNSRTQAILQIPVPKTKRQVREFLGTIGYCRLWIPGFAELAQPLYAATRPGNDPLVWGEKEEEAFQSLKLALTQPPALALPSLDKPFQLFVEETSGAAKGVLTQALGPWKRPVAYLSKRLDPVAAGWPRCLRAIAAAALLTREASKLTFGQDIEITSSHNLESLLRSPPDKWLTNARITQYQVLLLDPPRVRFKQTAALNPATLLPETDDTLPIHHCLDTLDSLTSTRPDLTDQPLAQAEATLFTDGSSYIRDGKRYAGAAVVTLDSVIWAEPLPIGTSAQKAELIALTKALEWSKDKSVNIYTDSRYAFATLHVHGMIYRERGWLTAGGKAIKNAPEILALLTAVWLPKRVAVMHCKGHQKDDAPTSTGNRRADEVAREVAIRPLSTQATISAGKRTADGSEFEKRTADGSEFESPKKKAKVE

SEQ ID NO: 1168 - protein, 2093 aa, synthetic construct
MPAAKRVKLDGGDKKYSIGLDIGTNSVGWAVITDEYKVPSKKFKVLGNTDRHSIKKNLIGALLFDSGETAEATRLKRTARRRYTRRKNRICYLQEIFSNEMAKVDDSFFHRLEESFLVEEDKKHERHPIFGNIVDEVAYHEKYPTIYHLRKKLVDSTDKADLRLIYLALAHMIKFRGHFLIEGDLNPDNSDVDKLFIQLVQTYNQLFEENPINASGVDAKAILSARLSKSRRLENLIAQLPGEKKNGLFGNLIALSLGLTPNFKSNFDLAEDAKLQLSKDTYDDDLDNLLAQIGDQYADLFLAAKNLSDAILLSDILRVNTEITKAPLSASMIKRYDEHHQDLTLLKALVRQQLPEKYKEIFFDQSKNGYAGYIDGGASQEEFYKFIKPILEKMDGTEELLVKLNREDLLRKQRTFDNGSIPHQIHLGELHAILRRQEDFYPFLKDNREKIEKILTFRIPYYVGPLARGNSRFAWMTRKSEETITPWNFEEVVDKGASAQSFIERMTNFDKNLPNEKVLPKHSLLYEYFTVYNELTKVKYVTEGMRKPAFLSGEQKKAIVDLLFKTNRKVTVKQLKEDYFKKIECFDSVEISGVEDRFNASLGTYHDLLKIIKDKDFLDNEENEDILEDIVLTLTLFEDREMIEERLKTYAHLFDDKVMKQLKRRRYTGWGRLSRKLINGIRDKQSGKTILDFLKSDGFANRNFMQLIHDDSLTFKEDIQKAQVSGQGDSLHEHIANLAGSPAIKKGILQTVKVVDELVKVMGRHKPENIVIEMARENQTTQKGQKNSRERMKRIEEGIKELGSQILKEHPVENTQLQNEKLYLYYLQNGRDMYVDQELDINRLSDYDVDHIVPQSFLKDDSIDNKVLTRSDKARGKSDNVPSEEVVKKMKNYWRQLLNAKLITQRKFDNLTKAERGGLSELDKAGFIKRQLVETRQITKHVAQILDSRMNTKYDENDKLIREVKVITLKSKLVSDFRKDFQFYKVREINNYHHAHDAYLNAVVGTALIKKYPKLESEFVYGDYKVYDVRKMIAKSEQEIGKATAKYFFYSNIMNFFKTEITLANGEIRKRPLIETNGETGEIVWDKGRDFATVRKVLSMPQVNIVKKTEVQTGGFSKESILPKRNSDKLIARKKDWDPKKYGGFDSPTVAYSVLVVAKVEKGKSKKLKSVKELLGITIMERSSFEKNPIDFLEAKGYKEVKKDLIIKLPKYSLFELENGRKRMLASAGELQKGNELALPSKYVNFLYLASHYEKLKGSPEDNEQKQLFVEQHKHYLDEIIEQISEFSKRVILADANLDKVLSAYNKHRDKPIREQAENIIHLFTLTNLGAPAAFKYFDTTIDRKRYTSTKEVLDATLIHQSITGLYETRIDLSQLGGDGGGGGGGSPAPGGTLQLEEEYRLFEPESTQKQEMDIWLKNFPQAWAETGGMGTAHCQAPVLIQLKATATPISIRQYPMPHEAYQGIKPHIRRMLDQGILKPCQSPWNTPLLPVKKPGTEDYRPVQDLREVNKRVEDIHPTVPNPYNLLSTLPPSHPWYTVLDLKDAFFCLRLHSESQLLFAFEWRDPEIGLSGQLTWTRLPQGFKNSPTLFNEALHSDLADFRVRYPALVLLQYVDDLLLAAATRTECLEGTKALLETLGNKGYRASAKKAQICLQEVTYLGYSLKDGQRWLTKARKEAILSIPVPKNSRQVREFLGTAGYCRLWIPGFAELAAPLYPLTRPGTLFQWGTEQQLAFEDIKKALLSSPALGLPDITKPFELFIDENSGFAKGVLVQKLGPWKRPVAYLSKKLDTVASGWPPCLRMVAAIAILVKDAGKLTLGQPLTILTSHPVEALVRQPPNKWLSNARMTHYQAMLLDAERVHFGPTVSLNPATLLPLPSGGNHHDCLQILAETHGTRPDLTDQPLPDADLTWYTDGSSFIRNGEREAGAAVTTESEVIWAAPLPPGTSAQRAELIALTQALKMAEGKKLTVYTDSRYAFATTHVHGEIYRRRGWLTSEGKEIKNKNEILALLEALFLPKRLSIIHCPGHQKGDSPQAKGNRLADDTAKKAATETHSSLTVLPAGKRTADGSEFEKRTADGSEFESPKKKAKVE

SEQ ID NO: 1169 - protein, 2117 aa, synthetic construct
MPAAKRVKLDGGDKKYSIGLDIGTNSVGWAVITDEYKVPSKKFKVLGNTDRHSIKKNLIGALLFDSGETAEATRLKRTARRRYTRRKNRICYLQEIFSNEMAKVDDSFFHRLEESFLVEEDKKHERHPIFGNIVDEVAYHEKYPTIYHLRKKLVDSTDKADLRLIYLALAHMIKFRGHFLIEGDLNPDNSDVDKLFIQLVQTYNQLFEENPINASGVDAKAILSARLSKSRRLENLIAQLPGEKKNGLFGNLIALSLGLTPNFKSNFDLAEDAKLQLSKDTYDDDLDNLLAQIGDQYADLFLAAKNLSDAILLSDILRVNTEITKAPLSASMIKRYDEHHQDLTLLKALVRQQLPEKYKEIFFDQSKNGYAGYIDGGASQEEFYKFIKPILEKMDGTEELLVKLNREDLLRKQRTFDNGSIPHQIHLGELHAILRRQEDFYPFLKDNREKIEKILTFRIPYYVGPLARGNSRFAWMTRKSEETITPWNFEEVVDKGASAQSFIERMTNFDKNLPNEKVLPKHSLLYEYFTVYNELTKVKYVTEGMRKPAFLSGEQKKAIVDLLFKTNRKVTVKQLKEDYFKKIECFDSVEISGVEDRFNASLGTYHDLLKIIKDKDFLDNEENEDILEDIVLTLTLFEDREMIEERLKTYAHLFDDKVMKQLKRRRYTGWGRLSRKLINGIRDKQSGKTILDFLKSDGFANRNFMQLIHDDSLTFKEDIQKAQVSGQGDSLHEHIANLAGSPAIKKGILQTVKVVDELVKVMGRHKPENIVIEMARENQTTQKGQKNSRERMKRIEEGIKELGSQILKEHPVENTQLQNEKLYLYYLQNGRDMYVDQELDINRLSDYDVDHIVPQSFLKDDSIDNKVLTRSDKARGKSDNVPSEEVVKKMKNYWRQLLNAKLITQRKFDNLTKAERGGLSELDKAGFIKRQLVETRQITKHVAQILDSRMNTKYDENDKLIREVKVITLKSKLVSDFRKDFQFYKVREINNYHHAHDAYLNAVVGTALIKKYPKLESEFVYGDYKVYDVRKMIAKSEQEIGKATAKYFFYSNIMNFFKTEITLANGEIRKRPLIETNGETGEIVWDKGRDFATVRKVLSMPQVNIVKKTEVQTGGFSKESILPKRNSDKLIARKKDWDPKKYGGFDSPTVAYSVLVVAKVEKGKSKKLKSVKELLGITIMERSSFEKNPIDFLEAKGYKEVKKDLIIKLPKYSLFELENGRKRMLASAGELQKGNELALPSKYVNFLYLASHYEKLKGSPEDNEQKQLFVEQHKHYLDEIIEQISEFSKRVILADANLDKVLSAYNKHRDKPIREQAENIIHLFTLTNLGAPAAFKYFDTTIDRKRYTSTKEVLDATLIHQSITGLYETRIDLSQLGGDGGSGGSSGGSSGSETPGTSESATPESSGGSSGGSSGGTLQLEEEYRLFEPESTQKQEMDIWLKNFPQAWAETGGMGTAHCQAPVLIQLKATATPISIRQYPMPHEAYQGIKPHIRRMLDQGILKPCQSPWNTPLLPVKKPGTEDYRPVQDLREVNKRVEDIHPTVPNPYNLLSTLPPSHPWYTVLDLKDAFFCLRLHSESQLLFAFEWRDPEIGLSGQLTWTRLPQGFKNSPTLFNEALHSDLADFRVRYPALVLLQYVDDLLLAAATRTECLEGTKALLETLGNKGYRASAKKAQICLQEVTYLGYSLKDGQRWLTKARKEAILSIPVPKNSRQVREFLGTAGYCRLWIPGFAELAAPLYPLTRPGTLFQWGTEQQLAFEDIKKALLSSPALGLPDITKPFELFIDENSGFAKGVLVQKLGPWKRPVAYLSKKLDTVASGWPPCLRMVAAIAILVKDAGKLTLGQPLTILTSHPVEALVRQPPNKWLSNARMTHYQAMLLDAERVHFGPTVSLNPATLLPLPSGGNHHDCLQILAETHGTRPDLTDQPLPDADLTWYTDGSSFIRNGEREAGAAVTTESEVIWAAPLPPGTSAQRAELIALTQALKMAEGKKLTVYTDSRYAFATTHVHGEIYRRRGWLTSEGKEIKNKNEILALLEALFLPKRLSIIHCPGHQKGDSPQAKGNRLADDTAKKAATETHSSLTVLPAGKRTADGSEFEKRTADGSEFESPKKKAKVE

SEQ ID NO: 1170 - protein, 2130 aa, synthetic construct
MPAAKRVKLDGGDKKYSIGLDIGTNSVGWAVITDEYKVPSKKFKVLGNTDRHSIKKNLIGALLFDSGETAEATRLKRTARRRYTRRKNRICYLQEIFSNEMAKVDDSFFHRLEESFLVEEDKKHERHPIFGNIVDEVAYHEKYPTIYHLRKKLVDSTDKADLRLIYLALAHMIKFRGHFLIEGDLNPDNSDVDKLFIQLVQTYNQLFEENPINASGVDAKAILSARLSKSRRLENLIAQLPGEKKNGLFGNLIALSLGLTPNFKSNFDLAEDAKLQLSKDTYDDDLDNLLAQIGDQYADLFLAAKNLSDAILLSDILRVNTEITKAPLSASMIKRYDEHHQDLTLLKALVRQQLPEKYKEIFFDQSKNGYAGYIDGGASQEEFYKFIKPILEKMDGTEELLVKLNREDLLRKQRTFDNGSIPHQIHLGELHAILRRQEDFYPFLKDNREKIEKILTFRIPYYVGPLARGNSRFAWMTRKSEETITPWNFEEVVDKGASAQSFIERMTNFDKNLPNEKVLPKHSLLYEYFTVYNELTKVKYVTEGMRKPAFLSGEQKKAIVDLLFKTNRKVTVKQLKEDYFKKIECFDSVEISGVEDRFNASLGTYHDLLKIIKDKDFLDNEENEDILEDIVLTLTLFEDREMIEERLKTYAHLFDDKVMKQLKRRRYTGWGRLSRKLINGIRDKQSGKTILDFLKSDGFANRNFMQLIHDDSLTFKEDIQKAQVSGQGDSLHEHIANLAGSPAIKKGILQTVKVVDELVKVMGRHKPENIVIEMARENQTTQKGQKNSRERMKRIEEGIKELGSQILKEHPVENTQLQNEKLYLYYLQNGRDMYVDQELDINRLSDYDVDHIVPQSFLKDDSIDNKVLTRSDKARGKSDNVPSEEVVKKMKNYWRQLLNAKLITQRKFDNLTKAERGGLSELDKAGFIKRQLVETRQITKHVAQILDSRMNTKYDENDKLIREVKVITLKSKLVSDFRKDFQFYKVREINNYHHAHDAYLNAVVGTALIKKYPKLESEFVYGDYKVYDVRKMIAKSEQEIGKATAKYFFYSNIMNFFKTEITLANGEIRKRPLIETNGETGEIVWDKGRDFATVRKVLSMPQVNIVKKTEVQTGGFSKESILPKRNSDKLIARKKDWDPKKYGGFDSPTVAYSVLVVAKVEKGKSKKLKSVKELLGITIMERSSFEKNPIDFLEAKGYKEVKKDLIIKLPKYSLFELENGRKRMLASAGELQKGNELALPSKYVNFLYLASHYEKLKGSPEDNEQKQLFVEQHKHYLDEIIEQISEFSKRVILADANLDKVLSAYNKHRDKPIREQAENIIHLFTLTNLGAPAAFKYFDTTIDRKRYTSTKEVLDATLIHQSITGLYETRIDLSQLGGDGGAEAAAKEAAAKEAAAKEAAAKALEAEAAAKEAAAKEAAAKEAAAKAGGTLQLEEEYRLFEPESTQKQEMDIWLKNFPQAWAETGGMGTAHCQAPVLIQLKATATPISIRQYPMPHEAYQGIKPHIRRMLDQGILKPCQSPWNTPLLPVKKPGTEDYRPVQDLREVNKRVEDIHPTVPNPYNLLSTLPPSHPWYTVLDLKDAFFCLRLHSESQLLFAFEWRDPEIGLSGQLTWTRLPQGFKNSPTLFNEALHSDLADFRVRYPALVLLQYVDDLLLAAATRTECLEGTKALLETLGNKGYRASAKKAQICLQEVTYLGYSLKDGQRWLTKARKEAILSIPVPKNSRQVREFLGTAGYCRLWIPGFAELAAPLYPLTRPGTLFQWGTEQQLAFEDIKKALLSSPALGLPDITKPFELFIDENSGFAKGVLVQKLGPWKRPVAYLSKKLDTVASGWPPCLRMVAAIAILVKDAGKLTLGQPLTILTSHPVEALVRQPPNKWLSNARMTHYQAMLLDAERVHFGPTVSLNPATLLPLPSGGNHHDCLQILAETHGTRPDLTDQPLPDADLTWYTDGSSFIRNGEREAGAAVTTESEVIWAAPLPPGTSAQRAELIALTQALKMAEGKKLTVYTDSRYAFATTHVHGEIYRRRGWLTSEGKEIKNKNEILALLEALFLPKRLSIIHCPGHQKGDSPQAKGNRLADDTAKKAATETHSSLTVLPAGKRTADGSEFEKRTADGSEFESPKKKAKVE

SEQ ID NO: 1171 - protein, 2114 aa, synthetic construct
MPAAKRVKLDGGDKKYSIGLDIGTNSVGWAVITDEYKVPSKKFKVLGNTDRHSIKKNLIGALLFDSGETAEATRLKRTARRRYTRRKNRICYLQEIFSNEMAKVDDSFFHRLEESFLVEEDKKHERHPIFGNIVDEVAYHEKYPTIYHLRKKLVDSTDKADLRLIYLALAHMIKFRGHFLIEGDLNPDNSDVDKLFIQLVQTYNQLFEENPINASGVDAKAILSARLSKSRRLENLIAQLPGEKKNGLFGNLIALSLGLTPNFKSNFDLAEDAKLQLSKDTYDDDLDNLLAQIGDQYADLFLAAKNLSDAILLSDILRVNTEITKAPLSASMIKRYDEHHQDLTLLKALVRQQLPEKYKEIFFDQSKNGYAGYIDGGASQEEFYKFIKPILEKMDGTEELLVKLNREDLLRKQRTFDNGSIPHQIHLGELHAILRRQEDFYPFLKDNREKIEKILTFRIPYYVGPLARGNSRFAWMTRKSEETITPWNFEEVVDKGASAQSFIERMTNFDKNLPNEKVLPKHSLLYEYFTVYNELTKVKYVTEGMRKPAFLSGEQKKAIVDLLFKTNRKVTVKQLKEDYFKKIECFDSVEISGVEDRFNASLGTYHDLLKIIKDKDFLDNEENEDILEDIVLTLTLFEDREMIEERLKTYAHLFDDKVMKQLKRRRYTGWGRLSRKLINGIRDKQSGKTILDFLKSDGFANRNFMQLIHDDSLTFKEDIQKAQVSGQGDSLHEHIANLAGSPAIKKGILQTVKVVDELVKVMGRHKPENIVIEMARENQTTQKGQKNSRERMKRIEEGIKELGSQILKEHPVENTQLQNEKLYLYYLQNGRDMYVDQELDINRLSDYDVDHIVPQSFLKDDSIDNKVLTRSDKARGKSDNVPSEEVVKKMKNYWRQLLNAKLITQRKFDNLTKAERGGLSELDKAGFIKRQLVETRQITKHVAQILDSRMNTKYDENDKLIREVKVITLKSKLVSDFRKDFQFYKVREINNYHHAHDAYLNAVVGTALIKKYPKLESEFVYGDYKVYDVRKMIAKSEQEIGKATAKYFFYSNIMNFFKTEITLANGEIRKRPLIETNGETGEIVWDKGRDFATVRKVLSMPQVNIVKKTEVQTGGFSKESILPKRNSDKLIARKKDWDPKKYGGFDSPTVAYSVLVVAKVEKGKSKKLKSVKELLGITIMERSSFEKNPIDFLEAKGYKEVKKDLIIKLPKYSLFELENGRKRMLASAGELQKGNELALPSKYVNFLYLASHYEKLKGSPEDNEQKQLFVEQHKHYLDEIIEQISEFSKRVILADANLDKVLSAYNKHRDKPIREQAENIIHLFTLTNLGAPAAFKYFDTTIDRKRYTSTKEVLDATLIHQSITGLYETRIDLSQLGGDGGEAAAKEAAAKEAAAKEAAAKEAAAKEAAAKGGTLQLEEEYRLFEPESTQKQEMDIWLKNFPQAWAETGGMGTAHCQAPVLIQLKATATPISIRQYPMPHEAYQGIKPHIRRMLDQGILKPCQSPWNTPLLPVKKPGTEDYRPVQDLREVNKRVEDIHPTVPNPYNLLSTLPPSHPWYTVLDLKDAFFCLRLHSESQLLFAFEWRDPEIGLSGQLTWTRLPQGFKNSPTLFNEALHSDLADFRVRYPALVLLQYVDDLLLAAATRTECLEGTKALLETLGNKGYRASAKKAQICLQEVTYLGYSLKDGQRWLTKARKEAILSIPVPKNSRQVREFLGTAGYCRLWIPGFAELAAPLYPLTRPGTLFQWGTEQQLAFEDIKKALLSSPALGLPDITKPFELFIDENSGFAKGVLVQKLGPWKRPVAYLSKKLDTVASGWPPCLRMVAAIAILVKDAGKLTLGQPLTILTSHPVEALVRQPPNKWLSNARMTHYQAMLLDAERVHFGPTVSLNPATLLPLPSGGNHHDCLQILAETHGTRPDLTDQPLPDADLTWYTDGSSFIRNGEREAGAAVTTESEVIWAAPLPPGTSAQRAELIALTQALKMAEGKKLTVYTDSRYAFATTHVHGEIYRRRGWLTSEGKEIKNKNEILALLEALFLPKRLSIIHCPGHQKGDSPQAKGNRLADDTAKKAATETHSSLTVLPAGKRTADGSEFEKRTADGSEFESPKKKAKVE

SEQ ID NO: 1172 - protein, 2092 aa, synthetic construct
MPAAKRVKLDGGDKKYSIGLDIGTNSVGWAVITDEYKVPSKKFKVLGNTDRHSIKKNLIGALLFDSGETAEATRLKRTARRRYTRRKNRICYLQEIFSNEMAKVDDSFFHRLEESFLVEEDKKHERHPIFGNIVDEVAYHEKYPTIYHLRKKLVDSTDKADLRLIYLALAHMIKFRGHFLIEGDLNPDNSDVDKLFIQLVQTYNQLFEENPINASGVDAKAILSARLSKSRRLENLIAQLPGEKKNGLFGNLIALSLGLTPNFKSNFDLAEDAKLQLSKDTYDDDLDNLLAQIGDQYADLFLAAKNLSDAILLSDILRVNTEITKAPLSASMIKRYDEHHQDLTLLKALVRQQLPEKYKEIFFDQSKNGYAGYIDGGASQEEFYKFIKPILEKMDGTEELLVKLNREDLLRKQRTFDNGSIPHQIHLGELHAILRRQEDFYPFLKDNREKIEKILTFRIPYYVGPLARGNSRFAWMTRKSEETITPWNFEEVVDKGASAQSFIERMTNFDKNLPNEKVLPKHSLLYEYFTVYNELTKVKYVTEGMRKPAFLSGEQKKAIVDLLFKTNRKVTVKQLKEDYFKKIECFDSVEISGVEDRFNASLGTYHDLLKIIKDKDFLDNEENEDILEDIVLTLTLFEDREMIEERLKTYAHLFDDKVMKQLKRRRYTGWGRLSRKLINGIRDKQSGKTILDFLKSDGFANRNFMQLIHDDSLTFKEDIQKAQVSGQGDSLHEHIANLAGSPAIKKGILQTVKVVDELVKVMGRHKPENIVIEMARENQTTQKGQKNSRERMKRIEEGIKELGSQILKEHPVENTQLQNEKLYLYYLQNGRDMYVDQELDINRLSDYDVDHIVPQSFLKDDSIDNKVLTRSDKARGKSDNVPSEEVVKKMKNYWRQLLNAKLITQRKFDNLTKAERGGLSELDKAGFIKRQLVETRQITKHVAQILDSRMNTKYDENDKLIREVKVITLKSKLVSDFRKDFQFYKVREINNYHHAHDAYLNAVVGTALIKKYPKLESEFVYGDYKVYDVRKMIAKSEQEIGKATAKYFFYSNIMNFFKTEITLANGEIRKRPLIETNGETGEIVWDKGRDFATVRKVLSMPQVNIVKKTEVQTGGFSKESILPKRNSDKLIARKKDWDPKKYGGFDSPTVAYSVLVVAKVEKGKSKKLKSVKELLGITIMERSSFEKNPIDFLEAKGYKEVKKDLIIKLPKYSLFELENGRKRMLASAGELQKGNELALPSKYVNFLYLASHYEKLKGSPEDNEQKQLFVEQHKHYLDEIIEQISEFSKRVILADANLDKVLSAYNKHRDKPIREQAENIIHLFTLTNLGAPAAFKYFDTTIDRKRYTSTKEVLDATLIHQSITGLYETRIDLSQLGGDGGEAAAKGGSGGTLQLEEEYRLFEPESTQKQEMDIWLKNFPQAWAETGGMGTAHCQAPVLIQLKATATPISIRQYPMPHEAYQGIKPHIRRMLDQGILKPCQSPWNTPLLPVKKPGTEDYRPVQDLREVNKRVEDIHPTVPNPYNLLSTLPPSHPWYTVLDLKDAFFCLRLHSESQLLFAFEWRDPEIGLSGQLTWTRLPQGFKNSPTLFNEALHSDLADFRVRYPALVLLQYVDDLLLAAATRTECLEGTKALLETLGNKGYRASAKKAQICLQEVTYLGYSLKDGQRWLTKARKEAILSIPVPKNSRQVREFLGTAGYCRLWIPGFAELAAPLYPLTRPGTLFQWGTEQQLAFEDIKKALLSSPALGLPDITKPFELFIDENSGFAKGVLVQKLGPWKRPVAYLSKKLDTVASGWPPCLRMVAAIAILVKDAGKLTLGQPLTILTSHPVEALVRQPPNKWLSNARMTHYQAMLLDAERVHFGPTVSLNPATLLPLPSGGNHHDCLQILAETHGTRPDLTDQPLPDADLTWYTDGSSFIRNGEREAGAAVTTESEVIWAAPLPPGTSAQRAELIALTQALKMAEGKKLTVYTDSRYAFATTHVHGEIYRRRGWLTSEGKEIKNKNEILALLEALFLPKRLSIIHCPGHQKGDSPQAKGNRLADDTAKKAATETHSSLTVLPAGKRTADGSEFEKRTADGSEFESPKKKAKVE

SEQ ID NO: 1173 - protein, 2095 aa, synthetic construct
MPAAKRVKLDGGDKKYSIGLDIGTNSVGWAVITDEYKVPSKKFKVLGNTDRHSIKKNLIGALLFDSGETAEATRLKRTARRRYTRRKNRICYLQEIFSNEMAKVDDSFFHRLEESFLVEEDKKHERHPIFGNIVDEVAYHEKYPTIYHLRKKLVDSTDKADLRLIYLALAHMIKFRGHFLIEGDLNPDNSDVDKLFIQLVQTYNQLFEENPINASGVDAKAILSARLSKSRRLENLIAQLPGEKKNGLFGNLIALSLGLTPNFKSNFDLAEDAKLQLSKDTYDDDLDNLLAQIGDQYADLFLAAKNLSDAILLSDILRVNTEITKAPLSASMIKRYDEHHQDLTLLKALVRQQLPEKYKEIFFDQSKNGYAGYIDGGASQEEFYKFIKPILEKMDGTEELLVKLNREDLLRKQRTFDNGSIPHQIHLGELHAILRRQEDFYPFLKDNREKIEKILTFRIPYYVGPLARGNSRFAWMTRKSEETITPWNFEEVVDKGASAQSFIERMTNFDKNLPNEKVLPKHSLLYEYFTVYNELTKVKYVTEGMRKPAFLSGEQKKAIVDLLFKTNRKVTVKQLKEDYFKKIECFDSVEISGVEDRFNASLGTYHDLLKIIKDKDFLDNEENEDILEDIVLTLTLFEDREMIEERLKTYAHLFDDKVMKQLKRRRYTGWGRLSRKLINGIRDKQSGKTILDFLKSDGFANRNFMQLIHDDSLTFKEDIQKAQVSGQGDSLHEHIANLAGSPAIKKGILQTVKVVDELVKVMGRHKPENIVIEMARENQTTQKGQKNSRERMKRIEEGIKELGSQILKEHPVENTQLQNEKLYLYYLQNGRDMYVDQELDINRLSDYDVDHIVPQSFLKDDSIDNKVLTRSDKARGKSDNVPSEEVVKKMKNYWRQLLNAKLITQRKFDNLTKAERGGLSELDKAGFIKRQLVETRQITKHVAQILDSRMNTKYDENDKLIREVKVITLKSKLVSDFRKDFQFYKVREINNYHHAHDAYLNAVVGTALIKKYPKLESEFVYGDYKVYDVRKMIAKSEQEIGKATAKYFFYSNIMNFFKTEITLANGEIRKRPLIETNGETGEIVWDKGRDFATVRKVLSMPQVNIVKKTEVQTGGFSKESILPKRNSDKLIARKKDWDPKKYGGFDSPTVAYSVLVVAKVEKGKSKKLKSVKELLGITIMERSSFEKNPIDFLEAKGYKEVKKDLIIKLPKYSLFELENGRKRMLASAGELQKGNELALPSKYVNFLYLASHYEKLKGSPEDNEQKQLFVEQHKHYLDEIIEQISEFSKRVILADANLDKVLSAYNKHRDKPIREQAENIIHLFTLTNLGAPAAFKYFDTTIDRKRYTSTKEVLDATLIHQSITGLYETRIDLSQLGGDGGPAPAPAPAPAPGGTLQLEEEYRLFEPESTQKQEMDIWLKNFPQAWAETGGMGTAHCQAPVLIQLKATATPISIRQYPMPHEAYQGIKPHIRRMLDQGILKPCQSPWNTPLLPVKKPGTEDYRPVQDLREVNKRVEDIHPTVPNPYNLLSTLPPSHPWYTVLDLKDAFFCLRLHSESQLLFAFEWRDPEIGLSGQLTWTRLPQGFKNSPTLFNEALHSDLADFRVRYPALVLLQYVDDLLLAAATRTECLEGTKALLETLGNKGYRASAKKAQICLQEVTYLGYSLKDGQRWLTKARKEAILSIPVPKNSRQVREFLGTAGYCRLWIPGFAELAAPLYPLTRPGTLFQWGTEQQLAFEDIKKALLSSPALGLPDITKPFELFIDENSGFAKGVLVQKLGPWKRPVAYLSKKLDTVASGWPPCLRMVAAIAILVKDAGKLTLGQPLTILTSHPVEALVRQPPNKWLSNARMTHYQAMLLDAERVHFGPTVSLNPATLLPLPSGGNHHDCLQILAETHGTRPDLTDQPLPDADLTWYTDGSSFIRNGEREAGAAVTTESEVIWAAPLPPGTSAQRAELIALTQALKMAEGKKLTVYTDSRYAFATTHVHGEIYRRRGWLTSEGKEIKNKNEILALLEALFLPKRLSIIHCPGHQKGDSPQAKGNRLADDTAKKAATETHSSLTVLPAGKRTADGSEFEKRTADGSEFESPKKKAKVE

SEQ ID NO: 1174 - protein, 2099 aa, synthetic construct
MPAAKRVKLDGGDKKYSIGLDIGTNSVGWAVITDEYKVPSKKFKVLGNTDRHSIKKNLIGALLFDSGETAEATRLKRTARRRYTRRKNRICYLQEIFSNEMAKVDDSFFHRLEESFLVEEDKKHERHPIFGNIVDEVAYHEKYPTIYHLRKKLVDSTDKADLRLIYLALAHMIKFRGHFLIEGDLNPDNSDVDKLFIQLVQTYNQLFEENPINASGVDAKAILSARLSKSRRLENLIAQLPGEKKNGLFGNLIALSLGLTPNFKSNFDLAEDAKLQLSKDTYDDDLDNLLAQIGDQYADLFLAAKNLSDAILLSDILRVNTEITKAPLSASMIKRYDEHHQDLTLLKALVRQQLPEKYKEIFFDQSKNGYAGYIDGGASQEEFYKFIKPILEKMDGTEELLVKLNREDLLRKQRTFDNGSIPHQIHLGELHAILRRQEDFYPFLKDNREKIEKILTFRIPYYVGPLARGNSRFAWMTRKSEETITPWNFEEVVDKGASAQSFIERMTNFDKNLPNEKVLPKHSLLYEYFTVYNELTKVKYVTEGMRKPAFLSGEQKKAIVDLLFKTNRKVTVKQLKEDYFKKIECFDSVEISGVEDRFNASLGTYHDLLKIIKDKDFLDNEENEDILEDIVLTLTLFEDREMIEERLKTYAHLFDDKVMKQLKRRRYTGWGRLSRKLINGIRDKQSGKTILDFLKSDGFANRNFMQLIHDDSLTFKEDIQKAQVSGQGDSLHEHIANLAGSPAIKKGILQTVKVVDELVKVMGRHKPENIVIEMARENQTTQKGQKNSRERMKRIEEGIKELGSQILKEHPVENTQLQNEKLYLYYLQNGRDMYVDQELDINRLSDYDVDHIVPQSFLKDDSIDNKVLTRSDKARGKSDNVPSEEVVKKMKNYWRQLLNAKLITQRKFDNLTKAERGGLSELDKAGFIKRQLVETRQITKHVAQILDSRMNTKYDENDKLIREVKVITLKSKLVSDFRKDFQFYKVREINNYHHAHDAYLNAVVGTALIKKYPKLESEFVYGDYKVYDVRKMIAKSEQEIGKATAKYFFYSNIMNFFKTEITLANGEIRKRPLIETNGETGEIVWDKGRDFATVRKVLSMPQVNIVKKTEVQTGGFSKESILPKRNSDKLIARKKDWDPKKYGGFDSPTVAYSVLVVAKVEKGKSKKLKSVKELLGITIMERSSFEKNPIDFLEAKGYKEVKKDLIIKLPKYSLFELENGRKRMLASAGELQKGNELALPSKYVNFLYLASHYEKLKGSPEDNEQKQLFVEQHKHYLDEIIEQISEFSKRVILADANLDKVLSAYNKHRDKPIREQAENIIHLFTLTNLGAPAAFKYFDTTIDRKRYTSTKEVLDATLIHQSITGLYETRIDLSQLGGDGGGGGGSGGGGSGGGGSGGTLQLEEEYRLFEPESTQKQEMDIWLKNFPQAWAETGGMGTAHCQAPVLIQLKATATPISIRQYPMPHEAYQGIKPHIRRMLDQGILKPCQSPWNTPLLPVKKPGTEDYRPVQDLREVNKRVEDIHPTVPNPYNLLSTLPPSHPWYTVLDLKDAFFCLRLHSESQLLFAFEWRDPEIGLSGQLTWTRLPQGFKNSPTLFNEALHSDLADFRVRYPALVLLQYVDDLLLAAATRTECLEGTKALLETLGNKGYRASAKKAQICLQEVTYLGYSLKDGQRWLTKARKEAILSIPVPKNSRQVREFLGTAGYCRLWIPGFAELAAPLYPLTRPGTLFQWGTEQQLAFEDIKKALLSSPALGLPDITKPFELFIDENSGFAKGVLVQKLGPWKRPVAYLSKKLDTVASGWPPCLRMVAAIAILVKDAGKLTLGQPLTILTSHPVEALVRQPPNKWLSNARMTHYQAMLLDAERVHFGPTVSLNPATLLPLPSGGNHHDCLQILAETHGTRPDLTDQPLPDADLTWYTDGSSFIRNGEREAGAAVTTESEVIWAAPLPPGTSAQRAELIALTQALKMAEGKKLTVYTDSRYAFATTHVHGEIYRRRGWLTSEGKEIKNKNEILALLEALFLPKRLSIIHCPGHQKGDSPQAKGNRLADDTAKKAATETHSSLTVLPAGKRTADGSEFEKRTADGSEFESPKKKAKVE

SEQ ID NO: 1175 - protein, 2109 aa, synthetic construct
MPAAKRVKLDGGDKKYSIGLDIGTNSVGWAVITDEYKVPSKKFKVLGNTDRHSIKKNLIGALLFDSGETAEATRLKRTARRRYTRRKNRICYLQEIFSNEMAKVDDSFFHRLEESFLVEEDKKHERHPIFGNIVDEVAYHEKYPTIYHLRKKLVDSTDKADLRLIYLALAHMIKFRGHFLIEGDLNPDNSDVDKLFIQLVQTYNQLFEENPINASGVDAKAILSARLSKSRRLENLIAQLPGEKKNGLFGNLIALSLGLTPNFKSNFDLAEDAKLQLSKDTYDDDLDNLLAQIGDQYADLFLAAKNLSDAILLSDILRVNTEITKAPLSASMIKRYDEHHQDLTLLKALVRQQLPEKYKEIFFDQSKNGYAGYIDGGASQEEFYKFIKPILEKMDGTEELLVKLNREDLLRKQRTFDNGSIPHQIHLGELHAILRRQEDFYPFLKDNREKIEKILTFRIPYYVGPLARGNSRFAWMTRKSEETITPWNFEEVVDKGASAQSFIERMTNFDKNLPNEKVLPKHSLLYEYFTVYNELTKVKYVTEGMRKPAFLSGEQKKAIVDLLFKTNRKVTVKQLKEDYFKKIECFDSVEISGVEDRFNASLGTYHDLLKIIKDKDFLDNEENEDILEDIVLTLTLFEDREMIEERLKTYAHLFDDKVMKQLKRRRYTGWGRLSRKLINGIRDKQSGKTILDFLKSDGFANRNFMQLIHDDSLTFKEDIQKAQVSGQGDSLHEHIANLAGSPAIKKGILQTVKVVDELVKVMGRHKPENIVIEMARENQTTQKGQKNSRERMKRIEEGIKELGSQILKEHPVENTQLQNEKLYLYYLQNGRDMYVDQELDINRLSDYDVDHIVPQSFLKDDSIDNKVLTRSDKARGKSDNVPSEEVVKKMKNYWRQLLNAKLITQRKFDNLTKAERGGLSELDKAGFIKRQLVETRQITKHVAQILDSRMNTKYDENDKLIREVKVITLKSKLVSDFRKDFQFYKVREINNYHHAHDAYLNAVVGTALIKKYPKLESEFVYGDYKVYDVRKMIAKSEQEIGKATAKYFFYSNIMNFFKTEITLANGEIRKRPLIETNGETGEIVWDKGRDFATVRKVLSMPQVNIVKKTEVQTGGFSKESILPKRNSDKLIARKKDWDPKKYGGFDSPTVAYSVLVVAKVEKGKSKKLKSVKELLGITIMERSSFEKNPIDFLEAKGYKEVKKDLIIKLPKYSLFELENGRKRMLASAGELQKGNELALPSKYVNFLYLASHYEKLKGSPEDNEQKQLFVEQHKHYLDEIIEQISEFSKRVILADANLDKVLSAYNKHRDKPIREQAENIIHLFTLTNLGAPAAFKYFDTTIDRKRYTSTKEVLDATLIHQSITGLYETRIDLSQLGGDGGEAAAKEAAAKEAAAKEAAAKEAAAKGGTLQLEEEYRLFEPESTQKQEMDIWLKNFPQAWAETGGMGTAHCQAPVLIQLKATATPISIRQYPMPHEAYQGIKPHIRRMLDQGILKPCQSPWNTPLLPVKKPGTEDYRPVQDLREVNKRVEDIHPTVPNPYNLLSTLPPSHPWYTVLDLKDAFFCLRLHSESQLLFAFEWRDPEIGLSGQLTWTRLPQGFKNSPTLFNEALHSDLADFRVRYPALVLLQYVDDLLLAAATRTECLEGTKALLETLGNKGYRASAKKAQICLQEVTYLGYSLKDGQRWLTKARKEAILSIPVPKNSRQVREFLGTAGYCRLWIPGFAELAAPLYPLTRPGTLFQWGTEQQLAFEDIKKALLSSPALGLPDITKPFELFIDENSGFAKGVLVQKLGPWKRPVAYLSKKLDTVASGWPPCLRMVAAIAILVKDAGKLTLGQPLTILTSHPVEALVRQPPNKWLSNARMTHYQAMLLDAERVHFGPTVSLNPATLLPLPSGGNHHDCLQILAETHGTRPDLTDQPLPDADLTWYTDGSSFIRNGEREAGAAVTTESEVIWAAPLPPGTSAQRAELIALTQALKMAEGKKLTVYTDSRYAFATTHVHGEIYRRRGWLTSEGKEIKNKNEILALLEALFLPKRLSIIHCPGHQKGDSPQAKGNRLADDTAKKAATETHSSLTVLPAGKRTADGSEFEKRTADGSEFESPKKKAKVE

SEQ ID NO: 1176 - protein, 2095 aa, synthetic construct
MPAAKRVKLDGGDKKYSIGLDIGTNSVGWAVITDEYKVPSKKFKVLGNTDRHSIKKNLIGALLFDSGETAEATRLKRTARRRYTRRKNRICYLQEIFSNEMAKVDDSFFHRLEESFLVEEDKKHERHPIFGNIVDEVAYHEKYPTIYHLRKKLVDSTDKADLRLIYLALAHMIKFRGHFLIEGDLNPDNSDVDKLFIQLVQTYNQLFEENPINASGVDAKAILSARLSKSRRLENLIAQLPGEKKNGLFGNLIALSLGLTPNFKSNFDLAEDAKLQLSKDTYDDDLDNLLAQIGDQYADLFLAAKNLSDAILLSDILRVNTEITKAPLSASMIKRYDEHHQDLTLLKALVRQQLPEKYKEIFFDQSKNGYAGYIDGGASQEEFYKFIKPILEKMDGTEELLVKLNREDLLRKQRTFDNGSIPHQIHLGELHAILRRQEDFYPFLKDNREKIEKILTFRIPYYVGPLARGNSRFAWMTRKSEETITPWNFEEVVDKGASAQSFIERMTNFDKNLPNEKVLPKHSLLYEYFTVYNELTKVKYVTEGMRKPAFLSGEQKKAIVDLLFKTNRKVTVKQLKEDYFKKIECFDSVEISGVEDRFNASLGTYHDLLKIIKDKDFLDNEENEDILEDIVLTLTLFEDREMIEERLKTYAHLFDDKVMKQLKRRRYTGWGRLSRKLINGIRDKQSGKTILDFLKSDGFANRNFMQLIHDDSLTFKEDIQKAQVSGQGDSLHEHIANLAGSPAIKKGILQTVKVVDELVKVMGRHKPENIVIEMARENQTTQKGQKNSRERMKRIEEGIKELGSQILKEHPVENTQLQNEKLYLYYLQNGRDMYVDQELDINRLSDYDVDHIVPQSFLKDDSIDNKVLTRSDKARGKSDNVPSEEVVKKMKNYWRQLLNAKLITQRKFDNLTKAERGGLSELDKAGFIKRQLVETRQITKHVAQILDSRMNTKYDENDKLIREVKVITLKSKLVSDFRKDFQFYKVREINNYHHAHDAYLNAVVGTALIKKYPKLESEFVYGDYKVYDVRKMIAKSEQEIGKATAKYFFYSNIMNFFKTEITLANGEIRKRPLIETNGETGEIVWDKGRDFATVRKVLSMPQVNIVKKTEVQTGGFSKESILPKRNSDKLIARKKDWDPKKYGGFDSPTVAYSVLVVAKVEKGKSKKLKSVKELLGITIMERSSFEKNPIDFLEAKGYKEVKKDLIIKLPKYSLFELENGRKRMLASAGELQKGNELALPSKYVNFLYLASHYEKLKGSPEDNEQKQLFVEQHKHYLDEIIEQISEFSKRVILADANLDKVLSAYNKHRDKPIREQAENIIHLFTLTNLGAPAAFKYFDTTIDRKRYTSTKEVLDATLIHQSITGLYETRIDLSQLGGDGGGGSPAPEAAAKGGTLQLEEEYRLFEPESTQKQEMDIWLKNFPQAWAETGGMGTAHCQAPVLIQLKATATPISIRQYPMPHEAYQGIKPHIRRMLDQGILKPCQSPWNTPLLPVKKPGTEDYRPVQDLREVNKRVEDIHPTVPNPYNLLSTLPPSHPWYTVLDLKDAFFCLRLHSESQLLFAFEWRDPEIGLSGQLTWTRLPQGFKNSPTLFNEALHSDLADFRVRYPALVLLQYVDDLLLAAATRTECLEGTKALLETLGNKGYRASAKKAQICLQEVTYLGYSLKDGQRWLTKARKEAILSIPVPKNSRQVREFLGTAGYCRLWIPGFAELAAPLYPLTRPGTLFQWGTEQQLAFEDIKKALLSSPALGLPDITKPFELFIDENSGFAKGVLVQKLGPWKRPVAYLSKKLDTVASGWPPCLRMVAAIAILVKDAGKLTLGQPLTILTSHPVEALVRQPPNKWLSNARMTHYQAMLLDAERVHFGPTVSLNPATLLPLPSGGNHHDCLQILAETHGTRPDLTDQPLPDADLTWYTDGSSFIRNGEREAGAAVTTESEVIWAAPLPPGTSAQRAELIALTQALKMAEGKKLTVYTDSRYAFATTHVHGEIYRRRGWLTSEGKEIKNKNEILALLEALFLPKRLSIIHCPGHQKGDSPQAKGNRLADDTAKKAATETHSSLTVLPAGKRTADGSEFEKRTADGSEFESPKKKAKVE

SEQ ID NO: 1177 - protein, 2102 aa, synthetic construct
MPAAKRVKLDGGDKKYSIGLDIGTNSVGWAVITDEYKVPSKKFKVLGNTDRHSIKKNLIGALLFDSGETAEATRLKRTARRRYTRRKNRICYLQEIFSNEMAKVDDSFFHRLEESFLVEEDKKHERHPIFGNIVDEVAYHEKYPTIYHLRKKLVDSTDKADLRLIYLALAHMIKFRGHFLIEGDLNPDNSDVDKLFIQLVQTYNQLFEENPINASGVDAKAILSARLSKSRRLENLIAQLPGEKKNGLFGNLIALSLGLTPNFKSNFDLAEDAKLQLSKDTYDDDLDNLLAQIGDQYADLFLAAKNLSDAILLSDILRVNTEITKAPLSASMIKRYDEHHQDLTLLKALVRQQLPEKYKEIFFDQSKNGYAGYIDGGASQEEFYKFIKPILEKMDGTEELLVKLNREDLLRKQRTFDNGSIPHQIHLGELHAILRRQEDFYPFLKDNREKIEKILTFRIPYYVGPLARGNSRFAWMTRKSEETITPWNFEEVVDKGASAQSFIERMTNFDKNLPNEKVLPKHSLLYEYFTVYNELTKVKYVTEGMRKPAFLSGEQKKAIVDLLFKTNRKVTVKQLKEDYFKKIECFDSVEISGVEDRFNASLGTYHDLLKIIKDKDFLDNEENEDILEDIVLTLTLFEDREMIEERLKTYAHLFDDKVMKQLKRRRYTGWGRLSRKLINGIRDKQSGKTILDFLKSDGFANRNFMQLIHDDSLTFKEDIQKAQVSGQGDSLHEHIANLAGSPAIKKGILQTVKVVDELVKVMGRHKPENIVIEMARENQTTQKGQKNSRERMKRIEEGIKELGSQILKEHPVENTQLQNEKLYLYYLQNGRDMYVDQELDINRLSDYDVDHIVPQSFLKDDSIDNKVLTRSDKARGKSDNVPSEEVVKKMKNYWRQLLNAKLITQRKFDNLTKAERGGLSELDKAGFIKRQLVETRQITKHVAQILDSRMNTKYDENDKLIREVKVITLKSKLVSDFRKDFQFYKVREINNYHHAHDAYLNAVVGTALIKKYPKLESEFVYGDYKVYDVRKMIAKSEQEIGKATAKYFFYSNIMNFFKTEITLANGEIRKRPLIETNGETGEIVWDKGRDFATVRKVLSMPQVNIVKKTEVQTGGFSKESILPKRNSDKLIARKKDWDPKKYGGFDSPTVAYSVLVVAKVEKGKSKKLKSVKELLGITIMERSSFEKNPIDFLEAKGYKEVKKDLIIKLPKYSLFELENGRKRMLASAGELQKGNELALPSKYVNFLYLASHYEKLKGSPEDNEQKQLFVEQHKHYLDEIIEQISEFSKRVILADANLDKVLSAYNKHRDKPIREQAENIIHLFTLTNLGAPAAFKYFDTTIDRKRYTSTKEVLDATLIHQSITGLYETRIDLSQLGGDGGGGSGGSGGSGGSGGSGGSGGTLQLEEEYRLFEPESTQKQEMDIWLKNFPQAWAETGGMGTAHCQAPVLIQLKATATPISIRQYPMPHEAYQGIKPHIRRMLDQGILKPCQSPWNTPLLPVKKPGTEDYRPVQDLREVNKRVEDIHPTVPNPYNLLSTLPPSHPWYTVLDLKDAFFCLRLHSESQLLFAFEWRDPEIGLSGQLTWTRLPQGFKNSPTLFNEALHSDLADFRVRYPALVLLQYVDDLLLAAATRTECLEGTKALLETLGNKGYRASAKKAQICLQEVTYLGYSLKDGQRWLTKARKEAILSIPVPKNSRQVREFLGTAGYCRLWIPGFAELAAPLYPLTRPGTLFQWGTEQQLAFEDIKKALLSSPALGLPDITKPFELFIDENSGFAKGVLVQKLGPWKRPVAYLSKKLDTVASGWPPCLRMVAAIAILVKDAGKLTLGQPLTILTSHPVEALVRQPPNKWLSNARMTHYQAMLLDAERVHFGPTVSLNPATLLPLPSGGNHHDCLQILAETHGTRPDLTDQPLPDADLTWYTDGSSFIRNGEREAGAAVTTESEVIWAAPLPPGTSAQRAELIALTQALKMAEGKKLTVYTDSRYAFATTHVHGEIYRRRGWLTSEGKEIKNKNEILALLEALFLPKRLSIIHCPGHQKGDSPQAKGNRLADDTAKKAATETHSSLTVLPAGKRTADGSEFEKRTADGSEFESPKKKAKVE

SEQ ID NO: 1178 - protein, 2095 aa, synthetic construct
MPAAKRVKLDGGDKKYSIGLDIGTNSVGWAVITDEYKVPSKKFKVLGNTDRHSIKKNLIGALLFDSGETAEATRLKRTARRRYTRRKNRICYLQEIFSNEMAKVDDSFFHRLEESFLVEEDKKHERHPIFGNIVDEVAYHEKYPTIYHLRKKLVDSTDKADLRLIYLALAHMIKFRGHFLIEGDLNPDNSDVDKLFIQLVQTYNQLFEENPINASGVDAKAILSARLSKSRRLENLIAQLPGEKKNGLFGNLIALSLGLTPNFKSNFDLAEDAKLQLSKDTYDDDLDNLLAQIGDQYADLFLAAKNLSDAILLSDILRVNTEITKAPLSASMIKRYDEHHQDLTLLKALVRQQLPEKYKEIFFDQSKNGYAGYIDGGASQEEFYKFIKPILEKMDGTEELLVKLNREDLLRKQRTFDNGSIPHQIHLGELHAILRRQEDFYPFLKDNREKIEKILTFRIPYYVGPLARGNSRFAWMTRKSEETITPWNFEEVVDKGASAQSFIERMTNFDKNLPNEKVLPKHSLLYEYFTVYNELTKVKYVTEGMRKPAFLSGEQKKAIVDLLFKTNRKVTVKQLKEDYFKKIECFDSVEISGVEDRFNASLGTYHDLLKIIKDKDFLDNEENEDILEDIVLTLTLFEDREMIEERLKTYAHLFDDKVMKQLKRRRYTGWGRLSRKLINGIRDKQSGKTILDFLKSDGFANRNFMQLIHDDSLTFKEDIQKAQVSGQGDSLHEHIANLAGSPAIKKGILQTVKVVDELVKVMGRHKPENIVIEMARENQTTQKGQKNSRERMKRIEEGIKELGSQILKEHPVENTQLQNEKLYLYYLQNGRDMYVDQELDINRLSDYDVDHIVPQSFLKDDSIDNKVLTRSDKARGKSDNVPSEEVVKKMKNYWRQLLNAKLITQRKFDNLTKAERGGLSELDKAGFIKRQLVETRQITKHVAQILDSRMNTKYDENDKLIREVKVITLKSKLVSDFRKDFQFYKVREINNYHHAHDAYLNAVVGTALIKKYPKLESEFVYGDYKVYDVRKMIAKSEQEIGKATAKYFFYSNIMNFFKTEITLANGEIRKRPLIETNGETGEIVWDKGRDFATVRKVLSMPQVNIVKKTEVQTGGFSKESILPKRNSDKLIARKKDWDPKKYGGFDSPTVAYSVLVVAKVEKGKSKKLKSVKELLGITIMERSSFEKNPIDFLEAKGYKEVKKDLIIKLPKYSLFELENGRKRMLASAGELQKGNELALPSKYVNFLYLASHYEKLKGSPEDNEQKQLFVEQHKHYLDEIIEQISEFSKRVILADANLDKVLSAYNKHRDKPIREQAENIIHLFTLTNLGAPAAFKYFDTTIDRKRYTSTKEVLDATLIHQSITGLYETRIDLSQLGGDGGEAAAKGGSGSSGGTLQLEEEYRLFEPESTQKQEMDIWLKNFPQAWAETGGMGTAHCQAPVLIQLKATATPISIRQYPMPHEAYQGIKPHIRRMLDQGILKPCQSPWNTPLLPVKKPGTEDYRPVQDLREVNKRVEDIHPTVPNPYNLLSTLPPSHPWYTVLDLKDAFFCLRLHSESQLLFAFEWRDPEIGLSGQLTWTRLPQGFKNSPTLFNEALHSDLADFRVRYPALVLLQYVDDLLLAAATRTECLEGTKALLETLGNKGYRASAKKAQICLQEVTYLGYSLKDGQRWLTKARKEAILSIPVPKNSRQVREFLGTAGYCRLWIPGFAELAAPLYPLTRPGTLFQWGTEQQLAFEDIKKALLSSPALGLPDITKPFELFIDENSGFAKGVLVQKLGPWKRPVAYLSKKLDTVASGWPPCLRMVAAIAILVKDAGKLTLGQPLTILTSHPVEALVRQPPNKWLSNARMTHYQAMLLDAERVHFGPTVSLNPATLLPLPSGGNHHDCLQILAETHGTRPDLTDQPLPDADLTWYTDGSSFIRNGEREAGAAVTTESEVIWAAPLPPGTSAQRAELIALTQALKMAEGKKLTVYTDSRYAFATTHVHGEIYRRRGWLTSEGKEIKNKNEILALLEALFLPKRLSIIHCPGHQKGDSPQAKGNRLADDTAKKAATETHSSLTVLPAGKRTADGSEFEKRTADGSEFESPKKKAKVE

SEQ ID NO: 1179 - protein, 2095 aa, synthetic construct
MPAAKRVKLDGGDKKYSIGLDIGTNSVGWAVITDEYKVPSKKFKVLGNTDRHSIKKNLIGALLFDSGETAEATRLKRTARRRYTRRKNRICYLQEIFSNEMAKVDDSFFHRLEESFLVEEDKKHERHPIFGNIVDEVAYHEKYPTIYHLRKKLVDSTDKADLRLIYLALAHMIKFRGHFLIEGDLNPDNSDVDKLFIQLVQTYNQLFEENPINASGVDAKAILSARLSKSRRLENLIAQLPGEKKNGLFGNLIALSLGLTPNFKSNFDLAEDAKLQLSKDTYDDDLDNLLAQIGDQYADLFLAAKNLSDAILLSDILRVNTEITKAPLSASMIKRYDEHHQDLTLLKALVRQQLPEKYKEIFFDQSKNGYAGYIDGGASQEEFYKFIKPILEKMDGTEELLVKLNREDLLRKQRTFDNGSIPHQIHLGELHAILRRQEDFYPFLKDNREKIEKILTFRIPYYVGPLARGNSRFAWMTRKSEETITPWNFEEVVDKGASAQSFIERMTNFDKNLPNEKVLPKHSLLYEYFTVYNELTKVKYVTEGMRKPAFLSGEQKKAIVDLLFKTNRKVTVKQLKEDYFKKIECFDSVEISGVEDRFNASLGTYHDLLKIIKDKDFLDNEENEDILEDIVLTLTLFEDREMIEERLKTYAHLFDDKVMKQLKRRRYTGWGRLSRKLINGIRDKQSGKTILDFLKSDGFANRNFMQLIHDDSLTFKEDIQKAQVSGQGDSLHEHIANLAGSPAIKKGILQTVKVVDELVKVMGRHKPENIVIEMARENQTTQKGQKNSRERMKRIEEGIKELGSQILKEHPVENTQLQNEKLYLYYLQNGRDMYVDQELDINRLSDYDVDHIVPQSFLKDDSIDNKVLTRSDKARGKSDNVPSEEVVKKMKNYWRQLLNAKLITQRKFDNLTKAERGGLSELDKAGFIKRQLVETRQITKHVAQILDSRMNTKYDENDKLIREVKVITLKSKLVSDFRKDFQFYKVREINNYHHAHDAYLNAVVGTALIKKYPKLESEFVYGDYKVYDVRKMIAKSEQEIGKATAKYFFYSNIMNFFKTEITLANGEIRKRPLIETNGETGEIVWDKGRDFATVRKVLSMPQVNIVKKTEVQTGGFSKESILPKRNSDKLIARKKDWDPKKYGGFDSPTVAYSVLVVAKVEKGKSKKLKSVKELLGITIMERSSFEKNPIDFLEAKGYKEVKKDLIIKLPKYSLFELENGRKRMLASAGELQKGNELALPSKYVNFLYLASHYEKLKGSPEDNEQKQLFVEQHKHYLDEIIEQISEFSKRVILADANLDKVLSAYNKHRDKPIREQAENIIHLFTLTNLGAPAAFKYFDTTIDRKRYTSTKEVLDATLIHQSITGLYETRIDLSQLGGDGGGGGEAAAKPAPGGTLQLEEEYRLFEPESTQKQEMDIWLKNFPQAWAETGGMGTAHCQAPVLIQLKATATPISIRQYPMPHEAYQGIKPHIRRMLDQGILKPCQSPWNTPLLPVKKPGTEDYRPVQDLREVNKRVEDIHPTVPNPYNLLSTLPPSHPWYTVLDLKDAFFCLRLHSESQLLFAFEWRDPEIGLSGQLTWTRLPQGFKNSPTLFNEALHSDLADFRVRYPALVLLQYVDDLLLAAATRTECLEGTKALLETLGNKGYRASAKKAQICLQEVTYLGYSLKDGQRWLTKARKEAILSIPVPKNSRQVREFLGTAGYCRLWIPGFAELAAPLYPLTRPGTLFQWGTEQQLAFEDIKKALLSSPALGLPDITKPFELFIDENSGFAKGVLVQKLGPWKRPVAYLSKKLDTVASGWPPCLRMVAAIAILVKDAGKLTLGQPLTILTSHPVEALVRQPPNKWLSNARMTHYQAMLLDAERVHFGPTVSLNPATLLPLPSGGNHHDCLQILAETHGTRPDLTDQPLPDADLTWYTDGSSFIRNGEREAGAAVTTESEVIWAAPLPPGTSAQRAELIALTQALKMAEGKKLTVYTDSRYAFATTHVHGEIYRRRGWLTSEGKEIKNKNEILALLEALFLPKRLSIIHCPGHQKGDSPQAKGNRLADDTAKKAATETHSSLTVLPAGKRTADGSEFEKRTADGSEFESPKKKAKVE

SEQ ID NO: 1180 - protein, 2094 aa, synthetic construct
MPAAKRVKLDGGDKKYSIGLDIGTNSVGWAVITDEYKVPSKKFKVLGNTDRHSIKKNLIGALLFDSGETAEATRLKRTARRRYTRRKNRICYLQEIFSNEMAKVDDSFFHRLEESFLVEEDKKHERHPIFGNIVDEVAYHEKYPTIYHLRKKLVDSTDKADLRLIYLALAHMIKFRGHFLIEGDLNPDNSDVDKLFIQLVQTYNQLFEENPINASGVDAKAILSARLSKSRRLENLIAQLPGEKKNGLFGNLIALSLGLTPNFKSNFDLAEDAKLQLSKDTYDDDLDNLLAQIGDQYADLFLAAKNLSDAILLSDILRVNTEITKAPLSASMIKRYDEHHQDLTLLKALVRQQLPEKYKEIFFDQSKNGYAGYIDGGASQEEFYKFIKPILEKMDGTEELLVKLNREDLLRKQRTFDNGSIPHQIHLGELHAILRRQEDFYPFLKDNREKIEKILTFRIPYYVGPLARGNSRFAWMTRKSEETITPWNFEEVVDKGASAQSFIERMTNFDKNLPNEKVLPKHSLLYEYFTVYNELTKVKYVTEGMRKPAFLSGEQKKAIVDLLFKTNRKVTVKQLKEDYFKKIECFDSVEISGVEDRFNASLGTYHDLLKIIKDKDFLDNEENEDILEDIVLTLTLFEDREMIEERLKTYAHLFDDKVMKQLKRRRYTGWGRLSRKLINGIRDKQSGKTILDFLKSDGFANRNFMQLIHDDSLTFKEDIQKAQVSGQGDSLHEHIANLAGSPAIKKGILQTVKVVDELVKVMGRHKPENIVIEMARENQTTQKGQKNSRERMKRIEEGIKELGSQILKEHPVENTQLQNEKLYLYYLQNGRDMYVDQELDINRLSDYDVDHIVPQSFLKDDSIDNKVLTRSDKARGKSDNVPSEEVVKKMKNYWRQLLNAKLITQRKFDNLTKAERGGLSELDKAGFIKRQLVETRQITKHVAQILDSRMNTKYDENDKLIREVKVITLKSKLVSDFRKDFQFYKVREINNYHHAHDAYLNAVVGTALIKKYPKLESEFVYGDYKVYDVRKMIAKSEQEIGKATAKYFFYSNIMNFFKTEITLANGEIRKRPLIETNGETGEIVWDKGRDFATVRKVLSMPQVNIVKKTEVQTGGFSKESILPKRNSDKLIARKKDWDPKKYGGFDSPTVAYSVLVVAKVEKGKSKKLKSVKELLGITIMERSSFEKNPIDFLEAKGYKEVKKDLIIKLPKYSLFELENGRKRMLASAGELQKGNELALPSKYVNFLYLASHYEKLKGSPEDNEQKQLFVEQHKHYLDEIIEQISEFSKRVILADANLDKVLSAYNKHRDKPIREQAENIIHLFTLTNLGAPAAFKYFDTTIDRKRYTSTKEVLDATLIHQSITGLYETRIDLSQLGGDGGGGGGSGGGGSGGTLQLEEEYRLFEPESTQKQEMDIWLKNFPQAWAETGGMGTAHCQAPVLIQLKATATPISIRQYPMPHEAYQGIKPHIRRMLDQGILKPCQSPWNTPLLPVKKPGTEDYRPVQDLREVNKRVEDIHPTVPNPYNLLSTLPPSHPWYTVLDLKDAFFCLRLHSESQLLFAFEWRDPEIGLSGQLTWTRLPQGFKNSPTLFNEALHSDLADFRVRYPALVLLQYVDDLLLAAATRTECLEGTKALLETLGNKGYRASAKKAQICLQEVTYLGYSLKDGQRWLTKARKEAILSIPVPKNSRQVREFLGTAGYCRLWIPGFAELAAPLYPLTRPGTLFQWGTEQQLAFEDIKKALLSSPALGLPDITKPFELFIDENSGFAKGVLVQKLGPWKRPVAYLSKKLDTVASGWPPCLRMVAAIAILVKDAGKLTLGQPLTILTSHPVEALVRQPPNKWLSNARMTHYQAMLLDAERVHFGPTVSLNPATLLPLPSGGNHHDCLQILAETHGTRPDLTDQPLPDADLTWYTDGSSFIRNGEREAGAAVTTESEVIWAAPLPPGTSAQRAELIALTQALKMAEGKKLTVYTDSRYAFATTHVHGEIYRRRGWLTSEGKEIKNKNEILALLEALFLPKRLSIIHCPGHQKGDSPQAKGNRLADDTAKKAATETHSSLTVLPAGKRTADGSEFEKRTADGSEFESPKKKAKVE

SEQ ID NO: 1181 - protein, 2091 aa, synthetic construct
MPAAKRVKLDGGDKKYSIGLDIGTNSVGWAVITDEYKVPSKKFKVLGNTDRHSIKKNLIGALLFDSGETAEATRLKRTARRRYTRRKNRICYLQEIFSNEMAKVDDSFFHRLEESFLVEEDKKHERHPIFGNIVDEVAYHEKYPTIYHLRKKLVDSTDKADLRLIYLALAHMIKFRGHFLIEGDLNPDNSDVDKLFIQLVQTYNQLFEENPINASGVDAKAILSARLSKSRRLENLIAQLPGEKKNGLFGNLIALSLGLTPNFKSNFDLAEDAKLQLSKDTYDDDLDNLLAQIGDQYADLFLAAKNLSDAILLSDILRVNTEITKAPLSASMIKRYDEHHQDLTLLKALVRQQLPEKYKEIFFDQSKNGYAGYIDGGASQEEFYKFIKPILEKMDGTEELLVKLNREDLLRKQRTFDNGSIPHQIHLGELHAILRRQEDFYPFLKDNREKIEKILTFRIPYYVGPLARGNSRFAWMTRKSEETITPWNFEEVVDKGASAQSFIERMTNFDKNLPNEKVLPKHSLLYEYFTVYNELTKVKYVTEGMRKPAFLSGEQKKAIVDLLFKTNRKVTVKQLKEDYFKKIECFDSVEISGVEDRFNASLGTYHDLLKIIKDKDFLDNEENEDILEDIVLTLTLFEDREMIEERLKTYAHLFDDKVMKQLKRRRYTGWGRLSRKLINGIRDKQSGKTILDFLKSDGFANRNFMQLIHDDSLTFKEDIQKAQVSGQGDSLHEHIANLAGSPAIKKGILQTVKVVDELVKVMGRHKPENIVIEMARENQTTQKGQKNSRERMKRIEEGIKELGSQILKEHPVENTQLQNEKLYLYYLQNGRDMYVDQELDINRLSDYDVDHIVPQSFLKDDSIDNKVLTRSDKARGKSDNVPSEEVVKKMKNYWRQLLNAKLITQRKFDNLTKAERGGLSELDKAGFIKRQLVETRQITKHVAQILDSRMNTKYDENDKLIREVKVITLKSKLVSDFRKDFQFYKVREINNYHHAHDAYLNAVVGTALIKKYPKLESEFVYGDYKVYDVRKMIAKSEQEIGKATAKYFFYSNIMNFFKTEITLANGEIRKRPLIETNGETGEIVWDKGRDFATVRKVLSMPQVNIVKKTEVQTGGFSKESILPKRNSDKLIARKKDWDPKKYGGFDSPTVAYSVLVVAKVEKGKSKKLKSVKELLGITIMERSSFEKNPIDFLEAKGYKEVKKDLIIKLPKYSLFELENGRKRMLASAGELQKGNELALPSKYVNFLYLASHYEKLKGSPEDNEQKQLFVEQHKHYLDEIIEQISEFSKRVILADANLDKVLSAYNKHRDKPIREQAENIIHLFTLTNLGAPAAFKYFDTTIDRKRYTSTKEVLDATLIHQSITGLYETRIDLSQLGGDGGGGGGGGGGGTLQLEEEYRLFEPESTQKQEMDIWLKNFPQAWAETGGMGTAHCQAPVLIQLKATATPISIRQYPMPHEAYQGIKPHIRRMLDQGILKPCQSPWNTPLLPVKKPGTEDYRPVQDLREVNKRVEDIHPTVPNPYNLLSTLPPSHPWYTVLDLKDAFFCLRLHSESQLLFAFEWRDPEIGLSGQLTWTRLPQGFKNSPTLFNEALHSDLADFRVRYPALVLLQYVDDLLLAAATRTECLEGTKALLETLGNKGYRASAKKAQICLQEVTYLGYSLKDGQRWLTKARKEAILSIPVPKNSRQVREFLGTAGYCRLWIPGFAELAAPLYPLTRPGTLFQWGTEQQLAFEDIKKALLSSPALGLPDITKPFELFIDENSGFAKGVLVQKLGPWKRPVAYLSKKLDTVASGWPPCLRMVAAIAILVKDAGKLTLGQPLTILTSHPVEALVRQPPNKWLSNARMTHYQAMLLDAERVHFGPTVSLNPATLLPLPSGGNHHDCLQILAETHGTRPDLTDQPLPDADLTWYTDGSSFIRNGEREAGAAVTTESEVIWAAPLPPGTSAQRAELIALTQALKMAEGKKLTVYTDSRYAFATTHVHGEIYRRRGWLTSEGKEIKNKNEILALLEALFLPKRLSIIHCPGHQKGDSPQAKGNRLADDTAKKAATETHSSLTVLPAGKRTADGSEFEKRTADGSEFESPKKKAKVE

SEQ ID NO: 1182 - protein, 2093 aa, synthetic construct
MPAAKRVKLDGGDKKYSIGLDIGTNSVGWAVITDEYKVPSKKFKVLGNTDRHSIKKNLIGALLFDSGETAEATRLKRTARRRYTRRKNRICYLQEIFSNEMAKVDDSFFHRLEESFLVEEDKKHERHPIFGNIVDEVAYHEKYPTIYHLRKKLVDSTDKADLRLIYLALAHMIKFRGHFLIEGDLNPDNSDVDKLFIQLVQTYNQLFEENPINASGVDAKAILSARLSKSRRLENLIAQLPGEKKNGLFGNLIALSLGLTPNFKSNFDLAEDAKLQLSKDTYDDDLDNLLAQIGDQYADLFLAAKNLSDAILLSDILRVNTEITKAPLSASMIKRYDEHHQDLTLLKALVRQQLPEKYKEIFFDQSKNGYAGYIDGGASQEEFYKFIKPILEKMDGTEELLVKLNREDLLRKQRTFDNGSIPHQIHLGELHAILRRQEDFYPFLKDNREKIEKILTFRIPYYVGPLARGNSRFAWMTRKSEETITPWNFEEVVDKGASAQSFIERMTNFDKNLPNEKVLPKHSLLYEYFTVYNELTKVKYVTEGMRKPAFLSGEQKKAIVDLLFKTNRKVTVKQLKEDYFKKIECFDSVEISGVEDRFNASLGTYHDLLKIIKDKDFLDNEENEDILEDIVLTLTLFEDREMIEERLKTYAHLFDDKVMKQLKRRRYTGWGRLSRKLINGIRDKQSGKTILDFLKSDGFANRNFMQLIHDDSLTFKEDIQKAQVSGQGDSLHEHIANLAGSPAIKKGILQTVKVVDELVKVMGRHKPENIVIEMARENQTTQKGQKNSRERMKRIEEGIKELGSQILKEHPVENTQLQNEKLYLYYLQNGRDMYVDQELDINRLSDYDVDHIVPQSFLKDDSIDNKVLTRSDKARGKSDNVPSEEVVKKMKNYWRQLLNAKLITQRKFDNLTKAERGGLSELDKAGFIKRQLVETRQITKHVAQILDSRMNTKYDENDKLIREVKVITLKSKLVSDFRKDFQFYKVREINNYHHAHDAYLNAVVGTALIKKYPKLESEFVYGDYKVYDVRKMIAKSEQEIGKATAKYFFYSNIMNFFKTEITLANGEIRKRPLIETNGETGEIVWDKGRDFATVRKVLSMPQVNIVKKTEVQTGGFSKESILPKRNSDKLIARKKDWDPKKYGGFDSPTVAYSVLVVAKVEKGKSKKLKSVKELLGITIMERSSFEKNPIDFLEAKGYKEVKKDLIIKLPKYSLFELENGRKRMLASAGELQKGNELALPSKYVNFLYLASHYEKLKGSPEDNEQKQLFVEQHKHYLDEIIEQISEFSKRVILADANLDKVLSAYNKHRDKPIREQAENIIHLFTLTNLGAPAAFKYFDTTIDRKRYTSTKEVLDATLIHQSITGLYETRIDLSQLGGDGGGGGPAPGGSGGTLQLEEEYRLFEPESTQKQEMDIWLKNFPQAWAETGGMGTAHCQAPVLIQLKATATPISIRQYPMPHEAYQGIKPHIRRMLDQGILKPCQSPWNTPLLPVKKPGTEDYRPVQDLREVNKRVEDIHPTVPNPYNLLSTLPPSHPWYTVLDLKDAFFCLRLHSESQLLFAFEWRDPEIGLSGQLTWTRLPQGFKNSPTLFNEALHSDLADFRVRYPALVLLQYVDDLLLAAATRTECLEGTKALLETLGNKGYRASAKKAQICLQEVTYLGYSLKDGQRWLTKARKEAILSIPVPKNSRQVREFLGTAGYCRLWIPGFAELAAPLYPLTRPGTLFQWGTEQQLAFEDIKKALLSSPALGLPDITKPFELFIDENSGFAKGVLVQKLGPWKRPVAYLSKKLDTVASGWPPCLRMVAAIAILVKDAGKLTLGQPLTILTSHPVEALVRQPPNKWLSNARMTHYQAMLLDAERVHFGPTVSLNPATLLPLPSGGNHHDCLQILAETHGTRPDLTDQPLPDADLTWYTDGSSFIRNGEREAGAAVTTESEVIWAAPLPPGTSAQRAELIALTQALKMAEGKKLTVYTDSRYAFATTHVHGEIYRRRGWLTSEGKEIKNKNEILALLEALFLPKRLSIIHCPGHQKGDSPQAKGNRLADDTAKKAATETHSSLTVLPAGKRTADGSEFEKRTADGSEFESPKKKAKVE

SEQ ID NO: 1183 - protein, 2089 aa, synthetic construct
MPAAKRVKLDGGDKKYSIGLDIGTNSVGWAVITDEYKVPSKKFKVLGNTDRHSIKKNLIGALLFDSGETAEATRLKRTARRRYTRRKNRICYLQEIFSNEMAKVDDSFFHRLEESFLVEEDKKHERHPIFGNIVDEVAYHEKYPTIYHLRKKLVDSTDKADLRLIYLALAHMIKFRGHFLIEGDLNPDNSDVDKLFIQLVQTYNQLFEENPINASGVDAKAILSARLSKSRRLENLIAQLPGEKKNGLFGNLIALSLGLTPNFKSNFDLAEDAKLQLSKDTYDDDLDNLLAQIGDQYADLFLAAKNLSDAILLSDILRVNTEITKAPLSASMIKRYDEHHQDLTLLKALVRQQLPEKYKEIFFDQSKNGYAGYIDGGASQEEFYKFIKPILEKMDGTEELLVKLNREDLLRKQRTFDNGSIPHQIHLGELHAILRRQEDFYPFLKDNREKIEKILTFRIPYYVGPLARGNSRFAWMTRKSEETITPWNFEEVVDKGASAQSFIERMTNFDKNLPNEKVLPKHSLLYEYFTVYNELTKVKYVTEGMRKPAFLSGEQKKAIVDLLFKTNRKVTVKQLKEDYFKKIECFDSVEISGVEDRFNASLGTYHDLLKIIKDKDFLDNEENEDILEDIVLTLTLFEDREMIEERLKTYAHLFDDKVMKQLKRRRYTGWGRLSRKLINGIRDKQSGKTILDFLKSDGFANRNFMQLIHDDSLTFKEDIQKAQVSGQGDSLHEHIANLAGSPAIKKGILQTVKVVDELVKVMGRHKPENIVIEMARENQTTQKGQKNSRERMKRIEEGIKELGSQILKEHPVENTQLQNEKLYLYYLQNGRDMYVDQELDINRLSDYDVDHIVPQSFLKDDSIDNKVLTRSDKARGKSDNVPSEEVVKKMKNYWRQLLNAKLITQRKFDNLTKAERGGLSELDKAGFIKRQLVETRQITKHVAQILDSRMNTKYDENDKLIREVKVITLKSKLVSDFRKDFQFYKVREINNYHHAHDAYLNAVVGTALIKKYPKLESEFVYGDYKVYDVRKMIAKSEQEIGKATAKYFFYSNIMNFFKTEITLANGEIRKRPLIETNGETGEIVWDKGRDFATVRKVLSMPQVNIVKKTEVQTGGFSKESILPKRNSDKLIARKKDWDPKKYGGFDSPTVAYSVLVVAKVEKGKSKKLKSVKELLGITIMERSSFEKNPIDFLEAKGYKEVKKDLIIKLPKYSLFELENGRKRMLASAGELQKGNELALPSKYVNFLYLASHYEKLKGSPEDNEQKQLFVEQHKHYLDEIIEQISEFSKRVILADANLDKVLSAYNKHRDKPIREQAENIIHLFTLTNLGAPAAFKYFDTTIDRKRYTSTKEVLDATLIHQSITGLYETRIDLSQLGGDGGEAAAKGGTLQLEEEYRLFEPESTQKQEMDIWLKNFPQAWAETGGMGTAHCQAPVLIQLKATATPISIRQYPMPHEAYQGIKPHIRRMLDQGILKPCQSPWNTPLLPVKKPGTEDYRPVQDLREVNKRVEDIHPTVPNPYNLLSTLPPSHPWYTVLDLKDAFFCLRLHSESQLLFAFEWRDPEIGLSGQLTWTRLPQGFKNSPTLFNEALHSDLADFRVRYPALVLLQYVDDLLLAAATRTECLEGTKALLETLGNKGYRASAKKAQICLQEVTYLGYSLKDGQRWLTKARKEAILSIPVPKNSRQVREFLGTAGYCRLWIPGFAELAAPLYPLTRPGTLFQWGTEQQLAFEDIKKALLSSPALGLPDITKPFELFIDENSGFAKGVLVQKLGPWKRPVAYLSKKLDTVASGWPPCLRMVAAIAILVKDAGKLTLGQPLTILTSHPVEALVRQPPNKWLSNARMTHYQAMLLDAERVHFGPTVSLNPATLLPLPSGGNHHDCLQILAETHGTRPDLTDQPLPDADLTWYTDGSSFIRNGEREAGAAVTTESEVIWAAPLPPGTSAQRAELIALTQALKMAEGKKLTVYTDSRYAFATTHVHGEIYRRRGWLTSEGKEIKNKNEILALLEALFLPKRLSIIHCPGHQKGDSPQAKGNRLADDTAKKAATETHSSLTVLPAGKRTADGSEFEKRTADGSEFESPKKKAKVE

SEQ ID NO: 1184 - protein, 2090 aa, synthetic construct
MPAAKRVKLDGGDKKYSIGLDIGTNSVGWAVITDEYKVPSKKFKVLGNTDRHSIKKNLIGALLFDSGETAEATRLKRTARRRYTRRKNRICYLQEIFSNEMAKVDDSFFHRLEESFLVEEDKKHERHPIFGNIVDEVAYHEKYPTIYHLRKKLVDSTDKADLRLIYLALAHMIKFRGHFLIEGDLNPDNSDVDKLFIQLVQTYNQLFEENPINASGVDAKAILSARLSKSRRLENLIAQLPGEKKNGLFGNLIALSLGLTPNFKSNFDLAEDAKLQLSKDTYDDDLDNLLAQIGDQYADLFLAAKNLSDAILLSDILRVNTEITKAPLSASMIKRYDEHHQDLTLLKALVRQQLPEKYKEIFFDQSKNGYAGYIDGGASQEEFYKFIKPILEKMDGTEELLVKLNREDLLRKQRTFDNGSIPHQIHLGELHAILRRQEDFYPFLKDNREKIEKILTFRIPYYVGPLARGNSRFAWMTRKSEETITPWNFEEVVDKGASAQSFIERMTNFDKNLPNEKVLPKHSLLYEYFTVYNELTKVKYVTEGMRKPAFLSGEQKKAIVDLLFKTNRKVTVKQLKEDYFKKIECFDSVEISGVEDRFNASLGTYHDLLKIIKDKDFLDNEENEDILEDIVLTLTLFEDREMIEERLKTYAHLFDDKVMKQLKRRRYTGWGRLSRKLINGIRDKQSGKTILDFLKSDGFANRNFMQLIHDDSLTFKEDIQKAQVSGQGDSLHEHIANLAGSPAIKKGILQTVKVVDELVKVMGRHKPENIVIEMARENQTTQKGQKNSRERMKRIEEGIKELGSQILKEHPVENTQLQNEKLYLYYLQNGRDMYVDQELDINRLSDYDVDHIVPQSFLKDDSIDNKVLTRSDKARGKSDNVPSEEVVKKMKNYWRQLLNAKLITQRKFDNLTKAERGGLSELDKAGFIKRQLVETRQITKHVAQILDSRMNTKYDENDKLIREVKVITLKSKLVSDFRKDFQFYKVREINNYHHAHDAYLNAVVGTALIKKYPKLESEFVYGDYKVYDVRKMIAKSEQEIGKATAKYFFYSNIMNFFKTEITLANGEIRKRPLIETNGETGEIVWDKGRDFATVRKVLSMPQVNIVKKTEVQTGGFSKESILPKRNSDKLIARKKDWDPKKYGGFDSPTVAYSVLVVAKVEKGKSKKLKSVKELLGITIMERSSFEKNPIDFLEAKGYKEVKKDLIIKLPKYSLFELENGRKRMLASAGELQKGNELALPSKYVNFLYLASHYEKLKGSPEDNEQKQLFVEQHKHYLDEIIEQISEFSKRVILADANLDKVLSAYNKHRDKPIREQAENIIHLFTLTNLGAPAAFKYFDTTIDRKRYTSTKEVLDATLIHQSITGLYETRIDLSQLGGDGGGGSGGGGGTLQLEEEYRLFEPESTQKQEMDIWLKNFPQAWAETGGMGTAHCQAPVLIQLKATATPISIRQYPMPHEAYQGIKPHIRRMLDQGILKPCQSPWNTPLLPVKKPGTEDYRPVQDLREVNKRVEDIHPTVPNPYNLLSTLPPSHPWYTVLDLKDAFFCLRLHSESQLLFAFEWRDPEIGLSGQLTWTRLPQGFKNSPTLFNEALHSDLADFRVRYPALVLLQYVDDLLLAAATRTECLEGTKALLETLGNKGYRASAKKAQICLQEVTYLGYSLKDGQRWLTKARKEAILSIPVPKNSRQVREFLGTAGYCRLWIPGFAELAAPLYPLTRPGTLFQWGTEQQLAFEDIKKALLSSPALGLPDITKPFELFIDENSGFAKGVLVQKLGPWKRPVAYLSKKLDTVASGWPPCLRMVAAIAILVKDAGKLTLGQPLTILTSHPVEALVRQPPNKWLSNARMTHYQAMLLDAERVHFGPTVSLNPATLLPLPSGGNHHDCLQILAETHGTRPDLTDQPLPDADLTWYTDGSSFIRNGEREAGAAVTTESEVIWAAPLPPGTSAQRAELIALTQALKMAEGKKLTVYTDSRYAFATTHVHGEIYRRRGWLTSEGKEIKNKNEILALLEALFLPKRLSIIHCPGHQKGDSPQAKGNRLADDTAKKAATETHSSLTVLPAGKRTADGSEFEKRTADGSEFESPKKKAKVE

SEQ ID NO: 1185 - protein, 2095 aa, synthetic construct
MPAAKRVKLDGGDKKYSIGLDIGTNSVGWAVITDEYKVPSKKFKVLGNTDRHSIKKNLIGALLFDSGETAEATRLKRTARRRYTRRKNRICYLQEIFSNEMAKVDDSFFHRLEESFLVEEDKKHERHPIFGNIVDEVAYHEKYPTIYHLRKKLVDSTDKADLRLIYLALAHMIKFRGHFLIEGDLNPDNSDVDKLFIQLVQTYNQLFEENPINASGVDAKAILSARLSKSRRLENLIAQLPGEKKNGLFGNLIALSLGLTPNFKSNFDLAEDAKLQLSKDTYDDDLDNLLAQIGDQYADLFLAAKNLSDAILLSDILRVNTEITKAPLSASMIKRYDEHHQDLTLLKALVRQQLPEKYKEIFFDQSKNGYAGYIDGGASQEEFYKFIKPILEKMDGTEELLVKLNREDLLRKQRTFDNGSIPHQIHLGELHAILRRQEDFYPFLKDNREKIEKILTFRIPYYVGPLARGNSRFAWMTRKSEETITPWNFEEVVDKGASAQSFIERMTNFDKNLPNEKVLPKHSLLYEYFTVYNELTKVKYVTEGMRKPAFLSGEQKKAIVDLLFKTNRKVTVKQLKEDYFKKIECFDSVEISGVEDRFNASLGTYHDLLKIIKDKDFLDNEENEDILEDIVLTLTLFEDREMIEERLKTYAHLFDDKVMKQLKRRRYTGWGRLSRKLINGIRDKQSGKTILDFLKSDGFANRNFMQLIHDDSLTFKEDIQKAQVSGQGDSLHEHIANLAGSPAIKKGILQTVKVVDELVKVMGRHKPENIVIEMARENQTTQKGQKNSRERMKRIEEGIKELGSQILKEHPVENTQLQNEKLYLYYLQNGRDMYVDQELDINRLSDYDVDHIVPQSFLKDDSIDNKVLTRSDKARGKSDNVPSEEVVKKMKNYWRQLLNAKLITQRKFDNLTKAERGGLSELDKAGFIKRQLVETRQITKHVAQILDSRMNTKYDENDKLIREVKVITLKSKLVSDFRKDFQFYKVREINNYHHAHDAYLNAVVGTALIKKYPKLESEFVYGDYKVYDVRKMIAKSEQEIGKATAKYFFYSNIMNFFKTEITLANGEIRKRPLIETNGETGEIVWDKGRDFATVRKVLSMPQVNIVKKTEVQTGGFSKESILPKRNSDKLIARKKDWDPKKYGGFDSPTVAYSVLVVAKVEKGKSKKLKSVKELLGITIMERSSFEKNPIDFLEAKGYKEVKKDLIIKLPKYSLFELENGRKRMLASAGELQKGNELALPSKYVNFLYLASHYEKLKGSPEDNEQKQLFVEQHKHYLDEIIEQISEFSKRVILADANLDKVLSAYNKHRDKPIREQAENIIHLFTLTNLGAPAAFKYFDTTIDRKRYTSTKEVLDATLIHQSITGLYETRIDLSQLGGDGGEAAAKPAPGGGGGTLQLEEEYRLFEPESTQKQEMDIWLKNFPQAWAETGGMGTAHCQAPVLIQLKATATPISIRQYPMPHEAYQGIKPHIRRMLDQGILKPCQSPWNTPLLPVKKPGTEDYRPVQDLREVNKRVEDIHPTVPNPYNLLSTLPPSHPWYTVLDLKDAFFCLRLHSESQLLFAFEWRDPEIGLSGQLTWTRLPQGFKNSPTLFNEALHSDLADFRVRYPALVLLQYVDDLLLAAATRTECLEGTKALLETLGNKGYRASAKKAQICLQEVTYLGYSLKDGQRWLTKARKEAILSIPVPKNSRQVREFLGTAGYCRLWIPGFAELAAPLYPLTRPGTLFQWGTEQQLAFEDIKKALLSSPALGLPDITKPFELFIDENSGFAKGVLVQKLGPWKRPVAYLSKKLDTVASGWPPCLRMVAAIAILVKDAGKLTLGQPLTILTSHPVEALVRQPPNKWLSNARMTHYQAMLLDAERVHFGPTVSLNPATLLPLPSGGNHHDCLQILAETHGTRPDLTDQPLPDADLTWYTDGSSFIRNGEREAGAAVTTESEVIWAAPLPPGTSAQRAELIALTQALKMAEGKKLTVYTDSRYAFATTHVHGEIYRRRGWLTSEGKEIKNKNEILALLEALFLPKRLSIIHCPGHQKGDSPQAKGNRLADDTAKKAATETHSSLTVLPAGKRTADGSEFEKRTADGSEFESPKKKAKVE

SEQ ID NO: 1186 - protein, 2095 aa, synthetic construct
MPAAKRVKLDGGDKKYSIGLDIGTNSVGWAVITDEYKVPSKKFKVLGNTDRHSIKKNLIGALLFDSGETAEATRLKRTARRRYTRRKNRICYLQEIFSNEMAKVDDSFFHRLEESFLVEEDKKHERHPIFGNIVDEVAYHEKYPTIYHLRKKLVDSTDKADLRLIYLALAHMIKFRGHFLIEGDLNPDNSDVDKLFIQLVQTYNQLFEENPINASGVDAKAILSARLSKSRRLENLIAQLPGEKKNGLFGNLIALSLGLTPNFKSNFDLAEDAKLQLSKDTYDDDLDNLLAQIGDQYADLFLAAKNLSDAILLSDILRVNTEITKAPLSASMIKRYDEHHQDLTLLKALVRQQLPEKYKEIFFDQSKNGYAGYIDGGASQEEFYKFIKPILEKMDGTEELLVKLNREDLLRKQRTFDNGSIPHQIHLGELHAILRRQEDFYPFLKDNREKIEKILTFRIPYYVGPLARGNSRFAWMTRKSEETITPWNFEEVVDKGASAQSFIERMTNFDKNLPNEKVLPKHSLLYEYFTVYNELTKVKYVTEGMRKPAFLSGEQKKAIVDLLFKTNRKVTVKQLKEDYFKKIECFDSVEISGVEDRFNASLGTYHDLLKIIKDKDFLDNEENEDILEDIVLTLTLFEDREMIEERLKTYAHLFDDKVMKQLKRRRYTGWGRLSRKLINGIRDKQSGKTILDFLKSDGFANRNFMQLIHDDSLTFKEDIQKAQVSGQGDSLHEHIANLAGSPAIKKGILQTVKVVDELVKVMGRHKPENIVIEMARENQTTQKGQKNSRERMKRIEEGIKELGSQILKEHPVENTQLQNEKLYLYYLQNGRDMYVDQELDINRLSDYDVDHIVPQSFLKDDSIDNKVLTRSDKARGKSDNVPSEEVVKKMKNYWRQLLNAKLITQRKFDNLTKAERGGLSELDKAGFIKRQLVETRQITKHVAQILDSRMNTKYDENDKLIREVKVITLKSKLVSDFRKDFQFYKVREINNYHHAHDAYLNAVVGTALIKKYPKLESEFVYGDYKVYDVRKMIAKSEQEIGKATAKYFFYSNIMNFFKTEITLANGEIRKRPLIETNGETGEIVWDKGRDFATVRKVLSMPQVNIVKKTEVQTGGFSKESILPKRNSDKLIARKKDWDPKKYGGFDSPTVAYSVLVVAKVEKGKSKKLKSVKELLGITIMERSSFEKNPIDFLEAKGYKEVKKDLIIKLPKYSLFELENGRKRMLASAGELQKGNELALPSKYVNFLYLASHYEKLKGSPEDNEQKQLFVEQHKHYLDEIIEQISEFSKRVILADANLDKVLSAYNKHRDKPIREQAENIIHLFTLTNLGAPAAFKYFDTTIDRKRYTSTKEVLDATLIHQSITGLYETRIDLSQLGGDGGGGGPAPEAAAKGGTLQLEEEYRLFEPESTQKQEMDIWLKNFPQAWAETGGMGTAHCQAPVLIQLKATATPISIRQYPMPHEAYQGIKPHIRRMLDQGILKPCQSPWNTPLLPVKKPGTEDYRPVQDLREVNKRVEDIHPTVPNPYNLLSTLPPSHPWYTVLDLKDAFFCLRLHSESQLLFAFEWRDPEIGLSGQLTWTRLPQGFKNSPTLFNEALHSDLADFRVRYPALVLLQYVDDLLLAAATRTECLEGTKALLETLGNKGYRASAKKAQICLQEVTYLGYSLKDGQRWLTKARKEAILSIPVPKNSRQVREFLGTAGYCRLWIPGFAELAAPLYPLTRPGTLFQWGTEQQLAFEDIKKALLSSPALGLPDITKPFELFIDENSGFAKGVLVQKLGPWKRPVAYLSKKLDTVASGWPPCLRMVAAIAILVKDAGKLTLGQPLTILTSHPVEALVRQPPNKWLSNARMTHYQAMLLDAERVHFGPTVSLNPATLLPLPSGGNHHDCLQILAETHGTRPDLTDQPLPDADLTWYTDGSSFIRNGEREAGAAVTTESEVIWAAPLPPGTSAQRAELIALTQALKMAEGKKLTVYTDSRYAFATTHVHGEIYRRRGWLTSEGKEIKNKNEILALLEALFLPKRLSIIHCPGHQKGDSPQAKGNRLADDTAKKAATETHSSLTVLPAGKRTADGSEFEKRTADGSEFESPKKKAKVE

SEQ ID NO: 1187 - protein, 2095 aa, synthetic construct
MPAAKRVKLDGGDKKYSIGLDIGTNSVGWAVITDEYKVPSKKFKVLGNTDRHSIKKNLIGALLFDSGETAEATRLKRTARRRYTRRKNRICYLQEIFSNEMAKVDDSFFHRLEESFLVEEDKKHERHPIFGNIVDEVAYHEKYPTIYHLRKKLVDSTDKADLRLIYLALAHMIKFRGHFLIEGDLNPDNSDVDKLFIQLVQTYNQLFEENPINASGVDAKAILSARLSKSRRLENLIAQLPGEKKNGLFGNLIALSLGLTPNFKSNFDLAEDAKLQLSKDTYDDDLDNLLAQIGDQYADLFLAAKNLSDAILLSDILRVNTEITKAPLSASMIKRYDEHHQDLTLLKALVRQQLPEKYKEIFFDQSKNGYAGYIDGGASQEEFYKFIKPILEKMDGTEELLVKLNREDLLRKQRTFDNGSIPHQIHLGELHAILRRQEDFYPFLKDNREKIEKILTFRIPYYVGPLARGNSRFAWMTRKSEETITPWNFEEVVDKGASAQSFIERMTNFDKNLPNEKVLPKHSLLYEYFTVYNELTKVKYVTEGMRKPAFLSGEQKKAIVDLLFKTNRKVTVKQLKEDYFKKIECFDSVEISGVEDRFNASLGTYHDLLKIIKDKDFLDNEENEDILEDIVLTLTLFEDREMIEERLKTYAHLFDDKVMKQLKRRRYTGWGRLSRKLINGIRDKQSGKTILDFLKSDGFANRNFMQLIHDDSLTFKEDIQKAQVSGQGDSLHEHIANLAGSPAIKKGILQTVKVVDELVKVMGRHKPENIVIEMARENQTTQKGQKNSRERMKRIEEGIKELGSQILKEHPVENTQLQNEKLYLYYLQNGRDMYVDQELDINRLSDYDVDHIVPQSFLKDDSIDNKVLTRSDKARGKSDNVPSEEVVKKMKNYWRQLLNAKLITQRKFDNLTKAERGGLSELDKAGFIKRQLVETRQITKHVAQILDSRMNTKYDENDKLIREVKVITLKSKLVSDFRKDFQFYKVREINNYHHAHDAYLNAVVGTALIKKYPKLESEFVYGDYKVYDVRKMIAKSEQEIGKATAKYFFYSNIMNFFKTEITLANGEIRKRPLIETNGETGEIVWDKGRDFATVRKVLSMPQVNIVKKTEVQTGGFSKESILPKRNSDKLIARKKDWDPKKYGGFDSPTVAYSVLVVAKVEKGKSKKLKSVKELLGITIMERSSFEKNPIDFLEAKGYKEVKKDLIIKLPKYSLFELENGRKRMLASAGELQKGNELALPSKYVNFLYLASHYEKLKGSPEDNEQKQLFVEQHKHYLDEIIEQISEFSKRVILADANLDKVLSAYNKHRDKPIREQAENIIHLFTLTNLGAPAAFKYFDTTIDRKRYTSTKEVLDATLIHQSITGLYETRIDLSQLGGDGGGGGGGSEAAAKGGTLQLEEEYRLFEPESTQKQEMDIWLKNFPQAWAETGGMGTAHCQAPVLIQLKATATPISIRQYPMPHEAYQGIKPHIRRMLDQGILKPCQSPWNTPLLPVKKPGTEDYRPVQDLREVNKRVEDIHPTVPNPYNLLSTLPPSHPWYTVLDLKDAFFCLRLHSESQLLFAFEWRDPEIGLSGQLTWTRLPQGFKNSPTLFNEALHSDLADFRVRYPALVLLQYVDDLLLAAATRTECLEGTKALLETLGNKGYRASAKKAQICLQEVTYLGYSLKDGQRWLTKARKEAILSIPVPKNSRQVREFLGTAGYCRLWIPGFAELAAPLYPLTRPGTLFQWGTEQQLAFEDIKKALLSSPALGLPDITKPFELFIDENSGFAKGVLVQKLGPWKRPVAYLSKKLDTVASGWPPCLRMVAAIAILVKDAGKLTLGQPLTILTSHPVEALVRQPPNKWLSNARMTHYQAMLLDAERVHFGPTVSLNPATLLPLPSGGNHHDCLQILAETHGTRPDLTDQPLPDADLTWYTDGSSFIRNGEREAGAAVTTESEVIWAAPLPPGTSAQRAELIALTQALKMAEGKKLTVYTDSRYAFATTHVHGEIYRRRGWLTSEGKEIKNKNEILALLEALFLPKRLSIIHCPGHQKGDSPQAKGNRLADDTAKKAATETHSSLTVLPAGKRTADGSEFEKRTADGSEFESPKKKAKVE

SEQ ID NO: 1188 - protein, 2090 aa, synthetic construct
MPAAKRVKLDGGDKKYSIGLDIGTNSVGWAVITDEYKVPSKKFKVLGNTDRHSIKKNLIGALLFDSGETAEATRLKRTARRRYTRRKNRICYLQEIFSNEMAKVDDSFFHRLEESFLVEEDKKHERHPIFGNIVDEVAYHEKYPTIYHLRKKLVDSTDKADLRLIYLALAHMIKFRGHFLIEGDLNPDNSDVDKLFIQLVQTYNQLFEENPINASGVDAKAILSARLSKSRRLENLIAQLPGEKKNGLFGNLIALSLGLTPNFKSNFDLAEDAKLQLSKDTYDDDLDNLLAQIGDQYADLFLAAKNLSDAILLSDILRVNTEITKAPLSASMIKRYDEHHQDLTLLKALVRQQLPEKYKEIFFDQSKNGYAGYIDGGASQEEFYKFIKPILEKMDGTEELLVKLNREDLLRKQRTFDNGSIPHQIHLGELHAILRRQEDFYPFLKDNREKIEKILTFRIPYYVGPLARGNSRFAWMTRKSEETITPWNFEEVVDKGASAQSFIERMTNFDKNLPNEKVLPKHSLLYEYFTVYNELTKVKYVTEGMRKPAFLSGEQKKAIVDLLFKTNRKVTVKQLKEDYFKKIECFDSVEISGVEDRFNASLGTYHDLLKIIKDKDFLDNEENEDILEDIVLTLTLFEDREMIEERLKTYAHLFDDKVMKQLKRRRYTGWGRLSRKLINGIRDKQSGKTILDFLKSDGFANRNFMQLIHDDSLTFKEDIQKAQVSGQGDSLHEHIANLAGSPAIKKGILQTVKVVDELVKVMGRHKPENIVIEMARENQTTQKGQKNSRERMKRIEEGIKELGSQILKEHPVENTQLQNEKLYLYYLQNGRDMYVDQELDINRLSDYDVDHIVPQSFLKDDSIDNKVLTRSDKARGKSDNVPSEEVVKKMKNYWRQLLNAKLITQRKFDNLTKAERGGLSELDKAGFIKRQLVETRQITKHVAQILDSRMNTKYDENDKLIREVKVITLKSKLVSDFRKDFQFYKVREINNYHHAHDAYLNAVVGTALIKKYPKLESEFVYGDYKVYDVRKMIAKSEQEIGKATAKYFFYSNIMNFFKTEITLANGEIRKRPLIETNGETGEIVWDKGRDFATVRKVLSMPQVNIVKKTEVQTGGFSKESILPKRNSDKLIARKKDWDPKKYGGFDSPTVAYSVLVVAKVEKGKSKKLKSVKELLGITIMERSSFEKNPIDFLEAKGYKEVKKDLIIKLPKYSLFELENGRKRMLASAGELQKGNELALPSKYVNFLYLASHYEKLKGSPEDNEQKQLFVEQHKHYLDEIIEQISEFSKRVILADANLDKVLSAYNKHRDKPIREQAENIIHLFTLTNLGAPAAFKYFDTTIDRKRYTSTKEVLDATLIHQSITGLYETRIDLSQLGGDGGGGGGGGGGTLQLEEEYRLFEPESTQKQEMDIWLKNFPQAWAETGGMGTAHCQAPVLIQLKATATPISIRQYPMPHEAYQGIKPHIRRMLDQGILKPCQSPWNTPLLPVKKPGTEDYRPVQDLREVNKRVEDIHPTVPNPYNLLSTLPPSHPWYTVLDLKDAFFCLRLHSESQLLFAFEWRDPEIGLSGQLTWTRLPQGFKNSPTLFNEALHSDLADFRVRYPALVLLQYVDDLLLAAATRTECLEGTKALLETLGNKGYRASAKKAQICLQEVTYLGYSLKDGQRWLTKARKEAILSIPVPKNSRQVREFLGTAGYCRLWIPGFAELAAPLYPLTRPGTLFQWGTEQQLAFEDIKKALLSSPALGLPDITKPFELFIDENSGFAKGVLVQKLGPWKRPVAYLSKKLDTVASGWPPCLRMVAAIAILVKDAGKLTLGQPLTILTSHPVEALVRQPPNKWLSNARMTHYQAMLLDAERVHFGPTVSLNPATLLPLPSGGNHHDCLQILAETHGTRPDLTDQPLPDADLTWYTDGSSFIRNGEREAGAAVTTESEVIWAAPLPPGTSAQRAELIALTQALKMAEGKKLTVYTDSRYAFATTHVHGEIYRRRGWLTSEGKEIKNKNEILALLEALFLPKRLSIIHCPGHQKGDSPQAKGNRLADDTAKKAATETHSSLTVLPAGKRTADGSEFEKRTADGSEFESPKKKAKVE

SEQ ID NO: 1189 - protein, 2093 aa, synthetic construct
MPAAKRVKLDGGDKKYSIGLDIGTNSVGWAVITDEYKVPSKKFKVLGNTDRHSIKKNLIGALLFDSGETAEATRLKRTARRRYTRRKNRICYLQEIFSNEMAKVDDSFFHRLEESFLVEEDKKHERHPIFGNIVDEVAYHEKYPTIYHLRKKLVDSTDKADLRLIYLALAHMIKFRGHFLIEGDLNPDNSDVDKLFIQLVQTYNQLFEENPINASGVDAKAILSARLSKSRRLENLIAQLPGEKKNGLFGNLIALSLGLTPNFKSNFDLAEDAKLQLSKDTYDDDLDNLLAQIGDQYADLFLAAKNLSDAILLSDILRVNTEITKAPLSASMIKRYDEHHQDLTLLKALVRQQLPEKYKEIFFDQSKNGYAGYIDGGASQEEFYKFIKPILEKMDGTEELLVKLNREDLLRKQRTFDNGSIPHQIHLGELHAILRRQEDFYPFLKDNREKIEKILTFRIPYYVGPLARGNSRFAWMTRKSEETITPWNFEEVVDKGASAQSFIERMTNFDKNLPNEKVLPKHSLLYEYFTVYNELTKVKYVTEGMRKPAFLSGEQKKAIVDLLFKTNRKVTVKQLKEDYFKKIECFDSVEISGVEDRFNASLGTYHDLLKIIKDKDFLDNEENEDILEDIVLTLTLFEDREMIEERLKTYAHLFDDKVMKQLKRRRYTGWGRLSRKLINGIRDKQSGKTILDFLKSDGFANRNFMQLIHDDSLTFKEDIQKAQVSGQGDSLHEHIANLAGSPAIKKGILQTVKVVDELVKVMGRHKPENIVIEMARENQTTQKGQKNSRERMKRIEEGIKELGSQILKEHPVENTQLQNEKLYLYYLQNGRDMYVDQELDINRLSDYDVDHIVPQSFLKDDSIDNKVLTRSDKARGKSDNVPSEEVVKKMKNYWRQLLNAKLITQRKFDNLTKAERGGLSELDKAGFIKRQLVETRQITKHVAQILDSRMNTKYDENDKLIREVKVITLKSKLVSDFRKDFQFYKVREINNYHHAHDAYLNAVVGTALIKKYPKLESEFVYGDYKVYDVRKMIAKSEQEIGKATAKYFFYSNIMNFFKTEITLANGEIRKRPLIETNGETGEIVWDKGRDFATVRKVLSMPQVNIVKKTEVQTGGFSKESILPKRNSDKLIARKKDWDPKKYGGFDSPTVAYSVLVVAKVEKGKSKKLKSVKELLGITIMERSSFEKNPIDFLEAKGYKEVKKDLIIKLPKYSLFELENGRKRMLASAGELQKGNELALPSKYVNFLYLASHYEKLKGSPEDNEQKQLFVEQHKHYLDEIIEQISEFSKRVILADANLDKVLSAYNKHRDKPIREQAENIIHLFTLTNLGAPAAFKYFDTTIDRKRYTSTKEVLDATLIHQSITGLYETRIDLSQLGGDGGGGGGSSPAPGGTLQLEEEYRLFEPESTQKQEMDIWLKNFPQAWAETGGMGTAHCQAPVLIQLKATATPISIRQYPMPHEAYQGIKPHIRRMLDQGILKPCQSPWNTPLLPVKKPGTEDYRPVQDLREVNKRVEDIHPTVPNPYNLLSTLPPSHPWYTVLDLKDAFFCLRLHSESQLLFAFEWRDPEIGLSGQLTWTRLPQGFKNSPTLFNEALHSDLADFRVRYPALVLLQYVDDLLLAAATRTECLEGTKALLETLGNKGYRASAKKAQICLQEVTYLGYSLKDGQRWLTKARKEAILSIPVPKNSRQVREFLGTAGYCRLWIPGFAELAAPLYPLTRPGTLFQWGTEQQLAFEDIKKALLSSPALGLPDITKPFELFIDENSGFAKGVLVQKLGPWKRPVAYLSKKLDTVASGWPPCLRMVAAIAILVKDAGKLTLGQPLTILTSHPVEALVRQPPNKWLSNARMTHYQAMLLDAERVHFGPTVSLNPATLLPLPSGGNHHDCLQILAETHGTRPDLTDQPLPDADLTWYTDGSSFIRNGEREAGAAVTTESEVIWAAPLPPGTSAQRAELIALTQALKMAEGKKLTVYTDSRYAFATTHVHGEIYRRRGWLTSEGKEIKNKNEILALLEALFLPKRLSIIHCPGHQKGDSPQAKGNRLADDTAKKAATETHSSLTVLPAGKRTADGSEFEKRTADGSEFESPKKKAKVE

SEQ ID NO: 1190 - protein, 2093 aa, synthetic construct
MPAAKRVKLDGGDKKYSIGLDIGTNSVGWAVITDEYKVPSKKFKVLGNTDRHSIKKNLIGALLFDSGETAEATRLKRTARRRYTRRKNRICYLQEIFSNEMAKVDDSFFHRLEESFLVEEDKKHERHPIFGNIVDEVAYHEKYPTIYHLRKKLVDSTDKADLRLIYLALAHMIKFRGHFLIEGDLNPDNSDVDKLFIQLVQTYNQLFEENPINASGVDAKAILSARLSKSRRLENLIAQLPGEKKNGLFGNLIALSLGLTPNFKSNFDLAEDAKLQLSKDTYDDDLDNLLAQIGDQYADLFLAAKNLSDAILLSDILRVNTEITKAPLSASMIKRYDEHHQDLTLLKALVRQQLPEKYKEIFFDQSKNGYAGYIDGGASQEEFYKFIKPILEKMDGTEELLVKLNREDLLRKQRTFDNGSIPHQIHLGELHAILRRQEDFYPFLKDNREKIEKILTFRIPYYVGPLARGNSRFAWMTRKSEETITPWNFEEVVDKGASAQSFIERMTNFDKNLPNEKVLPKHSLLYEYFTVYNELTKVKYVTEGMRKPAFLSGEQKKAIVDLLFKTNRKVTVKQLKEDYFKKIECFDSVEISGVEDRFNASLGTYHDLLKIIKDKDFLDNEENEDILEDIVLTLTLFEDREMIEERLKTYAHLFDDKVMKQLKRRRYTGWGRLSRKLINGIRDKQSGKTILDFLKSDGFANRNFMQLIHDDSLTFKEDIQKAQVSGQGDSLHEHIANLAGSPAIKKGILQTVKVVDELVKVMGRHKPENIVIEMARENQTTQKGQKNSRERMKRIEEGIKELGSQILKEHPVENTQLQNEKLYLYYLQNGRDMYVDQELDINRLSDYDVDHIVPQSFLKDDSIDNKVLTRSDKARGKSDNVPSEEVVKKMKNYWRQLLNAKLITQRKFDNLTKAERGGLSELDKAGFIKRQLVETRQITKHVAQILDSRMNTKYDENDKLIREVKVITLKSKLVSDFRKDFQFYKVREINNYHHAHDAYLNAVVGTALIKKYPKLESEFVYGDYKVYDVRKMIAKSEQEIGKATAKYFFYSNIMNFFKTEITLANGEIRKRPLIETNGETGEIVWDKGRDFATVRKVLSMPQVNIVKKTEVQTGGFSKESILPKRNSDKLIARKKDWDPKKYGGFDSPTVAYSVLVVAKVEKGKSKKLKSVKELLGITIMERSSFEKNPIDFLEAKGYKEVKKDLIIKLPKYSLFELENGRKRMLASAGELQKGNELALPSKYVNFLYLASHYEKLKGSPEDNEQKQLFVEQHKHYLDEIIEQISEFSKRVILADANLDKVLSAYNKHRDKPIREQAENIIHLFTLTNLGAPAAFKYFDTTIDRKRYTSTKEVLDATLIHQSITGLYETRIDLSQLGGDGGGGSGGGPAPGGTLQLEEEYRLFEPESTQKQEMDIWLKNFPQAWAETGGMGTAHCQAPVLIQLKATATPISIRQYPMPHEAYQGIKPHIRRMLDQGILKPCQSPWNTPLLPVKKPGTEDYRPVQDLREVNKRVEDIHPTVPNPYNLLSTLPPSHPWYTVLDLKDAFFCLRLHSESQLLFAFEWRDPEIGLSGQLTWTRLPQGFKNSPTLFNEALHSDLADFRVRYPALVLLQYVDDLLLAAATRTECLEGTKALLETLGNKGYRASAKKAQICLQEVTYLGYSLKDGQRWLTKARKEAILSIPVPKNSRQVREFLGTAGYCRLWIPGFAELAAPLYPLTRPGTLFQWGTEQQLAFEDIKKALLSSPALGLPDITKPFELFIDENSGFAKGVLVQKLGPWKRPVAYLSKKLDTVASGWPPCLRMVAAIAILVKDAGKLTLGQPLTILTSHPVEALVRQPPNKWLSNARMTHYQAMLLDAERVHFGPTVSLNPATLLPLPSGGNHHDCLQILAETHGTRPDLTDQPLPDADLTWYTDGSSFIRNGEREAGAAVTTESEVIWAAPLPPGTSAQRAELIALTQALKMAEGKKLTVYTDSRYAFATTHVHGEIYRRRGWLTSEGKEIKNKNEILALLEALFLPKRLSIIHCPGHQKGDSPQAKGNRLADDTAKKAATETHSSLTVLPAGKRTADGSEFEKRTADGSEFESPKKKAKVE

SEQ ID NO: 1191 - protein, 2095 aa, synthetic construct
MPAAKRVKLDGGDKKYSIGLDIGTNSVGWAVITDEYKVPSKKFKVLGNTDRHSIKKNLIGALLFDSGETAEATRLKRTARRRYTRRKNRICYLQEIFSNEMAKVDDSFFHRLEESFLVEEDKKHERHPIFGNIVDEVAYHEKYPTIYHLRKKLVDSTDKADLRLIYLALAHMIKFRGHFLIEGDLNPDNSDVDKLFIQLVQTYNQLFEENPINASGVDAKAILSARLSKSRRLENLIAQLPGEKKNGLFGNLIALSLGLTPNFKSNFDLAEDAKLQLSKDTYDDDLDNLLAQIGDQYADLFLAAKNLSDAILLSDILRVNTEITKAPLSASMIKRYDEHHQDLTLLKALVRQQLPEKYKEIFFDQSKNGYAGYIDGGASQEEFYKFIKPILEKMDGTEELLVKLNREDLLRKQRTFDNGSIPHQIHLGELHAILRRQEDFYPFLKDNREKIEKILTFRIPYYVGPLARGNSRFAWMTRKSEETITPWNFEEVVDKGASAQSFIERMTNFDKNLPNEKVLPKHSLLYEYFTVYNELTKVKYVTEGMRKPAFLSGEQKKAIVDLLFKTNRKVTVKQLKEDYFKKIECFDSVEISGVEDRFNASLGTYHDLLKIIKDKDFLDNEENEDILEDIVLTLTLFEDREMIEERLKTYAHLFDDKVMKQLKRRRYTGWGRLSRKLINGIRDKQSGKTILDFLKSDGFANRNFMQLIHDDSLTFKEDIQKAQVSGQGDSLHEHIANLAGSPAIKKGILQTVKVVDELVKVMGRHKPENIVIEMARENQTTQKGQKNSRERMKRIEEGIKELGSQILKEHPVENTQLQNEKLYLYYLQNGRDMYVDQELDINRLSDYDVDHIVPQSFLKDDSIDNKVLTRSDKARGKSDNVPSEEVVKKMKNYWRQLLNAKLITQRKFDNLTKAERGGLSELDKAGFIKRQLVETRQITKHVAQILDSRMNTKYDENDKLIREVKVITLKSKLVSDFRKDFQFYKVREINNYHHAHDAYLNAVVGTALIKKYPKLESEFVYGDYKVYDVRKMIAKSEQEIGKATAKYFFYSNIMNFFKTEITLANGEIRKRPLIETNGETGEIVWDKGRDFATVRKVLSMPQVNIVKKTEVQTGGFSKESILPKRNSDKLIARKKDWDPKKYGGFDSPTVAYSVLVVAKVEKGKSKKLKSVKELLGITIMERSSFEKNPIDFLEAKGYKEVKKDLIIKLPKYSLFELENGRKRMLASAGELQKGNELALPSKYVNFLYLASHYEKLKGSPEDNEQKQLFVEQHKHYLDEIIEQISEFSKRVILADANLDKVLSAYNKHRDKPIREQAENIIHLFTLTNLGAPAAFKYFDTTIDRKRYTSTKEVLDATLIHQSITGLYETRIDLSQLGGDGGGSSPAPEAAAKGGTLQLEEEYRLFEPESTQKQEMDIWLKNFPQAWAETGGMGTAHCQAPVLIQLKATATPISIRQYPMPHEAYQGIKPHIRRMLDQGILKPCQSPWNTPLLPVKKPGTEDYRPVQDLREVNKRVEDIHPTVPNPYNLLSTLPPSHPWYTVLDLKDAFFCLRLHSESQLLFAFEWRDPEIGLSGQLTWTRLPQGFKNSPTLFNEALHSDLADFRVRYPALVLLQYVDDLLLAAATRTECLEGTKALLETLGNKGYRASAKKAQICLQEVTYLGYSLKDGQRWLTKARKEAILSIPVPKNSRQVREFLGTAGYCRLWIPGFAELAAPLYPLTRPGTLFQWGTEQQLAFEDIKKALLSSPALGLPDITKPFELFIDENSGFAKGVLVQKLGPWKRPVAYLSKKLDTVASGWPPCLRMVAAIAILVKDAGKLTLGQPLTILTSHPVEALVRQPPNKWLSNARMTHYQAMLLDAERVHFGPTVSLNPATLLPLPSGGNHHDCLQILAETHGTRPDLTDQPLPDADLTWYTDGSSFIRNGEREAGAAVTTESEVIWAAPLPPGTSAQRAELIALTQALKMAEGKKLTVYTDSRYAFATTHVHGEIYRRRGWLTSEGKEIKNKNEILALLEALFLPKRLSIIHCPGHQKGDSPQAKGNRLADDTAKKAATETHSSLTVLPAGKRTADGSEFEKRTADGSEFESPKKKAKVE

SEQ ID NO: 1192 - protein, 2093 aa, synthetic construct
MPAAKRVKLDGGDKKYSIGLDIGTNSVGWAVITDEYKVPSKKFKVLGNTDRHSIKKNLIGALLFDSGETAEATRLKRTARRRYTRRKNRICYLQEIFSNEMAKVDDSFFHRLEESFLVEEDKKHERHPIFGNIVDEVAYHEKYPTIYHLRKKLVDSTDKADLRLIYLALAHMIKFRGHFLIEGDLNPDNSDVDKLFIQLVQTYNQLFEENPINASGVDAKAILSARLSKSRRLENLIAQLPGEKKNGLFGNLIALSLGLTPNFKSNFDLAEDAKLQLSKDTYDDDLDNLLAQIGDQYADLFLAAKNLSDAILLSDILRVNTEITKAPLSASMIKRYDEHHQDLTLLKALVRQQLPEKYKEIFFDQSKNGYAGYIDGGASQEEFYKFIKPILEKMDGTEELLVKLNREDLLRKQRTFDNGSIPHQIHLGELHAILRRQEDFYPFLKDNREKIEKILTFRIPYYVGPLARGNSRFAWMTRKSEETITPWNFEEVVDKGASAQSFIERMTNFDKNLPNEKVLPKHSLLYEYFTVYNELTKVKYVTEGMRKPAFLSGEQKKAIVDLLFKTNRKVTVKQLKEDYFKKIECFDSVEISGVEDRFNASLGTYHDLLKIIKDKDFLDNEENEDILEDIVLTLTLFEDREMIEERLKTYAHLFDDKVMKQLKRRRYTGWGRLSRKLINGIRDKQSGKTILDFLKSDGFANRNFMQLIHDDSLTFKEDIQKAQVSGQGDSLHEHIANLAGSPAIKKGILQTVKVVDELVKVMGRHKPENIVIEMARENQTTQKGQKNSRERMKRIEEGIKELGSQILKEHPVENTQLQNEKLYLYYLQNGRDMYVDQELDINRLSDYDVDHIVPQSFLKDDSIDNKVLTRSDKARGKSDNVPSEEVVKKMKNYWRQLLNAKLITQRKFDNLTKAERGGLSELDKAGFIKRQLVETRQITKHVAQILDSRMNTKYDENDKLIREVKVITLKSKLVSDFRKDFQFYKVREINNYHHAHDAYLNAVVGTALIKKYPKLESEFVYGDYKVYDVRKMIAKSEQEIGKATAKYFFYSNIMNFFKTEITLANGEIRKRPLIETNGETGEIVWDKGRDFATVRKVLSMPQVNIVKKTEVQTGGFSKESILPKRNSDKLIARKKDWDPKKYGGFDSPTVAYSVLVVAKVEKGKSKKLKSVKELLGITIMERSSFEKNPIDFLEAKGYKEVKKDLIIKLPKYSLFELENGRKRMLASAGELQKGNELALPSKYVNFLYLASHYEKLKGSPEDNEQKQLFVEQHKHYLDEIIEQISEFSKRVILADANLDKVLSAYNKHRDKPIREQAENIIHLFTLTNLGAPAAFKYFDTTIDRKRYTSTKEVLDATLIHQSITGLYETRIDLSQLGGDGGPAPGSSGGGGGTLQLEEEYRLFEPESTQKQEMDIWLKNFPQAWAETGGMGTAHCQAPVLIQLKATATPISIRQYPMPHEAYQGIKPHIRRMLDQGILKPCQSPWNTPLLPVKKPGTEDYRPVQDLREVNKRVEDIHPTVPNPYNLLSTLPPSHPWYTVLDLKDAFFCLRLHSESQLLFAFEWRDPEIGLSGQLTWTRLPQGFKNSPTLFNEALHSDLADFRVRYPALVLLQYVDDLLLAAATRTECLEGTKALLETLGNKGYRASAKKAQICLQEVTYLGYSLKDGQRWLTKARKEAILSIPVPKNSRQVREFLGTAGYCRLWIPGFAELAAPLYPLTRPGTLFQWGTEQQLAFEDIKKALLSSPALGLPDITKPFELFIDENSGFAKGVLVQKLGPWKRPVAYLSKKLDTVASGWPPCLRMVAAIAILVKDAGKLTLGQPLTILTSHPVEALVRQPPNKWLSNARMTHYQAMLLDAERVHFGPTVSLNPATLLPLPSGGNHHDCLQILAETHGTRPDLTDQPLPDADLTWYTDGSSFIRNGEREAGAAVTTESEVIWAAPLPPGTSAQRAELIALTQALKMAEGKKLTVYTDSRYAFATTHVHGEIYRRRGWLTSEGKEIKNKNEILALLEALFLPKRLSIIHCPGHQKGDSPQAKGNRLADDTAKKAATETHSSLTVLPAGKRTADGSEFEKRTADGSEFESPKKKAKVE

SEQ ID NO: 1193 - protein, 2090 aa, synthetic construct
MPAAKRVKLDGGDKKYSIGLDIGTNSVGWAVITDEYKVPSKKFKVLGNTDRHSIKKNLIGALLFDSGETAEATRLKRTARRRYTRRKNRICYLQEIFSNEMAKVDDSFFHRLEESFLVEEDKKHERHPIFGNIVDEVAYHEKYPTIYHLRKKLVDSTDKADLRLIYLALAHMIKFRGHFLIEGDLNPDNSDVDKLFIQLVQTYNQLFEENPINASGVDAKAILSARLSKSRRLENLIAQLPGEKKNGLFGNLIALSLGLTPNFKSNFDLAEDAKLQLSKDTYDDDLDNLLAQIGDQYADLFLAAKNLSDAILLSDILRVNTEITKAPLSASMIKRYDEHHQDLTLLKALVRQQLPEKYKEIFFDQSKNGYAGYIDGGASQEEFYKFIKPILEKMDGTEELLVKLNREDLLRKQRTFDNGSIPHQIHLGELHAILRRQEDFYPFLKDNREKIEKILTFRIPYYVGPLARGNSRFAWMTRKSEETITPWNFEEVVDKGASAQSFIERMTNFDKNLPNEKVLPKHSLLYEYFTVYNELTKVKYVTEGMRKPAFLSGEQKKAIVDLLFKTNRKVTVKQLKEDYFKKIECFDSVEISGVEDRFNASLGTYHDLLKIIKDKDFLDNEENEDILEDIVLTLTLFEDREMIEERLKTYAHLFDDKVMKQLKRRRYTGWGRLSRKLINGIRDKQSGKTILDFLKSDGFANRNFMQLIHDDSLTFKEDIQKAQVSGQGDSLHEHIANLAGSPAIKKGILQTVKVVDELVKVMGRHKPENIVIEMARENQTTQKGQKNSRERMKRIEEGIKELGSQILKEHPVENTQLQNEKLYLYYLQNGRDMYVDQELDINRLSDYDVDHIVPQSFLKDDSIDNKVLTRSDKARGKSDNVPSEEVVKKMKNYWRQLLNAKLITQRKFDNLTKAERGGLSELDKAGFIKRQLVETRQITKHVAQILDSRMNTKYDENDKLIREVKVITLKSKLVSDFRKDFQFYKVREINNYHHAHDAYLNAVVGTALIKKYPKLESEFVYGDYKVYDVRKMIAKSEQEIGKATAKYFFYSNIMNFFKTEITLANGEIRKRPLIETNGETGEIVWDKGRDFATVRKVLSMPQVNIVKKTEVQTGGFSKESILPKRNSDKLIARKKDWDPKKYGGFDSPTVAYSVLVVAKVEKGKSKKLKSVKELLGITIMERSSFEKNPIDFLEAKGYKEVKKDLIIKLPKYSLFELENGRKRMLASAGELQKGNELALPSKYVNFLYLASHYEKLKGSPEDNEQKQLFVEQHKHYLDEIIEQISEFSKRVILADANLDKVLSAYNKHRDKPIREQAENIIHLFTLTNLGAPAAFKYFDTTIDRKRYTSTKEVLDATLIHQSITGLYETRIDLSQLGGDGGGGSGGSGGTLQLEEEYRLFEPESTQKQEMDIWLKNFPQAWAETGGMGTAHCQAPVLIQLKATATPISIRQYPMPHEAYQGIKPHIRRMLDQGILKPCQSPWNTPLLPVKKPGTEDYRPVQDLREVNKRVEDIHPTVPNPYNLLSTLPPSHPWYTVLDLKDAFFCLRLHSESQLLFAFEWRDPEIGLSGQLTWTRLPQGFKNSPTLFNEALHSDLADFRVRYPALVLLQYVDDLLLAAATRTECLEGTKALLETLGNKGYRASAKKAQICLQEVTYLGYSLKDGQRWLTKARKEAILSIPVPKNSRQVREFLGTAGYCRLWIPGFAELAAPLYPLTRPGTLFQWGTEQQLAFEDIKKALLSSPALGLPDITKPFELFIDENSGFAKGVLVQKLGPWKRPVAYLSKKLDTVASGWPPCLRMVAAIAILVKDAGKLTLGQPLTILTSHPVEALVRQPPNKWLSNARMTHYQAMLLDAERVHFGPTVSLNPATLLPLPSGGNHHDCLQILAETHGTRPDLTDQPLPDADLTWYTDGSSFIRNGEREAGAAVTTESEVIWAAPLPPGTSAQRAELIALTQALKMAEGKKLTVYTDSRYAFATTHVHGEIYRRRGWLTSEGKEIKNKNEILALLEALFLPKRLSIIHCPGHQKGDSPQAKGNRLADDTAKKAATETHSSLTVLPAGKRTADGSEFEKRTADGSEFESPKKKAKVE

SEQ ID NO: 1194 - protein, 2093 aa, synthetic construct
MPAAKRVKLDGGDKKYSIGLDIGTNSVGWAVITDEYKVPSKKFKVLGNTDRHSIKKNLIGALLFDSGETAEATRLKRTARRRYTRRKNRICYLQEIFSNEMAKVDDSFFHRLEESFLVEEDKKHERHPIFGNIVDEVAYHEKYPTIYHLRKKLVDSTDKADLRLIYLALAHMIKFRGHFLIEGDLNPDNSDVDKLFIQLVQTYNQLFEENPINASGVDAKAILSARLSKSRRLENLIAQLPGEKKNGLFGNLIALSLGLTPNFKSNFDLAEDAKLQLSKDTYDDDLDNLLAQIGDQYADLFLAAKNLSDAILLSDILRVNTEITKAPLSASMIKRYDEHHQDLTLLKALVRQQLPEKYKEIFFDQSKNGYAGYIDGGASQEEFYKFIKPILEKMDGTEELLVKLNREDLLRKQRTFDNGSIPHQIHLGELHAILRRQEDFYPFLKDNREKIEKILTFRIPYYVGPLARGNSRFAWMTRKSEETITPWNFEEVVDKGASAQSFIERMTNFDKNLPNEKVLPKHSLLYEYFTVYNELTKVKYVTEGMRKPAFLSGEQKKAIVDLLFKTNRKVTVKQLKEDYFKKIECFDSVEISGVEDRFNASLGTYHDLLKIIKDKDFLDNEENEDILEDIVLTLTLFEDREMIEERLKTYAHLFDDKVMKQLKRRRYTGWGRLSRKLINGIRDKQSGKTILDFLKSDGFANRNFMQLIHDDSLTFKEDIQKAQVSGQGDSLHEHIANLAGSPAIKKGILQTVKVVDELVKVMGRHKPENIVIEMARENQTTQKGQKNSRERMKRIEEGIKELGSQILKEHPVENTQLQNEKLYLYYLQNGRDMYVDQELDINRLSDYDVDHIVPQSFLKDDSIDNKVLTRSDKARGKSDNVPSEEVVKKMKNYWRQLLNAKLITQRKFDNLTKAERGGLSELDKAGFIKRQLVETRQITKHVAQILDSRMNTKYDENDKLIREVKVITLKSKLVSDFRKDFQFYKVREINNYHHAHDAYLNAVVGTALIKKYPKLESEFVYGDYKVYDVRKMIAKSEQEIGKATAKYFFYSNIMNFFKTEITLANGEIRKRPLIETNGETGEIVWDKGRDFATVRKVLSMPQVNIVKKTEVQTGGFSKESILPKRNSDKLIARKKDWDPKKYGGFDSPTVAYSVLVVAKVEKGKSKKLKSVKELLGITIMERSSFEKNPIDFLEAKGYKEVKKDLIIKLPKYSLFELENGRKRMLASAGELQKGNELALPSKYVNFLYLASHYEKLKGSPEDNEQKQLFVEQHKHYLDEIIEQISEFSKRVILADANLDKVLSAYNKHRDKPIREQAENIIHLFTLTNLGAPAAFKYFDTTIDRKRYTSTKEVLDATLIHQSITGLYETRIDLSQLGGDGGGGSPAPGGGGGTLQLEEEYRLFEPESTQKQEMDIWLKNFPQAWAETGGMGTAHCQAPVLIQLKATATPISIRQYPMPHEAYQGIKPHIRRMLDQGILKPCQSPWNTPLLPVKKPGTEDYRPVQDLREVNKRVEDIHPTVPNPYNLLSTLPPSHPWYTVLDLKDAFFCLRLHSESQLLFAFEWRDPEIGLSGQLTWTRLPQGFKNSPTLFNEALHSDLADFRVRYPALVLLQYVDDLLLAAATRTECLEGTKALLETLGNKGYRASAKKAQICLQEVTYLGYSLKDGQRWLTKARKEAILSIPVPKNSRQVREFLGTAGYCRLWIPGFAELAAPLYPLTRPGTLFQWGTEQQLAFEDIKKALLSSPALGLPDITKPFELFIDENSGFAKGVLVQKLGPWKRPVAYLSKKLDTVASGWPPCLRMVAAIAILVKDAGKLTLGQPLTILTSHPVEALVRQPPNKWLSNARMTHYQAMLLDAERVHFGPTVSLNPATLLPLPSGGNHHDCLQILAETHGTRPDLTDQPLPDADLTWYTDGSSFIRNGEREAGAAVTTESEVIWAAPLPPGTSAQRAELIALTQALKMAEGKKLTVYTDSRYAFATTHVHGEIYRRRGWLTSEGKEIKNKNEILALLEALFLPKRLSIIHCPGHQKGDSPQAKGNRLADDTAKKAATETHSSLTVLPAGKRTADGSEFEKRTADGSEFESPKKKAKVE

SEQ ID NO: 1195 - protein, 2089 aa, synthetic construct
MPAAKRVKLDGGDKKYSIGLDIGTNSVGWAVITDEYKVPSKKFKVLGNTDRHSIKKNLIGALLFDSGETAEATRLKRTARRRYTRRKNRICYLQEIFSNEMAKVDDSFFHRLEESFLVEEDKKHERHPIFGNIVDEVAYHEKYPTIYHLRKKLVDSTDKADLRLIYLALAHMIKFRGHFLIEGDLNPDNSDVDKLFIQLVQTYNQLFEENPINASGVDAKAILSARLSKSRRLENLIAQLPGEKKNGLFGNLIALSLGLTPNFKSNFDLAEDAKLQLSKDTYDDDLDNLLAQIGDQYADLFLAAKNLSDAILLSDILRVNTEITKAPLSASMIKRYDEHHQDLTLLKALVRQQLPEKYKEIFFDQSKNGYAGYIDGGASQEEFYKFIKPILEKMDGTEELLVKLNREDLLRKQRTFDNGSIPHQIHLGELHAILRRQEDFYPFLKDNREKIEKILTFRIPYYVGPLARGNSRFAWMTRKSEETITPWNFEEVVDKGASAQSFIERMTNFDKNLPNEKVLPKHSLLYEYFTVYNELTKVKYVTEGMRKPAFLSGEQKKAIVDLLFKTNRKVTVKQLKEDYFKKIECFDSVEISGVEDRFNASLGTYHDLLKIIKDKDFLDNEENEDILEDIVLTLTLFEDREMIEERLKTYAHLFDDKVMKQLKRRRYTGWGRLSRKLINGIRDKQSGKTILDFLKSDGFANRNFMQLIHDDSLTFKEDIQKAQVSGQGDSLHEHIANLAGSPAIKKGILQTVKVVDELVKVMGRHKPENIVIEMARENQTTQKGQKNSRERMKRIEEGIKELGSQILKEHPVENTQLQNEKLYLYYLQNGRDMYVDQELDINRLSDYDVDHIVPQSFLKDDSIDNKVLTRSDKARGKSDNVPSEEVVKKMKNYWRQLLNAKLITQRKFDNLTKAERGGLSELDKAGFIKRQLVETRQITKHVAQILDSRMNTKYDENDKLIREVKVITLKSKLVSDFRKDFQFYKVREINNYHHAHDAYLNAVVGTALIKKYPKLESEFVYGDYKVYDVRKMIAKSEQEIGKATAKYFFYSNIMNFFKTEITLANGEIRKRPLIETNGETGEIVWDKGRDFATVRKVLSMPQVNIVKKTEVQTGGFSKESILPKRNSDKLIARKKDWDPKKYGGFDSPTVAYSVLVVAKVEKGKSKKLKSVKELLGITIMERSSFEKNPIDFLEAKGYKEVKKDLIIKLPKYSLFELENGRKRMLASAGELQKGNELALPSKYVNFLYLASHYEKLKGSPEDNEQKQLFVEQHKHYLDEIIEQISEFSKRVILADANLDKVLSAYNKHRDKPIREQAENIIHLFTLTNLGAPAAFKYFDTTIDRKRYTSTKEVLDATLIHQSITGLYETRIDLSQLGGDGGGGGGGGGTLQLEEEYRLFEPESTQKQEMDIWLKNFPQAWAETGGMGTAHCQAPVLIQLKATATPISIRQYPMPHEAYQGIKPHIRRMLDQGILKPCQSPWNTPLLPVKKPGTEDYRPVQDLREVNKRVEDIHPTVPNPYNLLSTLPPSHPWYTVLDLKDAFFCLRLHSESQLLFAFEWRDPEIGLSGQLTWTRLPQGFKNSPTLFNEALHSDLADFRVRYPALVLLQYVDDLLLAAATRTECLEGTKALLETLGNKGYRASAKKAQICLQEVTYLGYSLKDGQRWLTKARKEAILSIPVPKNSRQVREFLGTAGYCRLWIPGFAELAAPLYPLTRPGTLFQWGTEQQLAFEDIKKALLSSPALGLPDITKPFELFIDENSGFAKGVLVQKLGPWKRPVAYLSKKLDTVASGWPPCLRMVAAIAILVKDAGKLTLGQPLTILTSHPVEALVRQPPNKWLSNARMTHYQAMLLDAERVHFGPTVSLNPATLLPLPSGGNHHDCLQILAETHGTRPDLTDQPLPDADLTWYTDGSSFIRNGEREAGAAVTTESEVIWAAPLPPGTSAQRAELIALTQALKMAEGKKLTVYTDSRYAFATTHVHGEIYRRRGWLTSEGKEIKNKNEILALLEALFLPKRLSIIHCPGHQKGDSPQAKGNRLADDTAKKAATETHSSLTVLPAGKRTADGSEFEKRTADGSEFESPKKKAKVE

SEQ ID NO: 1196 - protein, 2093 aa, synthetic construct
MPAAKRVKLDGGDKKYSIGLDIGTNSVGWAVITDEYKVPSKKFKVLGNTDRHSIKKNLIGALLFDSGETAEATRLKRTARRRYTRRKNRICYLQEIFSNEMAKVDDSFFHRLEESFLVEEDKKHERHPIFGNIVDEVAYHEKYPTIYHLRKKLVDSTDKADLRLIYLALAHMIKFRGHFLIEGDLNPDNSDVDKLFIQLVQTYNQLFEENPINASGVDAKAILSARLSKSRRLENLIAQLPGEKKNGLFGNLIALSLGLTPNFKSNFDLAEDAKLQLSKDTYDDDLDNLLAQIGDQYADLFLAAKNLSDAILLSDILRVNTEITKAPLSASMIKRYDEHHQDLTLLKALVRQQLPEKYKEIFFDQSKNGYAGYIDGGASQEEFYKFIKPILEKMDGTEELLVKLNREDLLRKQRTFDNGSIPHQIHLGELHAILRRQEDFYPFLKDNREKIEKILTFRIPYYVGPLARGNSRFAWMTRKSEETITPWNFEEVVDKGASAQSFIERMTNFDKNLPNEKVLPKHSLLYEYFTVYNELTKVKYVTEGMRKPAFLSGEQKKAIVDLLFKTNRKVTVKQLKEDYFKKIECFDSVEISGVEDRFNASLGTYHDLLKIIKDKDFLDNEENEDILEDIVLTLTLFEDREMIEERLKTYAHLFDDKVMKQLKRRRYTGWGRLSRKLINGIRDKQSGKTILDFLKSDGFANRNFMQLIHDDSLTFKEDIQKAQVSGQGDSLHEHIANLAGSPAIKKGILQTVKVVDELVKVMGRHKPENIVIEMARENQTTQKGQKNSRERMKRIEEGIKELGSQILKEHPVENTQLQNEKLYLYYLQNGRDMYVDQELDINRLSDYDVDHIVPQSFLKDDSIDNKVLTRSDKARGKSDNVPSEEVVKKMKNYWRQLLNAKLITQRKFDNLTKAERGGLSELDKAGFIKRQLVETRQITKHVAQILDSRMNTKYDENDKLIREVKVITLKSKLVSDFRKDFQFYKVREINNYHHAHDAYLNAVVGTALIKKYPKLESEFVYGDYKVYDVRKMIAKSEQEIGKATAKYFFYSNIMNFFKTEITLANGEIRKRPLIETNGETGEIVWDKGRDFATVRKVLSMPQVNIVKKTEVQTGGFSKESILPKRNSDKLIARKKDWDPKKYGGFDSPTVAYSVLVVAKVEKGKSKKLKSVKELLGITIMERSSFEKNPIDFLEAKGYKEVKKDLIIKLPKYSLFELENGRKRMLASAGELQKGNELALPSKYVNFLYLASHYEKLKGSPEDNEQKQLFVEQHKHYLDEIIEQISEFSKRVILADANLDKVLSAYNKHRDKPIREQAENIIHLFTLTNLGAPAAFKYFDTTIDRKRYTSTKEVLDATLIHQSITGLYETRIDLSQLGGDGGPAPGGSGGGGGTLQLEEEYRLFEPESTQKQEMDIWLKNFPQAWAETGGMGTAHCQAPVLIQLKATATPISIRQYPMPHEAYQGIKPHIRRMLDQGILKPCQSPWNTPLLPVKKPGTEDYRPVQDLREVNKRVEDIHPTVPNPYNLLSTLPPSHPWYTVLDLKDAFFCLRLHSESQLLFAFEWRDPEIGLSGQLTWTRLPQGFKNSPTLFNEALHSDLADFRVRYPALVLLQYVDDLLLAAATRTECLEGTKALLETLGNKGYRASAKKAQICLQEVTYLGYSLKDGQRWLTKARKEAILSIPVPKNSRQVREFLGTAGYCRLWIPGFAELAAPLYPLTRPGTLFQWGTEQQLAFEDIKKALLSSPALGLPDITKPFELFIDENSGFAKGVLVQKLGPWKRPVAYLSKKLDTVASGWPPCLRMVAAIAILVKDAGKLTLGQPLTILTSHPVEALVRQPPNKWLSNARMTHYQAMLLDAERVHFGPTVSLNPATLLPLPSGGNHHDCLQILAETHGTRPDLTDQPLPDADLTWYTDGSSFIRNGEREAGAAVTTESEVIWAAPLPPGTSAQRAELIALTQALKMAEGKKLTVYTDSRYAFATTHVHGEIYRRRGWLTSEGKEIKNKNEILALLEALFLPKRLSIIHCPGHQKGDSPQAKGNRLADDTAKKAATETHSSLTVLPAGKRTADGSEFEKRTADGSEFESPKKKAKVE

SEQ ID NO: 1197 - protein, 2130 aa, synthetic construct
MPAAKRVKLDGGDKKYSIGLDIGTNSVGWAVITDEYKVPSKKFKVLGNTDRHSIKKNLIGALLFDSGETAEATRLKRTARRRYTRRKNRICYLQEIFSNEMAKVDDSFFHRLEESFLVEEDKKHERHPIFGNIVDEVAYHEKYPTIYHLRKKLVDSTDKADLRLIYLALAHMIKFRGHFLIEGDLNPDNSDVDKLFIQLVQTYNQLFEENPINASGVDAKAILSARLSKSRRLENLIAQLPGEKKNGLFGNLIALSLGLTPNFKSNFDLAEDAKLQLSKDTYDDDLDNLLAQIGDQYADLFLAAKNLSDAILLSDILRVNTEITKAPLSASMIKRYDEHHQDLTLLKALVRQQLPEKYKEIFFDQSKNGYAGYIDGGASQEEFYKFIKPILEKMDGTEELLVKLNREDLLRKQRTFDNGSIPHQIHLGELHAILRRQEDFYPFLKDNREKIEKILTFRIPYYVGPLARGNSRFAWMTRKSEETITPWNFEEVVDKGASAQSFIERMTNFDKNLPNEKVLPKHSLLYEYFTVYNELTKVKYVTEGMRKPAFLSGEQKKAIVDLLFKTNRKVTVKQLKEDYFKKIECFDSVEISGVEDRFNASLGTYHDLLKIIKDKDFLDNEENEDILEDIVLTLTLFEDREMIEERLKTYAHLFDDKVMKQLKRRRYTGWGRLSRKLINGIRDKQSGKTILDFLKSDGFANRNFMQLIHDDSLTFKEDIQKAQVSGQGDSLHEHIANLAGSPAIKKGILQTVKVVDELVKVMGRHKPENIVIEMARENQTTQKGQKNSRERMKRIEEGIKELGSQILKEHPVENTQLQNEKLYLYYLQNGRDMYVDQELDINRLSDYDVDHIVPQSFLKDDSIDNKVLTRSDKARGKSDNVPSEEVVKKMKNYWRQLLNAKLITQRKFDNLTKAERGGLSELDKAGFIKRQLVETRQITKHVAQILDSRMNTKYDENDKLIREVKVITLKSKLVSDFRKDFQFYKVREINNYHHAHDAYLNAVVGTALIKKYPKLESEFVYGDYKVYDVRKMIAKSEQEIGKATAKYFFYSNIMNFFKTEITLANGEIRKRPLIETNGETGEIVWDKGRDFATVRKVLSMPQVNIVKKTEVQTGGFSKESILPKRNSDKLIARKKDWDPKKYGGFDSPTVAYSVLVVAKVEKGKSKKLKSVKELLGITIMERSSFEKNPIDFLEAKGYKEVKKDLIIKLPKYSLFELENGRKRMLASAGELQKGNELALPSKYVNFLYLASHYEKLKGSPEDNEQKQLFVEQHKHYLDEIIEQISEFSKRVILADANLDKVLSAYNKHRDKPIREQAENIIHLFTLTNLGAPAAFKYFDTTIDRKRYTSTKEVLDATLIHQSITGLYETRIDLSQLGGDGGAEAAAKEAAAKEAAAKEAAAKALEAEAAAKEAAAKEAAAKEAAAKAGGTLQLEEEYRLFEPESTQKQEMDIWLKNFPQAWAETGGMGTAHCQAPVLIQLKATATPISIRQYPMPHEAYQGIKPHIRRMLDQGILKPCQSPWNTPLLPVKKPGTEDYRPVQDLREVNKRVEDIHPTVPNPYNLLSTLPPSHPWYTVLDLKDAFFCLRLHSESQLLFAFEWRDPEIGLSGQLTWTRLPQGFKNSPTLFNEALHSDLADFRVRYPALVLLQYVDDLLLAAATRTECLEGTKALLETLGNKGYRASAKKAQICLQEVTYLGYSLKDGQRWLTKARKEAILSIPVPKNSRQVREFLGKAGYCRLFIPGFAELAAPLYPLTRPGTLFQWGTEQQLAFEDIKKALLSSPALGLPDITKPFELFIDENSGFAKGVLVQKLGPWKRPVAYLSKKLDTVASGWPPCLRMVAAIAILVKDAGKLTLGQPLTILTSHPVEALVRQPPNKWLSNARMTHYQAMLLDAERVHFGPTVSLNPATLLPLPSGGNHHDCLQILAETHGTRPDLTDQPLPDADLTWYTDGSSFIRNGEREAGAAVTTESEVIWAAPLPPGTSAQRAELIALTQALKMAEGKKLTVYTDSRYAFATTHVHGEIYRRRGWLTSEGKEIKNKNEILALLEALFLPKRLSIIHCPGHQKGDSPQAKGNRLADDTAKKAATETHSSLTVLPAGKRTADGSEFEKRTADGSEFESPKKKAKVE

SEQ ID NO: 1198 - protein, 2104 aa, synthetic construct
MPAAKRVKLDGGDKKYSIGLDIGTNSVGWAVITDEYKVPSKKFKVLGNTDRHSIKKNLIGALLFDSGETAEATRLKRTARRRYTRRKNRICYLQEIFSNEMAKVDDSFFHRLEESFLVEEDKKHERHPIFGNIVDEVAYHEKYPTIYHLRKKLVDSTDKADLRLIYLALAHMIKFRGHFLIEGDLNPDNSDVDKLFIQLVQTYNQLFEENPINASGVDAKAILSARLSKSRRLENLIAQLPGEKKNGLFGNLIALSLGLTPNFKSNFDLAEDAKLQLSKDTYDDDLDNLLAQIGDQYADLFLAAKNLSDAILLSDILRVNTEITKAPLSASMIKRYDEHHQDLTLLKALVRQQLPEKYKEIFFDQSKNGYAGYIDGGASQEEFYKFIKPILEKMDGTEELLVKLNREDLLRKQRTFDNGSIPHQIHLGELHAILRRQEDFYPFLKDNREKIEKILTFRIPYYVGPLARGNSRFAWMTRKSEETITPWNFEEVVDKGASAQSFIERMTNFDKNLPNEKVLPKHSLLYEYFTVYNELTKVKYVTEGMRKPAFLSGEQKKAIVDLLFKTNRKVTVKQLKEDYFKKIECFDSVEISGVEDRFNASLGTYHDLLKIIKDKDFLDNEENEDILEDIVLTLTLFEDREMIEERLKTYAHLFDDKVMKQLKRRRYTGWGRLSRKLINGIRDKQSGKTILDFLKSDGFANRNFMQLIHDDSLTFKEDIQKAQVSGQGDSLHEHIANLAGSPAIKKGILQTVKVVDELVKVMGRHKPENIVIEMARENQTTQKGQKNSRERMKRIEEGIKELGSQILKEHPVENTQLQNEKLYLYYLQNGRDMYVDQELDINRLSDYDVDHIVPQSFLKDDSIDNKVLTRSDKARGKSDNVPSEEVVKKMKNYWRQLLNAKLITQRKFDNLTKAERGGLSELDKAGFIKRQLVETRQITKHVAQILDSRMNTKYDENDKLIREVKVITLKSKLVSDFRKDFQFYKVREINNYHHAHDAYLNAVVGTALIKKYPKLESEFVYGDYKVYDVRKMIAKSEQEIGKATAKYFFYSNIMNFFKTEITLANGEIRKRPLIETNGETGEIVWDKGRDFATVRKVLSMPQVNIVKKTEVQTGGFSKESILPKRNSDKLIARKKDWDPKKYGGFDSPTVAYSVLVVAKVEKGKSKKLKSVKELLGITIMERSSFEKNPIDFLEAKGYKEVKKDLIIKLPKYSLFELENGRKRMLASAGELQKGNELALPSKYVNFLYLASHYEKLKGSPEDNEQKQLFVEQHKHYLDEIIEQISEFSKRVILADANLDKVLSAYNKHRDKPIREQAENIIHLFTLTNLGAPAAFKYFDTTIDRKRYTSTKEVLDATLIHQSITGLYETRIDLSQLGGDGGEAAAKEAAAKEAAAKEAAAKGGTLQLEEEYRLFEPESTQKQEMDIWLKNFPQAWAETGGMGTAHCQAPVLIQLKATATPISIRQYPMPHEAYQGIKPHIRRMLDQGILKPCQSPWNTPLLPVKKPGTEDYRPVQDLREVNKRVEDIHPTVPNPYNLLSTLPPSHPWYTVLDLKDAFFCLRLHSESQLLFAFEWRDPEIGLSGQLTWTRLPQGFKNSPTLFNEALHSDLADFRVRYPALVLLQYVDDLLLAAATRTECLEGTKALLETLGNKGYRASAKKAQICLQEVTYLGYSLKDGQRWLTKARKEAILSIPVPKNSRQVREFLGKAGYCRLFIPGFAELAAPLYPLTRPGTLFQWGTEQQLAFEDIKKALLSSPALGLPDITKPFELFIDENSGFAKGVLVQKLGPWKRPVAYLSKKLDTVASGWPPCLRMVAAIAILVKDAGKLTLGQPLTILTSHPVEALVRQPPNKWLSNARMTHYQAMLLDAERVHFGPTVSLNPATLLPLPSGGNHHDCLQILAETHGTRPDLTDQPLPDADLTWYTDGSSFIRNGEREAGAAVTTESEVIWAAPLPPGTSAQRAELIALTQALKMAEGKKLTVYTDSRYAFATTHVHGEIYRRRGWLTSEGKEIKNKNEILALLEALFLPKRLSIIHCPGHQKGDSPQAKGNRLADDTAKKAATETHSSLTVLPAGKRTADGSEFEKRTADGSEFESPKKKAKVE

SEQ ID NO: 1199 - protein, 2114 aa, synthetic construct
MPAAKRVKLDGGDKKYSIGLDIGTNSVGWAVITDEYKVPSKKFKVLGNTDRHSIKKNLIGALLFDSGETAEATRLKRTARRRYTRRKNRICYLQEIFSNEMAKVDDSFFHRLEESFLVEEDKKHERHPIFGNIVDEVAYHEKYPTIYHLRKKLVDSTDKADLRLIYLALAHMIKFRGHFLIEGDLNPDNSDVDKLFIQLVQTYNQLFEENPINASGVDAKAILSARLSKSRRLENLIAQLPGEKKNGLFGNLIALSLGLTPNFKSNFDLAEDAKLQLSKDTYDDDLDNLLAQIGDQYADLFLAAKNLSDAILLSDILRVNTEITKAPLSASMIKRYDEHHQDLTLLKALVRQQLPEKYKEIFFDQSKNGYAGYIDGGASQEEFYKFIKPILEKMDGTEELLVKLNREDLLRKQRTFDNGSIPHQIHLGELHAILRRQEDFYPFLKDNREKIEKILTFRIPYYVGPLARGNSRFAWMTRKSEETITPWNFEEVVDKGASAQSFIERMTNFDKNLPNEKVLPKHSLLYEYFTVYNELTKVKYVTEGMRKPAFLSGEQKKAIVDLLFKTNRKVTVKQLKEDYFKKIECFDSVEISGVEDRFNASLGTYHDLLKIIKDKDFLDNEENEDILEDIVLTLTLFEDREMIEERLKTYAHLFDDKVMKQLKRRRYTGWGRLSRKLINGIRDKQSGKTILDFLKSDGFANRNFMQLIHDDSLTFKEDIQKAQVSGQGDSLHEHIANLAGSPAIKKGILQTVKVVDELVKVMGRHKPENIVIEMARENQTTQKGQKNSRERMKRIEEGIKELGSQILKEHPVENTQLQNEKLYLYYLQNGRDMYVDQELDINRLSDYDVDHIVPQSFLKDDSIDNKVLTRSDKARGKSDNVPSEEVVKKMKNYWRQLLNAKLITQRKFDNLTKAERGGLSELDKAGFIKRQLVETRQITKHVAQILDSRMNTKYDENDKLIREVKVITLKSKLVSDFRKDFQFYKVREINNYHHAHDAYLNAVVGTALIKKYPKLESEFVYGDYKVYDVRKMIAKSEQEIGKATAKYFFYSNIMNFFKTEITLANGEIRKRPLIETNGETGEIVWDKGRDFATVRKVLSMPQVNIVKKTEVQTGGFSKESILPKRNSDKLIARKKDWDPKKYGGFDSPTVAYSVLVVAKVEKGKSKKLKSVKELLGITIMERSSFEKNPIDFLEAKGYKEVKKDLIIKLPKYSLFELENGRKRMLASAGELQKGNELALPSKYVNFLYLASHYEKLKGSPEDNEQKQLFVEQHKHYLDEIIEQISEFSKRVILADANLDKVLSAYNKHRDKPIREQAENIIHLFTLTNLGAPAAFKYFDTTIDRKRYTSTKEVLDATLIHQSITGLYETRIDLSQLGGDGGEAAAKEAAAKEAAAKEAAAKEAAAKEAAAKGGTLQLEEEYRLFEPESTQKQEMDIWLKNFPQAWAETGGMGTAHCQAPVLIQLKATATPISIRQYPMPHEAYQGIKPHIRRMLDQGILKPCQSPWNTPLLPVKKPGTEDYRPVQDLREVNKRVEDIHPTVPNPYNLLSTLPPSHPWYTVLDLKDAFFCLRLHSESQLLFAFEWRDPEIGLSGQLTWTRLPQGFKNSPTLFNEALHSDLADFRVRYPALVLLQYVDDLLLAAATRTECLEGTKALLETLGNKGYRASAKKAQICLQEVTYLGYSLKDGQRWLTKARKEAILSIPVPKNSRQVREFLGKAGYCRLFIPGFAELAAPLYPLTRPGTLFQWGTEQQLAFEDIKKALLSSPALGLPDITKPFELFIDENSGFAKGVLVQKLGPWKRPVAYLSKKLDTVASGWPPCLRMVAAIAILVKDAGKLTLGQPLTILTSHPVEALVRQPPNKWLSNARMTHYQAMLLDAERVHFGPTVSLNPATLLPLPSGGNHHDCLQILAETHGTRPDLTDQPLPDADLTWYTDGSSFIRNGEREAGAAVTTESEVIWAAPLPPGTSAQRAELIALTQALKMAEGKKLTVYTDSRYAFATTHVHGEIYRRRGWLTSEGKEIKNKNEILALLEALFLPKRLSIIHCPGHQKGDSPQAKGNRLADDTAKKAATETHSSLTVLPAGKRTADGSEFEKRTADGSEFESPKKKAKVE

SEQ ID NO: 1200 - protein, 2095 aa, synthetic construct
MPAAKRVKLDGGDKKYSIGLDIGTNSVGWAVITDEYKVPSKKFKVLGNTDRHSIKKNLIGALLFDSGETAEATRLKRTARRRYTRRKNRICYLQEIFSNEMAKVDDSFFHRLEESFLVEEDKKHERHPIFGNIVDEVAYHEKYPTIYHLRKKLVDSTDKADLRLIYLALAHMIKFRGHFLIEGDLNPDNSDVDKLFIQLVQTYNQLFEENPINASGVDAKAILSARLSKSRRLENLIAQLPGEKKNGLFGNLIALSLGLTPNFKSNFDLAEDAKLQLSKDTYDDDLDNLLAQIGDQYADLFLAAKNLSDAILLSDILRVNTEITKAPLSASMIKRYDEHHQDLTLLKALVRQQLPEKYKEIFFDQSKNGYAGYIDGGASQEEFYKFIKPILEKMDGTEELLVKLNREDLLRKQRTFDNGSIPHQIHLGELHAILRRQEDFYPFLKDNREKIEKILTFRIPYYVGPLARGNSRFAWMTRKSEETITPWNFEEVVDKGASAQSFIERMTNFDKNLPNEKVLPKHSLLYEYFTVYNELTKVKYVTEGMRKPAFLSGEQKKAIVDLLFKTNRKVTVKQLKEDYFKKIECFDSVEISGVEDRFNASLGTYHDLLKIIKDKDFLDNEENEDILEDIVLTLTLFEDREMIEERLKTYAHLFDDKVMKQLKRRRYTGWGRLSRKLINGIRDKQSGKTILDFLKSDGFANRNFMQLIHDDSLTFKEDIQKAQVSGQGDSLHEHIANLAGSPAIKKGILQTVKVVDELVKVMGRHKPENIVIEMARENQTTQKGQKNSRERMKRIEEGIKELGSQILKEHPVENTQLQNEKLYLYYLQNGRDMYVDQELDINRLSDYDVDHIVPQSFLKDDSIDNKVLTRSDKARGKSDNVPSEEVVKKMKNYWRQLLNAKLITQRKFDNLTKAERGGLSELDKAGFIKRQLVETRQITKHVAQILDSRMNTKYDENDKLIREVKVITLKSKLVSDFRKDFQFYKVREINNYHHAHDAYLNAVVGTALIKKYPKLESEFVYGDYKVYDVRKMIAKSEQEIGKATAKYFFYSNIMNFFKTEITLANGEIRKRPLIETNGETGEIVWDKGRDFATVRKVLSMPQVNIVKKTEVQTGGFSKESILPKRNSDKLIARKKDWDPKKYGGFDSPTVAYSVLVVAKVEKGKSKKLKSVKELLGITIMERSSFEKNPIDFLEAKGYKEVKKDLIIKLPKYSLFELENGRKRMLASAGELQKGNELALPSKYVNFLYLASHYEKLKGSPEDNEQKQLFVEQHKHYLDEIIEQISEFSKRVILADANLDKVLSAYNKHRDKPIREQAENIIHLFTLTNLGAPAAFKYFDTTIDRKRYTSTKEVLDATLIHQSITGLYETRIDLSQLGGDGGPAPEAAAKGGGGGTLQLEEEYRLFEPESTQKQEMDIWLKNFPQAWAETGGMGTAHCQAPVLIQLKATATPISIRQYPMPHEAYQGIKPHIRRMLDQGILKPCQSPWNTPLLPVKKPGTEDYRPVQDLREVNKRVEDIHPTVPNPYNLLSTLPPSHPWYTVLDLKDAFFCLRLHSESQLLFAFEWRDPEIGLSGQLTWTRLPQGFKNSPTLFNEALHSDLADFRVRYPALVLLQYVDDLLLAAATRTECLEGTKALLETLGNKGYRASAKKAQICLQEVTYLGYSLKDGQRWLTKARKEAILSIPVPKNSRQVREFLGKAGYCRLFIPGFAELAAPLYPLTRPGTLFQWGTEQQLAFEDIKKALLSSPALGLPDITKPFELFIDENSGFAKGVLVQKLGPWKRPVAYLSKKLDTVASGWPPCLRMVAAIAILVKDAGKLTLGQPLTILTSHPVEALVRQPPNKWLSNARMTHYQAMLLDAERVHFGPTVSLNPATLLPLPSGGNHHDCLQILAETHGTRPDLTDQPLPDADLTWYTDGSSFIRNGEREAGAAVTTESEVIWAAPLPPGTSAQRAELIALTQALKMAEGKKLTVYTDSRYAFATTHVHGEIYRRRGWLTSEGKEIKNKNEILALLEALFLPKRLSIIHCPGHQKGDSPQAKGNRLADDTAKKAATETHSSLTVLPAGKRTADGSEFEKRTADGSEFESPKKKAKVE

SEQ ID NO: 1201 - protein, 2095 aa, synthetic construct
MPAAKRVKLDGGDKKYSIGLDIGTNSVGWAVITDEYKVPSKKFKVLGNTDRHSIKKNLIGALLFDSGETAEATRLKRTARRRYTRRKNRICYLQEIFSNEMAKVDDSFFHRLEESFLVEEDKKHERHPIFGNIVDEVAYHEKYPTIYHLRKKLVDSTDKADLRLIYLALAHMIKFRGHFLIEGDLNPDNSDVDKLFIQLVQTYNQLFEENPINASGVDAKAILSARLSKSRRLENLIAQLPGEKKNGLFGNLIALSLGLTPNFKSNFDLAEDAKLQLSKDTYDDDLDNLLAQIGDQYADLFLAAKNLSDAILLSDILRVNTEITKAPLSASMIKRYDEHHQDLTLLKALVRQQLPEKYKEIFFDQSKNGYAGYIDGGASQEEFYKFIKPILEKMDGTEELLVKLNREDLLRKQRTFDNGSIPHQIHLGELHAILRRQEDFYPFLKDNREKIEKILTFRIPYYVGPLARGNSRFAWMTRKSEETITPWNFEEVVDKGASAQSFIERMTNFDKNLPNEKVLPKHSLLYEYFTVYNELTKVKYVTEGMRKPAFLSGEQKKAIVDLLFKTNRKVTVKQLKEDYFKKIECFDSVEISGVEDRFNASLGTYHDLLKIIKDKDFLDNEENEDILEDIVLTLTLFEDREMIEERLKTYAHLFDDKVMKQLKRRRYTGWGRLSRKLINGIRDKQSGKTILDFLKSDGFANRNFMQLIHDDSLTFKEDIQKAQVSGQGDSLHEHIANLAGSPAIKKGILQTVKVVDELVKVMGRHKPENIVIEMARENQTTQKGQKNSRERMKRIEEGIKELGSQILKEHPVENTQLQNEKLYLYYLQNGRDMYVDQELDINRLSDYDVDHIVPQSFLKDDSIDNKVLTRSDKARGKSDNVPSEEVVKKMKNYWRQLLNAKLITQRKFDNLTKAERGGLSELDKAGFIKRQLVETRQITKHVAQILDSRMNTKYDENDKLIREVKVITLKSKLVSDFRKDFQFYKVREINNYHHAHDAYLNAVVGTALIKKYPKLESEFVYGDYKVYDVRKMIAKSEQEIGKATAKYFFYSNIMNFFKTEITLANGEIRKRPLIETNGETGEIVWDKGRDFATVRKVLSMPQVNIVKKTEVQTGGFSKESILPKRNSDKLIARKKDWDPKKYGGFDSPTVAYSVLVVAKVEKGKSKKLKSVKELLGITIMERSSFEKNPIDFLEAKGYKEVKKDLIIKLPKYSLFELENGRKRMLASAGELQKGNELALPSKYVNFLYLASHYEKLKGSPEDNEQKQLFVEQHKHYLDEIIEQISEFSKRVILADANLDKVLSAYNKHRDKPIREQAENIIHLFTLTNLGAPAAFKYFDTTIDRKRYTSTKEVLDATLIHQSITGLYETRIDLSQLGGDGGEAAAKGSSPAPGGTLQLEEEYRLFEPESTQKQEMDIWLKNFPQAWAETGGMGTAHCQAPVLIQLKATATPISIRQYPMPHEAYQGIKPHIRRMLDQGILKPCQSPWNTPLLPVKKPGTEDYRPVQDLREVNKRVEDIHPTVPNPYNLLSTLPPSHPWYTVLDLKDAFFCLRLHSESQLLFAFEWRDPEIGLSGQLTWTRLPQGFKNSPTLFNEALHSDLADFRVRYPALVLLQYVDDLLLAAATRTECLEGTKALLETLGNKGYRASAKKAQICLQEVTYLGYSLKDGQRWLTKARKEAILSIPVPKNSRQVREFLGKAGYCRLFIPGFAELAAPLYPLTRPGTLFQWGTEQQLAFEDIKKALLSSPALGLPDITKPFELFIDENSGFAKGVLVQKLGPWKRPVAYLSKKLDTVASGWPPCLRMVAAIAILVKDAGKLTLGQPLTILTSHPVEALVRQPPNKWLSNARMTHYQAMLLDAERVHFGPTVSLNPATLLPLPSGGNHHDCLQILAETHGTRPDLTDQPLPDADLTWYTDGSSFIRNGEREAGAAVTTESEVIWAAPLPPGTSAQRAELIALTQALKMAEGKKLTVYTDSRYAFATTHVHGEIYRRRGWLTSEGKEIKNKNEILALLEALFLPKRLSIIHCPGHQKGDSPQAKGNRLADDTAKKAATETHSSLTVLPAGKRTADGSEFEKRTADGSEFESPKKKAKVE

SEQ ID NO: 1202 - protein, 2109 aa, synthetic construct
MPAAKRVKLDGGDKKYSIGLDIGTNSVGWAVITDEYKVPSKKFKVLGNTDRHSIKKNLIGALLFDSGETAEATRLKRTARRRYTRRKNRICYLQEIFSNEMAKVDDSFFHRLEESFLVEEDKKHERHPIFGNIVDEVAYHEKYPTIYHLRKKLVDSTDKADLRLIYLALAHMIKFRGHFLIEGDLNPDNSDVDKLFIQLVQTYNQLFEENPINASGVDAKAILSARLSKSRRLENLIAQLPGEKKNGLFGNLIALSLGLTPNFKSNFDLAEDAKLQLSKDTYDDDLDNLLAQIGDQYADLFLAAKNLSDAILLSDILRVNTEITKAPLSASMIKRYDEHHQDLTLLKALVRQQLPEKYKEIFFDQSKNGYAGYIDGGASQEEFYKFIKPILEKMDGTEELLVKLNREDLLRKQRTFDNGSIPHQIHLGELHAILRRQEDFYPFLKDNREKIEKILTFRIPYYVGPLARGNSRFAWMTRKSEETITPWNFEEVVDKGASAQSFIERMTNFDKNLPNEKVLPKHSLLYEYFTVYNELTKVKYVTEGMRKPAFLSGEQKKAIVDLLFKTNRKVTVKQLKEDYFKKIECFDSVEISGVEDRFNASLGTYHDLLKIIKDKDFLDNEENEDILEDIVLTLTLFEDREMIEERLKTYAHLFDDKVMKQLKRRRYTGWGRLSRKLINGIRDKQSGKTILDFLKSDGFANRNFMQLIHDDSLTFKEDIQKAQVSGQGDSLHEHIANLAGSPAIKKGILQTVKVVDELVKVMGRHKPENIVIEMARENQTTQKGQKNSRERMKRIEEGIKELGSQILKEHPVENTQLQNEKLYLYYLQNGRDMYVDQELDINRLSDYDVDHIVPQSFLKDDSIDNKVLTRSDKARGKSDNVPSEEVVKKMKNYWRQLLNAKLITQRKFDNLTKAERGGLSELDKAGFIKRQLVETRQITKHVAQILDSRMNTKYDENDKLIREVKVITLKSKLVSDFRKDFQFYKVREINNYHHAHDAYLNAVVGTALIKKYPKLESEFVYGDYKVYDVRKMIAKSEQEIGKATAKYFFYSNIMNFFKTEITLANGEIRKRPLIETNGETGEIVWDKGRDFATVRKVLSMPQVNIVKKTEVQTGGFSKESILPKRNSDKLIARKKDWDPKKYGGFDSPTVAYSVLVVAKVEKGKSKKLKSVKELLGITIMERSSFEKNPIDFLEAKGYKEVKKDLIIKLPKYSLFELENGRKRMLASAGELQKGNELALPSKYVNFLYLASHYEKLKGSPEDNEQKQLFVEQHKHYLDEIIEQISEFSKRVILADANLDKVLSAYNKHRDKPIREQAENIIHLFTLTNLGAPAAFKYFDTTIDRKRYTSTKEVLDATLIHQSITGLYETRIDLSQLGGDGGGGGGSGGGGSGGGGSGGGGSGGGGSGGTLQLEEEYRLFEPESTQKQEMDIWLKNFPQAWAETGGMGTAHCQAPVLIQLKATATPISIRQYPMPHEAYQGIKPHIRRMLDQGILKPCQSPWNTPLLPVKKPGTEDYRPVQDLREVNKRVEDIHPTVPNPYNLLSTLPPSHPWYTVLDLKDAFFCLRLHSESQLLFAFEWRDPEIGLSGQLTWTRLPQGFKNSPTLFNEALHSDLADFRVRYPALVLLQYVDDLLLAAATRTECLEGTKALLETLGNKGYRASAKKAQICLQEVTYLGYSLKDGQRWLTKARKEAILSIPVPKNSRQVREFLGKAGYCRLFIPGFAELAAPLYPLTRPGTLFQWGTEQQLAFEDIKKALLSSPALGLPDITKPFELFIDENSGFAKGVLVQKLGPWKRPVAYLSKKLDTVASGWPPCLRMVAAIAILVKDAGKLTLGQPLTILTSHPVEALVRQPPNKWLSNARMTHYQAMLLDAERVHFGPTVSLNPATLLPLPSGGNHHDCLQILAETHGTRPDLTDQPLPDADLTWYTDGSSFIRNGEREAGAAVTTESEVIWAAPLPPGTSAQRAELIALTQALKMAEGKKLTVYTDSRYAFATTHVHGEIYRRRGWLTSEGKEIKNKNEILALLEALFLPKRLSIIHCPGHQKGDSPQAKGNRLADDTAKKAATETHSSLTVLPAGKRTADGSEFEKRTADGSEFESPKKKAKVE

SEQ ID NO: 1203 - protein, 2099 aa, synthetic construct
MPAAKRVKLDGGDKKYSIGLDIGTNSVGWAVITDEYKVPSKKFKVLGNTDRHSIKKNLIGALLFDSGETAEATRLKRTARRRYTRRKNRICYLQEIFSNEMAKVDDSFFHRLEESFLVEEDKKHERHPIFGNIVDEVAYHEKYPTIYHLRKKLVDSTDKADLRLIYLALAHMIKFRGHFLIEGDLNPDNSDVDKLFIQLVQTYNQLFEENPINASGVDAKAILSARLSKSRRLENLIAQLPGEKKNGLFGNLIALSLGLTPNFKSNFDLAEDAKLQLSKDTYDDDLDNLLAQIGDQYADLFLAAKNLSDAILLSDILRVNTEITKAPLSASMIKRYDEHHQDLTLLKALVRQQLPEKYKEIFFDQSKNGYAGYIDGGASQEEFYKFIKPILEKMDGTEELLVKLNREDLLRKQRTFDNGSIPHQIHLGELHAILRRQEDFYPFLKDNREKIEKILTFRIPYYVGPLARGNSRFAWMTRKSEETITPWNFEEVVDKGASAQSFIERMTNFDKNLPNEKVLPKHSLLYEYFTVYNELTKVKYVTEGMRKPAFLSGEQKKAIVDLLFKTNRKVTVKQLKEDYFKKIECFDSVEISGVEDRFNASLGTYHDLLKIIKDKDFLDNEENEDILEDIVLTLTLFEDREMIEERLKTYAHLFDDKVMKQLKRRRYTGWGRLSRKLINGIRDKQSGKTILDFLKSDGFANRNFMQLIHDDSLTFKEDIQKAQVSGQGDSLHEHIANLAGSPAIKKGILQTVKVVDELVKVMGRHKPENIVIEMARENQTTQKGQKNSRERMKRIEEGIKELGSQILKEHPVENTQLQNEKLYLYYLQNGRDMYVDQELDINRLSDYDVDHIVPQSFLKDDSIDNKVLTRSDKARGKSDNVPSEEVVKKMKNYWRQLLNAKLITQRKFDNLTKAERGGLSELDKAGFIKRQLVETRQITKHVAQILDSRMNTKYDENDKLIREVKVITLKSKLVSDFRKDFQFYKVREINNYHHAHDAYLNAVVGTALIKKYPKLESEFVYGDYKVYDVRKMIAKSEQEIGKATAKYFFYSNIMNFFKTEITLANGEIRKRPLIETNGETGEIVWDKGRDFATVRKVLSMPQVNIVKKTEVQTGGFSKESILPKRNSDKLIARKKDWDPKKYGGFDSPTVAYSVLVVAKVEKGKSKKLKSVKELLGITIMERSSFEKNPIDFLEAKGYKEVKKDLIIKLPKYSLFELENGRKRMLASAGELQKGNELALPSKYVNFLYLASHYEKLKGSPEDNEQKQLFVEQHKHYLDEIIEQISEFSKRVILADANLDKVLSAYNKHRDKPIREQAENIIHLFTLTNLGAPAAFKYFDTTIDRKRYTSTKEVLDATLIHQSITGLYETRIDLSQLGGDGGGGGGSEAAAKGGGGSGGTLQLEEEYRLFEPESTQKQEMDIWLKNFPQAWAETGGMGTAHCQAPVLIQLKATATPISIRQYPMPHEAYQGIKPHIRRMLDQGILKPCQSPWNTPLLPVKKPGTEDYRPVQDLREVNKRVEDIHPTVPNPYNLLSTLPPSHPWYTVLDLKDAFFCLRLHSESQLLFAFEWRDPEIGLSGQLTWTRLPQGFKNSPTLFNEALHSDLADFRVRYPALVLLQYVDDLLLAAATRTECLEGTKALLETLGNKGYRASAKKAQICLQEVTYLGYSLKDGQRWLTKARKEAILSIPVPKNSRQVREFLGKAGYCRLFIPGFAELAAPLYPLTRPGTLFQWGTEQQLAFEDIKKALLSSPALGLPDITKPFELFIDENSGFAKGVLVQKLGPWKRPVAYLSKKLDTVASGWPPCLRMVAAIAILVKDAGKLTLGQPLTILTSHPVEALVRQPPNKWLSNARMTHYQAMLLDAERVHFGPTVSLNPATLLPLPSGGNHHDCLQILAETHGTRPDLTDQPLPDADLTWYTDGSSFIRNGEREAGAAVTTESEVIWAAPLPPGTSAQRAELIALTQALKMAEGKKLTVYTDSRYAFATTHVHGEIYRRRGWLTSEGKEIKNKNEILALLEALFLPKRLSIIHCPGHQKGDSPQAKGNRLADDTAKKAATETHSSLTVLPAGKRTADGSEFEKRTADGSEFESPKKKAKVE

SEQ ID NO: 1204 - protein, 2092 aa, synthetic construct
MPAAKRVKLDGGDKKYSIGLDIGTNSVGWAVITDEYKVPSKKFKVLGNTDRHSIKKNLIGALLFDSGETAEATRLKRTARRRYTRRKNRICYLQEIFSNEMAKVDDSFFHRLEESFLVEEDKKHERHPIFGNIVDEVAYHEKYPTIYHLRKKLVDSTDKADLRLIYLALAHMIKFRGHFLIEGDLNPDNSDVDKLFIQLVQTYNQLFEENPINASGVDAKAILSARLSKSRRLENLIAQLPGEKKNGLFGNLIALSLGLTPNFKSNFDLAEDAKLQLSKDTYDDDLDNLLAQIGDQYADLFLAAKNLSDAILLSDILRVNTEITKAPLSASMIKRYDEHHQDLTLLKALVRQQLPEKYKEIFFDQSKNGYAGYIDGGASQEEFYKFIKPILEKMDGTEELLVKLNREDLLRKQRTFDNGSIPHQIHLGELHAILRRQEDFYPFLKDNREKIEKILTFRIPYYVGPLARGNSRFAWMTRKSEETITPWNFEEVVDKGASAQSFIERMTNFDKNLPNEKVLPKHSLLYEYFTVYNELTKVKYVTEGMRKPAFLSGEQKKAIVDLLFKTNRKVTVKQLKEDYFKKIECFDSVEISGVEDRFNASLGTYHDLLKIIKDKDFLDNEENEDILEDIVLTLTLFEDREMIEERLKTYAHLFDDKVMKQLKRRRYTGWGRLSRKLINGIRDKQSGKTILDFLKSDGFANRNFMQLIHDDSLTFKEDIQKAQVSGQGDSLHEHIANLAGSPAIKKGILQTVKVVDELVKVMGRHKPENIVIEMARENQTTQKGQKNSRERMKRIEEGIKELGSQILKEHPVENTQLQNEKLYLYYLQNGRDMYVDQELDINRLSDYDVDHIVPQSFLKDDSIDNKVLTRSDKARGKSDNVPSEEVVKKMKNYWRQLLNAKLITQRKFDNLTKAERGGLSELDKAGFIKRQLVETRQITKHVAQILDSRMNTKYDENDKLIREVKVITLKSKLVSDFRKDFQFYKVREINNYHHAHDAYLNAVVGTALIKKYPKLESEFVYGDYKVYDVRKMIAKSEQEIGKATAKYFFYSNIMNFFKTEITLANGEIRKRPLIETNGETGEIVWDKGRDFATVRKVLSMPQVNIVKKTEVQTGGFSKESILPKRNSDKLIARKKDWDPKKYGGFDSPTVAYSVLVVAKVEKGKSKKLKSVKELLGITIMERSSFEKNPIDFLEAKGYKEVKKDLIIKLPKYSLFELENGRKRMLASAGELQKGNELALPSKYVNFLYLASHYEKLKGSPEDNEQKQLFVEQHKHYLDEIIEQISEFSKRVILADANLDKVLSAYNKHRDKPIREQAENIIHLFTLTNLGAPAAFKYFDTTIDRKRYTSTKEVLDATLIHQSITGLYETRIDLSQLGGDGGGGSEAAAKGGTLQLEEEYRLFEPESTQKQEMDIWLKNFPQAWAETGGMGTAHCQAPVLIQLKATATPISIRQYPMPHEAYQGIKPHIRRMLDQGILKPCQSPWNTPLLPVKKPGTEDYRPVQDLREVNKRVEDIHPTVPNPYNLLSTLPPSHPWYTVLDLKDAFFCLRLHSESQLLFAFEWRDPEIGLSGQLTWTRLPQGFKNSPTLFNEALHSDLADFRVRYPALVLLQYVDDLLLAAATRTECLEGTKALLETLGNKGYRASAKKAQICLQEVTYLGYSLKDGQRWLTKARKEAILSIPVPKNSRQVREFLGKAGYCRLFIPGFAELAAPLYPLTRPGTLFQWGTEQQLAFEDIKKALLSSPALGLPDITKPFELFIDENSGFAKGVLVQKLGPWKRPVAYLSKKLDTVASGWPPCLRMVAAIAILVKDAGKLTLGQPLTILTSHPVEALVRQPPNKWLSNARMTHYQAMLLDAERVHFGPTVSLNPATLLPLPSGGNHHDCLQILAETHGTRPDLTDQPLPDADLTWYTDGSSFIRNGEREAGAAVTTESEVIWAAPLPPGTSAQRAELIALTQALKMAEGKKLTVYTDSRYAFATTHVHGEIYRRRGWLTSEGKEIKNKNEILALLEALFLPKRLSIIHCPGHQKGDSPQAKGNRLADDTAKKAATETHSSLTVLPAGKRTADGSEFEKRTADGSEFESPKKKAKVE

SEQ ID NO: 1205 - protein, 2100 aa, synthetic construct
MPAAKRVKLDGGDKKYSIGLDIGTNSVGWAVITDEYKVPSKKFKVLGNTDRHSIKKNLIGALLFDSGETAEATRLKRTARRRYTRRKNRICYLQEIFSNEMAKVDDSFFHRLEESFLVEEDKKHERHPIFGNIVDEVAYHEKYPTIYHLRKKLVDSTDKADLRLIYLALAHMIKFRGHFLIEGDLNPDNSDVDKLFIQLVQTYNQLFEENPINASGVDAKAILSARLSKSRRLENLIAQLPGEKKNGLFGNLIALSLGLTPNFKSNFDLAEDAKLQLSKDTYDDDLDNLLAQIGDQYADLFLAAKNLSDAILLSDILRVNTEITKAPLSASMIKRYDEHHQDLTLLKALVRQQLPEKYKEIFFDQSKNGYAGYIDGGASQEEFYKFIKPILEKMDGTEELLVKLNREDLLRKQRTFDNGSIPHQIHLGELHAILRRQEDFYPFLKDNREKIEKILTFRIPYYVGPLARGNSRFAWMTRKSEETITPWNFEEVVDKGASAQSFIERMTNFDKNLPNEKVLPKHSLLYEYFTVYNELTKVKYVTEGMRKPAFLSGEQKKAIVDLLFKTNRKVTVKQLKEDYFKKIECFDSVEISGVEDRFNASLGTYHDLLKIIKDKDFLDNEENEDILEDIVLTLTLFEDREMIEERLKTYAHLFDDKVMKQLKRRRYTGWGRLSRKLINGIRDKQSGKTILDFLKSDGFANRNFMQLIHDDSLTFKEDIQKAQVSGQGDSLHEHIANLAGSPAIKKGILQTVKVVDELVKVMGRHKPENIVIEMARENQTTQKGQKNSRERMKRIEEGIKELGSQILKEHPVENTQLQNEKLYLYYLQNGRDMYVDQELDINRLSDYDVDHIVPQSFLKDDSIDNKVLTRSDKARGKSDNVPSEEVVKKMKNYWRQLLNAKLITQRKFDNLTKAERGGLSELDKAGFIKRQLVETRQITKHVAQILDSRMNTKYDENDKLIREVKVITLKSKLVSDFRKDFQFYKVREINNYHHAHDAYLNAVVGTALIKKYPKLESEFVYGDYKVYDVRKMIAKSEQEIGKATAKYFFYSNIMNFFKTEITLANGEIRKRPLIETNGETGEIVWDKGRDFATVRKVLSMPQVNIVKKTEVQTGGFSKESILPKRNSDKLIARKKDWDPKKYGGFDSPTVAYSVLVVAKVEKGKSKKLKSVKELLGITIMERSSFEKNPIDFLEAKGYKEVKKDLIIKLPKYSLFELENGRKRMLASAGELQKGNELALPSKYVNFLYLASHYEKLKGSPEDNEQKQLFVEQHKHYLDEIIEQISEFSKRVILADANLDKVLSAYNKHRDKPIREQAENIIHLFTLTNLGAPAAFKYFDTTIDRKRYTSTKEVLDATLIHQSITGLYETRIDLSQLGGDGGSGSETPGTSESATPESGGTLQLEEEYRLFEPESTQKQEMDIWLKNFPQAWAETGGMGTAHCQAPVLIQLKATATPISIRQYPMPHEAYQGIKPHIRRMLDQGILKPCQSPWNTPLLPVKKPGTEDYRPVQDLREVNKRVEDIHPTVPNPYNLLSTLPPSHPWYTVLDLKDAFFCLRLHSESQLLFAFEWRDPEIGLSGQLTWTRLPQGFKNSPTLFNEALHSDLADFRVRYPALVLLQYVDDLLLAAATRTECLEGTKALLETLGNKGYRASAKKAQICLQEVTYLGYSLKDGQRWLTKARKEAILSIPVPKNSRQVREFLGKAGYCRLFIPGFAELAAPLYPLTRPGTLFQWGTEQQLAFEDIKKALLSSPALGLPDITKPFELFIDENSGFAKGVLVQKLGPWKRPVAYLSKKLDTVASGWPPCLRMVAAIAILVKDAGKLTLGQPLTILTSHPVEALVRQPPNKWLSNARMTHYQAMLLDAERVHFGPTVSLNPATLLPLPSGGNHHDCLQILAETHGTRPDLTDQPLPDADLTWYTDGSSFIRNGEREAGAAVTTESEVIWAAPLPPGTSAQRAELIALTQALKMAEGKKLTVYTDSRYAFATTHVHGEIYRRRGWLTSEGKEIKNKNEILALLEALFLPKRLSIIHCPGHQKGDSPQAKGNRLADDTAKKAATETHSSLTVLPAGKRTADGSEFEKRTADGSEFESPKKKAKVE

SEQ ID NO: 1206 - protein, 2094 aa, synthetic construct
MPAAKRVKLDGGDKKYSIGLDIGTNSVGWAVITDEYKVPSKKFKVLGNTDRHSIKKNLIGALLFDSGETAEATRLKRTARRRYTRRKNRICYLQEIFSNEMAKVDDSFFHRLEESFLVEEDKKHERHPIFGNIVDEVAYHEKYPTIYHLRKKLVDSTDKADLRLIYLALAHMIKFRGHFLIEGDLNPDNSDVDKLFIQLVQTYNQLFEENPINASGVDAKAILSARLSKSRRLENLIAQLPGEKKNGLFGNLIALSLGLTPNFKSNFDLAEDAKLQLSKDTYDDDLDNLLAQIGDQYADLFLAAKNLSDAILLSDILRVNTEITKAPLSASMIKRYDEHHQDLTLLKALVRQQLPEKYKEIFFDQSKNGYAGYIDGGASQEEFYKFIKPILEKMDGTEELLVKLNREDLLRKQRTFDNGSIPHQIHLGELHAILRRQEDFYPFLKDNREKIEKILTFRIPYYVGPLARGNSRFAWMTRKSEETITPWNFEEVVDKGASAQSFIERMTNFDKNLPNEKVLPKHSLLYEYFTVYNELTKVKYVTEGMRKPAFLSGEQKKAIVDLLFKTNRKVTVKQLKEDYFKKIECFDSVEISGVEDRFNASLGTYHDLLKIIKDKDFLDNEENEDILEDIVLTLTLFEDREMIEERLKTYAHLFDDKVMKQLKRRRYTGWGRLSRKLINGIRDKQSGKTILDFLKSDGFANRNFMQLIHDDSLTFKEDIQKAQVSGQGDSLHEHIANLAGSPAIKKGILQTVKVVDELVKVMGRHKPENIVIEMARENQTTQKGQKNSRERMKRIEEGIKELGSQILKEHPVENTQLQNEKLYLYYLQNGRDMYVDQELDINRLSDYDVDHIVPQSFLKDDSIDNKVLTRSDKARGKSDNVPSEEVVKKMKNYWRQLLNAKLITQRKFDNLTKAERGGLSELDKAGFIKRQLVETRQITKHVAQILDSRMNTKYDENDKLIREVKVITLKSKLVSDFRKDFQFYKVREINNYHHAHDAYLNAVVGTALIKKYPKLESEFVYGDYKVYDVRKMIAKSEQEIGKATAKYFFYSNIMNFFKTEITLANGEIRKRPLIETNGETGEIVWDKGRDFATVRKVLSMPQVNIVKKTEVQTGGFSKESILPKRNSDKLIARKKDWDPKKYGGFDSPTVAYSVLVVAKVEKGKSKKLKSVKELLGITIMERSSFEKNPIDFLEAKGYKEVKKDLIIKLPKYSLFELENGRKRMLASAGELQKGNELALPSKYVNFLYLASHYEKLKGSPEDNEQKQLFVEQHKHYLDEIIEQISEFSKRVILADANLDKVLSAYNKHRDKPIREQAENIIHLFTLTNLGAPAAFKYFDTTIDRKRYTSTKEVLDATLIHQSITGLYETRIDLSQLGGDGGEAAAKEAAAKGGTLQLEEEYRLFEPESTQKQEMDIWLKNFPQAWAETGGMGTAHCQAPVLIQLKATATPISIRQYPMPHEAYQGIKPHIRRMLDQGILKPCQSPWNTPLLPVKKPGTEDYRPVQDLREVNKRVEDIHPTVPNPYNLLSTLPPSHPWYTVLDLKDAFFCLRLHSESQLLFAFEWRDPEIGLSGQLTWTRLPQGFKNSPTLFNEALHSDLADFRVRYPALVLLQYVDDLLLAAATRTECLEGTKALLETLGNKGYRASAKKAQICLQEVTYLGYSLKDGQRWLTKARKEAILSIPVPKNSRQVREFLGKAGYCRLFIPGFAELAAPLYPLTRPGTLFQWGTEQQLAFEDIKKALLSSPALGLPDITKPFELFIDENSGFAKGVLVQKLGPWKRPVAYLSKKLDTVASGWPPCLRMVAAIAILVKDAGKLTLGQPLTILTSHPVEALVRQPPNKWLSNARMTHYQAMLLDAERVHFGPTVSLNPATLLPLPSGGNHHDCLQILAETHGTRPDLTDQPLPDADLTWYTDGSSFIRNGEREAGAAVTTESEVIWAAPLPPGTSAQRAELIALTQALKMAEGKKLTVYTDSRYAFATTHVHGEIYRRRGWLTSEGKEIKNKNEILALLEALFLPKRLSIIHCPGHQKGDSPQAKGNRLADDTAKKAATETHSSLTVLPAGKRTADGSEFEKRTADGSEFESPKKKAKVE

SEQ ID NO: 1207 - protein, 2096 aa, synthetic construct
MPAAKRVKLDGGDKKYSIGLDIGTNSVGWAVITDEYKVPSKKFKVLGNTDRHSIKKNLIGALLFDSGETAEATRLKRTARRRYTRRKNRICYLQEIFSNEMAKVDDSFFHRLEESFLVEEDKKHERHPIFGNIVDEVAYHEKYPTIYHLRKKLVDSTDKADLRLIYLALAHMIKFRGHFLIEGDLNPDNSDVDKLFIQLVQTYNQLFEENPINASGVDAKAILSARLSKSRRLENLIAQLPGEKKNGLFGNLIALSLGLTPNFKSNFDLAEDAKLQLSKDTYDDDLDNLLAQIGDQYADLFLAAKNLSDAILLSDILRVNTEITKAPLSASMIKRYDEHHQDLTLLKALVRQQLPEKYKEIFFDQSKNGYAGYIDGGASQEEFYKFIKPILEKMDGTEELLVKLNREDLLRKQRTFDNGSIPHQIHLGELHAILRRQEDFYPFLKDNREKIEKILTFRIPYYVGPLARGNSRFAWMTRKSEETITPWNFEEVVDKGASAQSFIERMTNFDKNLPNEKVLPKHSLLYEYFTVYNELTKVKYVTEGMRKPAFLSGEQKKAIVDLLFKTNRKVTVKQLKEDYFKKIECFDSVEISGVEDRFNASLGTYHDLLKIIKDKDFLDNEENEDILEDIVLTLTLFEDREMIEERLKTYAHLFDDKVMKQLKRRRYTGWGRLSRKLINGIRDKQSGKTILDFLKSDGFANRNFMQLIHDDSLTFKEDIQKAQVSGQGDSLHEHIANLAGSPAIKKGILQTVKVVDELVKVMGRHKPENIVIEMARENQTTQKGQKNSRERMKRIEEGIKELGSQILKEHPVENTQLQNEKLYLYYLQNGRDMYVDQELDINRLSDYDVDHIVPQSFLKDDSIDNKVLTRSDKARGKSDNVPSEEVVKKMKNYWRQLLNAKLITQRKFDNLTKAERGGLSELDKAGFIKRQLVETRQITKHVAQILDSRMNTKYDENDKLIREVKVITLKSKLVSDFRKDFQFYKVREINNYHHAHDAYLNAVVGTALIKKYPKLESEFVYGDYKVYDVRKMIAKSEQEIGKATAKYFFYSNIMNFFKTEITLANGEIRKRPLIETNGETGEIVWDKGRDFATVRKVLSMPQVNIVKKTEVQTGGFSKESILPKRNSDKLIARKKDWDPKKYGGFDSPTVAYSVLVVAKVEKGKSKKLKSVKELLGITIMERSSFEKNPIDFLEAKGYKEVKKDLIIKLPKYSLFELENGRKRMLASAGELQKGNELALPSKYVNFLYLASHYEKLKGSPEDNEQKQLFVEQHKHYLDEIIEQISEFSKRVILADANLDKVLSAYNKHRDKPIREQAENIIHLFTLTNLGAPAAFKYFDTTIDRKRYTSTKEVLDATLIHQSITGLYETRIDLSQLGGDGGGGSGGSGGSGGSGGTLQLEEEYRLFEPESTQKQEMDIWLKNFPQAWAETGGMGTAHCQAPVLIQLKATATPISIRQYPMPHEAYQGIKPHIRRMLDQGILKPCQSPWNTPLLPVKKPGTEDYRPVQDLREVNKRVEDIHPTVPNPYNLLSTLPPSHPWYTVLDLKDAFFCLRLHSESQLLFAFEWRDPEIGLSGQLTWTRLPQGFKNSPTLFNEALHSDLADFRVRYPALVLLQYVDDLLLAAATRTECLEGTKALLETLGNKGYRASAKKAQICLQEVTYLGYSLKDGQRWLTKARKEAILSIPVPKNSRQVREFLGKAGYCRLFIPGFAELAAPLYPLTRPGTLFQWGTEQQLAFEDIKKALLSSPALGLPDITKPFELFIDENSGFAKGVLVQKLGPWKRPVAYLSKKLDTVASGWPPCLRMVAAIAILVKDAGKLTLGQPLTILTSHPVEALVRQPPNKWLSNARMTHYQAMLLDAERVHFGPTVSLNPATLLPLPSGGNHHDCLQILAETHGTRPDLTDQPLPDADLTWYTDGSSFIRNGEREAGAAVTTESEVIWAAPLPPGTSAQRAELIALTQALKMAEGKKLTVYTDSRYAFATTHVHGEIYRRRGWLTSEGKEIKNKNEILALLEALFLPKRLSIIHCPGHQKGDSPQAKGNRLADDTAKKAATETHSSLTVLPAGKRTADGSEFEKRTADGSEFESPKKKAKVE

SEQ ID NO: 1208 - protein, 2095 aa, synthetic construct
MPAAKRVKLDGGDKKYSIGLDIGTNSVGWAVITDEYKVPSKKFKVLGNTDRHSIKKNLIGALLFDSGETAEATRLKRTARRRYTRRKNRICYLQEIFSNEMAKVDDSFFHRLEESFLVEEDKKHERHPIFGNIVDEVAYHEKYPTIYHLRKKLVDSTDKADLRLIYLALAHMIKFRGHFLIEGDLNPDNSDVDKLFIQLVQTYNQLFEENPINASGVDAKAILSARLSKSRRLENLIAQLPGEKKNGLFGNLIALSLGLTPNFKSNFDLAEDAKLQLSKDTYDDDLDNLLAQIGDQYADLFLAAKNLSDAILLSDILRVNTEITKAPLSASMIKRYDEHHQDLTLLKALVRQQLPEKYKEIFFDQSKNGYAGYIDGGASQEEFYKFIKPILEKMDGTEELLVKLNREDLLRKQRTFDNGSIPHQIHLGELHAILRRQEDFYPFLKDNREKIEKILTFRIPYYVGPLARGNSRFAWMTRKSEETITPWNFEEVVDKGASAQSFIERMTNFDKNLPNEKVLPKHSLLYEYFTVYNELTKVKYVTEGMRKPAFLSGEQKKAIVDLLFKTNRKVTVKQLKEDYFKKIECFDSVEISGVEDRFNASLGTYHDLLKIIKDKDFLDNEENEDILEDIVLTLTLFEDREMIEERLKTYAHLFDDKVMKQLKRRRYTGWGRLSRKLINGIRDKQSGKTILDFLKSDGFANRNFMQLIHDDSLTFKEDIQKAQVSGQGDSLHEHIANLAGSPAIKKGILQTVKVVDELVKVMGRHKPENIVIEMARENQTTQKGQKNSRERMKRIEEGIKELGSQILKEHPVENTQLQNEKLYLYYLQNGRDMYVDQELDINRLSDYDVDHIVPQSFLKDDSIDNKVLTRSDKARGKSDNVPSEEVVKKMKNYWRQLLNAKLITQRKFDNLTKAERGGLSELDKAGFIKRQLVETRQITKHVAQILDSRMNTKYDENDKLIREVKVITLKSKLVSDFRKDFQFYKVREINNYHHAHDAYLNAVVGTALIKKYPKLESEFVYGDYKVYDVRKMIAKSEQEIGKATAKYFFYSNIMNFFKTEITLANGEIRKRPLIETNGETGEIVWDKGRDFATVRKVLSMPQVNIVKKTEVQTGGFSKESILPKRNSDKLIARKKDWDPKKYGGFDSPTVAYSVLVVAKVEKGKSKKLKSVKELLGITIMERSSFEKNPIDFLEAKGYKEVKKDLIIKLPKYSLFELENGRKRMLASAGELQKGNELALPSKYVNFLYLASHYEKLKGSPEDNEQKQLFVEQHKHYLDEIIEQISEFSKRVILADANLDKVLSAYNKHRDKPIREQAENIIHLFTLTNLGAPAAFKYFDTTIDRKRYTSTKEVLDATLIHQSITGLYETRIDLSQLGGDGGPAPEAAAKGSSGGTLQLEEEYRLFEPESTQKQEMDIWLKNFPQAWAETGGMGTAHCQAPVLIQLKATATPISIRQYPMPHEAYQGIKPHIRRMLDQGILKPCQSPWNTPLLPVKKPGTEDYRPVQDLREVNKRVEDIHPTVPNPYNLLSTLPPSHPWYTVLDLKDAFFCLRLHSESQLLFAFEWRDPEIGLSGQLTWTRLPQGFKNSPTLFNEALHSDLADFRVRYPALVLLQYVDDLLLAAATRTECLEGTKALLETLGNKGYRASAKKAQICLQEVTYLGYSLKDGQRWLTKARKEAILSIPVPKNSRQVREFLGKAGYCRLFIPGFAELAAPLYPLTRPGTLFQWGTEQQLAFEDIKKALLSSPALGLPDITKPFELFIDENSGFAKGVLVQKLGPWKRPVAYLSKKLDTVASGWPPCLRMVAAIAILVKDAGKLTLGQPLTILTSHPVEALVRQPPNKWLSNARMTHYQAMLLDAERVHFGPTVSLNPATLLPLPSGGNHHDCLQILAETHGTRPDLTDQPLPDADLTWYTDGSSFIRNGEREAGAAVTTESEVIWAAPLPPGTSAQRAELIALTQALKMAEGKKLTVYTDSRYAFATTHVHGEIYRRRGWLTSEGKEIKNKNEILALLEALFLPKRLSIIHCPGHQKGDSPQAKGNRLADDTAKKAATETHSSLTVLPAGKRTADGSEFEKRTADGSEFESPKKKAKVE

SEQ ID NO: 1209 - protein, 2114 aa, synthetic construct
MPAAKRVKLDGGDKKYSIGLDIGTNSVGWAVITDEYKVPSKKFKVLGNTDRHSIKKNLIGALLFDSGETAEATRLKRTARRRYTRRKNRICYLQEIFSNEMAKVDDSFFHRLEESFLVEEDKKHERHPIFGNIVDEVAYHEKYPTIYHLRKKLVDSTDKADLRLIYLALAHMIKFRGHFLIEGDLNPDNSDVDKLFIQLVQTYNQLFEENPINASGVDAKAILSARLSKSRRLENLIAQLPGEKKNGLFGNLIALSLGLTPNFKSNFDLAEDAKLQLSKDTYDDDLDNLLAQIGDQYADLFLAAKNLSDAILLSDILRVNTEITKAPLSASMIKRYDEHHQDLTLLKALVRQQLPEKYKEIFFDQSKNGYAGYIDGGASQEEFYKFIKPILEKMDGTEELLVKLNREDLLRKQRTFDNGSIPHQIHLGELHAILRRQEDFYPFLKDNREKIEKILTFRIPYYVGPLARGNSRFAWMTRKSEETITPWNFEEVVDKGASAQSFIERMTNFDKNLPNEKVLPKHSLLYEYFTVYNELTKVKYVTEGMRKPAFLSGEQKKAIVDLLFKTNRKVTVKQLKEDYFKKIECFDSVEISGVEDRFNASLGTYHDLLKIIKDKDFLDNEENEDILEDIVLTLTLFEDREMIEERLKTYAHLFDDKVMKQLKRRRYTGWGRLSRKLINGIRDKQSGKTILDFLKSDGFANRNFMQLIHDDSLTFKEDIQKAQVSGQGDSLHEHIANLAGSPAIKKGILQTVKVVDELVKVMGRHKPENIVIEMARENQTTQKGQKNSRERMKRIEEGIKELGSQILKEHPVENTQLQNEKLYLYYLQNGRDMYVDQELDINRLSDYDVDHIVPQSFLKDDSIDNKVLTRSDKARGKSDNVPSEEVVKKMKNYWRQLLNAKLITQRKFDNLTKAERGGLSELDKAGFIKRQLVETRQITKHVAQILDSRMNTKYDENDKLIREVKVITLKSKLVSDFRKDFQFYKVREINNYHHAHDAYLNAVVGTALIKKYPKLESEFVYGDYKVYDVRKMIAKSEQEIGKATAKYFFYSNIMNFFKTEITLANGEIRKRPLIETNGETGEIVWDKGRDFATVRKVLSMPQVNIVKKTEVQTGGFSKESILPKRNSDKLIARKKDWDPKKYGGFDSPTVAYSVLVVAKVEKGKSKKLKSVKELLGITIMERSSFEKNPIDFLEAKGYKEVKKDLIIKLPKYSLFELENGRKRMLASAGELQKGNELALPSKYVNFLYLASHYEKLKGSPEDNEQKQLFVEQHKHYLDEIIEQISEFSKRVILADANLDKVLSAYNKHRDKPIREQAENIIHLFTLTNLGAPAAFKYFDTTIDRKRYTSTKEVLDATLIHQSITGLYETRIDLSQLGGDGGGGGGSGGGGSGGGGSGGGGSGGGGSGGGGSGGTLQLEEEYRLFEPESTQKQEMDIWLKNFPQAWAETGGMGTAHCQAPVLIQLKATATPISIRQYPMPHEAYQGIKPHIRRMLDQGILKPCQSPWNTPLLPVKKPGTEDYRPVQDLREVNKRVEDIHPTVPNPYNLLSTLPPSHPWYTVLDLKDAFFCLRLHSESQLLFAFEWRDPEIGLSGQLTWTRLPQGFKNSPTLFNEALHSDLADFRVRYPALVLLQYVDDLLLAAATRTECLEGTKALLETLGNKGYRASAKKAQICLQEVTYLGYSLKDGQRWLTKARKEAILSIPVPKNSRQVREFLGKAGYCRLFIPGFAELAAPLYPLTRPGTLFQWGTEQQLAFEDIKKALLSSPALGLPDITKPFELFIDENSGFAKGVLVQKLGPWKRPVAYLSKKLDTVASGWPPCLRMVAAIAILVKDAGKLTLGQPLTILTSHPVEALVRQPPNKWLSNARMTHYQAMLLDAERVHFGPTVSLNPATLLPLPSGGNHHDCLQILAETHGTRPDLTDQPLPDADLTWYTDGSSFIRNGEREAGAAVTTESEVIWAAPLPPGTSAQRAELIALTQALKMAEGKKLTVYTDSRYAFATTHVHGEIYRRRGWLTSEGKEIKNKNEILALLEALFLPKRLSIIHCPGHQKGDSPQAKGNRLADDTAKKAATETHSSLTVLPAGKRTADGSEFEKRTADGSEFESPKKKAKVE

SEQ ID NO: 1210 - protein, 2095 aa, synthetic construct
MPAAKRVKLDGGDKKYSIGLDIGTNSVGWAVITDEYKVPSKKFKVLGNTDRHSIKKNLIGALLFDSGETAEATRLKRTARRRYTRRKNRICYLQEIFSNEMAKVDDSFFHRLEESFLVEEDKKHERHPIFGNIVDEVAYHEKYPTIYHLRKKLVDSTDKADLRLIYLALAHMIKFRGHFLIEGDLNPDNSDVDKLFIQLVQTYNQLFEENPINASGVDAKAILSARLSKSRRLENLIAQLPGEKKNGLFGNLIALSLGLTPNFKSNFDLAEDAKLQLSKDTYDDDLDNLLAQIGDQYADLFLAAKNLSDAILLSDILRVNTEITKAPLSASMIKRYDEHHQDLTLLKALVRQQLPEKYKEIFFDQSKNGYAGYIDGGASQEEFYKFIKPILEKMDGTEELLVKLNREDLLRKQRTFDNGSIPHQIHLGELHAILRRQEDFYPFLKDNREKIEKILTFRIPYYVGPLARGNSRFAWMTRKSEETITPWNFEEVVDKGASAQSFIERMTNFDKNLPNEKVLPKHSLLYEYFTVYNELTKVKYVTEGMRKPAFLSGEQKKAIVDLLFKTNRKVTVKQLKEDYFKKIECFDSVEISGVEDRFNASLGTYHDLLKIIKDKDFLDNEENEDILEDIVLTLTLFEDREMIEERLKTYAHLFDDKVMKQLKRRRYTGWGRLSRKLINGIRDKQSGKTILDFLKSDGFANRNFMQLIHDDSLTFKEDIQKAQVSGQGDSLHEHIANLAGSPAIKKGILQTVKVVDELVKVMGRHKPENIVIEMARENQTTQKGQKNSRERMKRIEEGIKELGSQILKEHPVENTQLQNEKLYLYYLQNGRDMYVDQELDINRLSDYDVDHIVPQSFLKDDSIDNKVLTRSDKARGKSDNVPSEEVVKKMKNYWRQLLNAKLITQRKFDNLTKAERGGLSELDKAGFIKRQLVETRQITKHVAQILDSRMNTKYDENDKLIREVKVITLKSKLVSDFRKDFQFYKVREINNYHHAHDAYLNAVVGTALIKKYPKLESEFVYGDYKVYDVRKMIAKSEQEIGKATAKYFFYSNIMNFFKTEITLANGEIRKRPLIETNGETGEIVWDKGRDFATVRKVLSMPQVNIVKKTEVQTGGFSKESILPKRNSDKLIARKKDWDPKKYGGFDSPTVAYSVLVVAKVEKGKSKKLKSVKELLGITIMERSSFEKNPIDFLEAKGYKEVKKDLIIKLPKYSLFELENGRKRMLASAGELQKGNELALPSKYVNFLYLASHYEKLKGSPEDNEQKQLFVEQHKHYLDEIIEQISEFSKRVILADANLDKVLSAYNKHRDKPIREQAENIIHLFTLTNLGAPAAFKYFDTTIDRKRYTSTKEVLDATLIHQSITGLYETRIDLSQLGGDGGEAAAKGSSGGGGGTLQLEEEYRLFEPESTQKQEMDIWLKNFPQAWAETGGMGTAHCQAPVLIQLKATATPISIRQYPMPHEAYQGIKPHIRRMLDQGILKPCQSPWNTPLLPVKKPGTEDYRPVQDLREVNKRVEDIHPTVPNPYNLLSTLPPSHPWYTVLDLKDAFFCLRLHSESQLLFAFEWRDPEIGLSGQLTWTRLPQGFKNSPTLFNEALHSDLADFRVRYPALVLLQYVDDLLLAAATRTECLEGTKALLETLGNKGYRASAKKAQICLQEVTYLGYSLKDGQRWLTKARKEAILSIPVPKNSRQVREFLGKAGYCRLFIPGFAELAAPLYPLTRPGTLFQWGTEQQLAFEDIKKALLSSPALGLPDITKPFELFIDENSGFAKGVLVQKLGPWKRPVAYLSKKLDTVASGWPPCLRMVAAIAILVKDAGKLTLGQPLTILTSHPVEALVRQPPNKWLSNARMTHYQAMLLDAERVHFGPTVSLNPATLLPLPSGGNHHDCLQILAETHGTRPDLTDQPLPDADLTWYTDGSSFIRNGEREAGAAVTTESEVIWAAPLPPGTSAQRAELIALTQALKMAEGKKLTVYTDSRYAFATTHVHGEIYRRRGWLTSEGKEIKNKNEILALLEALFLPKRLSIIHCPGHQKGDSPQAKGNRLADDTAKKAATETHSSLTVLPAGKRTADGSEFEKRTADGSEFESPKKKAKVE

SEQ ID NO: 1211 - protein, 2090 aa, synthetic construct
MPAAKRVKLDGGDKKYSIGLDIGTNSVGWAVITDEYKVPSKKFKVLGNTDRHSIKKNLIGALLFDSGETAEATRLKRTARRRYTRRKNRICYLQEIFSNEMAKVDDSFFHRLEESFLVEEDKKHERHPIFGNIVDEVAYHEKYPTIYHLRKKLVDSTDKADLRLIYLALAHMIKFRGHFLIEGDLNPDNSDVDKLFIQLVQTYNQLFEENPINASGVDAKAILSARLSKSRRLENLIAQLPGEKKNGLFGNLIALSLGLTPNFKSNFDLAEDAKLQLSKDTYDDDLDNLLAQIGDQYADLFLAAKNLSDAILLSDILRVNTEITKAPLSASMIKRYDEHHQDLTLLKALVRQQLPEKYKEIFFDQSKNGYAGYIDGGASQEEFYKFIKPILEKMDGTEELLVKLNREDLLRKQRTFDNGSIPHQIHLGELHAILRRQEDFYPFLKDNREKIEKILTFRIPYYVGPLARGNSRFAWMTRKSEETITPWNFEEVVDKGASAQSFIERMTNFDKNLPNEKVLPKHSLLYEYFTVYNELTKVKYVTEGMRKPAFLSGEQKKAIVDLLFKTNRKVTVKQLKEDYFKKIECFDSVEISGVEDRFNASLGTYHDLLKIIKDKDFLDNEENEDILEDIVLTLTLFEDREMIEERLKTYAHLFDDKVMKQLKRRRYTGWGRLSRKLINGIRDKQSGKTILDFLKSDGFANRNFMQLIHDDSLTFKEDIQKAQVSGQGDSLHEHIANLAGSPAIKKGILQTVKVVDELVKVMGRHKPENIVIEMARENQTTQKGQKNSRERMKRIEEGIKELGSQILKEHPVENTQLQNEKLYLYYLQNGRDMYVDQELDINRLSDYDVDHIVPQSFLKDDSIDNKVLTRSDKARGKSDNVPSEEVVKKMKNYWRQLLNAKLITQRKFDNLTKAERGGLSELDKAGFIKRQLVETRQITKHVAQILDSRMNTKYDENDKLIREVKVITLKSKLVSDFRKDFQFYKVREINNYHHAHDAYLNAVVGTALIKKYPKLESEFVYGDYKVYDVRKMIAKSEQEIGKATAKYFFYSNIMNFFKTEITLANGEIRKRPLIETNGETGEIVWDKGRDFATVRKVLSMPQVNIVKKTEVQTGGFSKESILPKRNSDKLIARKKDWDPKKYGGFDSPTVAYSVLVVAKVEKGKSKKLKSVKELLGITIMERSSFEKNPIDFLEAKGYKEVKKDLIIKLPKYSLFELENGRKRMLASAGELQKGNELALPSKYVNFLYLASHYEKLKGSPEDNEQKQLFVEQHKHYLDEIIEQISEFSKRVILADANLDKVLSAYNKHRDKPIREQAENIIHLFTLTNLGAPAAFKYFDTTIDRKRYTSTKEVLDATLIHQSITGLYETRIDLSQLGGDGGGGGGGGGGTLQLEEEYRLFEPESTQKQEMDIWLKNFPQAWAETGGMGTAHCQAPVLIQLKATATPISIRQYPMPHEAYQGIKPHIRRMLDQGILKPCQSPWNTPLLPVKKPGTEDYRPVQDLREVNKRVEDIHPTVPNPYNLLSTLPPSHPWYTVLDLKDAFFCLRLHSESQLLFAFEWRDPEIGLSGQLTWTRLPQGFKNSPTLFNEALHSDLADFRVRYPALVLLQYVDDLLLAAATRTECLEGTKALLETLGNKGYRASAKKAQICLQEVTYLGYSLKDGQRWLTKARKEAILSIPVPKNSRQVREFLGKAGYCRLFIPGFAELAAPLYPLTRPGTLFQWGTEQQLAFEDIKKALLSSPALGLPDITKPFELFIDENSGFAKGVLVQKLGPWKRPVAYLSKKLDTVASGWPPCLRMVAAIAILVKDAGKLTLGQPLTILTSHPVEALVRQPPNKWLSNARMTHYQAMLLDAERVHFGPTVSLNPATLLPLPSGGNHHDCLQILAETHGTRPDLTDQPLPDADLTWYTDGSSFIRNGEREAGAAVTTESEVIWAAPLPPGTSAQRAELIALTQALKMAEGKKLTVYTDSRYAFATTHVHGEIYRRRGWLTSEGKEIKNKNEILALLEALFLPKRLSIIHCPGHQKGDSPQAKGNRLADDTAKKAATETHSSLTVLPAGKRTADGSEFEKRTADGSEFESPKKKAKVE

SEQ ID NO: 1212 - protein, 2102 aa, synthetic construct
MPAAKRVKLDGGDKKYSIGLDIGTNSVGWAVITDEYKVPSKKFKVLGNTDRHSIKKNLIGALLFDSGETAEATRLKRTARRRYTRRKNRICYLQEIFSNEMAKVDDSFFHRLEESFLVEEDKKHERHPIFGNIVDEVAYHEKYPTIYHLRKKLVDSTDKADLRLIYLALAHMIKFRGHFLIEGDLNPDNSDVDKLFIQLVQTYNQLFEENPINASGVDAKAILSARLSKSRRLENLIAQLPGEKKNGLFGNLIALSLGLTPNFKSNFDLAEDAKLQLSKDTYDDDLDNLLAQIGDQYADLFLAAKNLSDAILLSDILRVNTEITKAPLSASMIKRYDEHHQDLTLLKALVRQQLPEKYKEIFFDQSKNGYAGYIDGGASQEEFYKFIKPILEKMDGTEELLVKLNREDLLRKQRTFDNGSIPHQIHLGELHAILRRQEDFYPFLKDNREKIEKILTFRIPYYVGPLARGNSRFAWMTRKSEETITPWNFEEVVDKGASAQSFIERMTNFDKNLPNEKVLPKHSLLYEYFTVYNELTKVKYVTEGMRKPAFLSGEQKKAIVDLLFKTNRKVTVKQLKEDYFKKIECFDSVEISGVEDRFNASLGTYHDLLKIIKDKDFLDNEENEDILEDIVLTLTLFEDREMIEERLKTYAHLFDDKVMKQLKRRRYTGWGRLSRKLINGIRDKQSGKTILDFLKSDGFANRNFMQLIHDDSLTFKEDIQKAQVSGQGDSLHEHIANLAGSPAIKKGILQTVKVVDELVKVMGRHKPENIVIEMARENQTTQKGQKNSRERMKRIEEGIKELGSQILKEHPVENTQLQNEKLYLYYLQNGRDMYVDQELDINRLSDYDVDHIVPQSFLKDDSIDNKVLTRSDKARGKSDNVPSEEVVKKMKNYWRQLLNAKLITQRKFDNLTKAERGGLSELDKAGFIKRQLVETRQITKHVAQILDSRMNTKYDENDKLIREVKVITLKSKLVSDFRKDFQFYKVREINNYHHAHDAYLNAVVGTALIKKYPKLESEFVYGDYKVYDVRKMIAKSEQEIGKATAKYFFYSNIMNFFKTEITLANGEIRKRPLIETNGETGEIVWDKGRDFATVRKVLSMPQVNIVKKTEVQTGGFSKESILPKRNSDKLIARKKDWDPKKYGGFDSPTVAYSVLVVAKVEKGKSKKLKSVKELLGITIMERSSFEKNPIDFLEAKGYKEVKKDLIIKLPKYSLFELENGRKRMLASAGELQKGNELALPSKYVNFLYLASHYEKLKGSPEDNEQKQLFVEQHKHYLDEIIEQISEFSKRVILADANLDKVLSAYNKHRDKPIREQAENIIHLFTLTNLGAPAAFKYFDTTIDRKRYTSTKEVLDATLIHQSITGLYETRIDLSQLGGDGGGSSGSSGSSGSSGSSGSSGGTLQLEEEYRLFEPESTQKQEMDIWLKNFPQAWAETGGMGTAHCQAPVLIQLKATATPISIRQYPMPHEAYQGIKPHIRRMLDQGILKPCQSPWNTPLLPVKKPGTEDYRPVQDLREVNKRVEDIHPTVPNPYNLLSTLPPSHPWYTVLDLKDAFFCLRLHSESQLLFAFEWRDPEIGLSGQLTWTRLPQGFKNSPTLFNEALHSDLADFRVRYPALVLLQYVDDLLLAAATRTECLEGTKALLETLGNKGYRASAKKAQICLQEVTYLGYSLKDGQRWLTKARKEAILSIPVPKNSRQVREFLGKAGYCRLFIPGFAELAAPLYPLTRPGTLFQWGTEQQLAFEDIKKALLSSPALGLPDITKPFELFIDENSGFAKGVLVQKLGPWKRPVAYLSKKLDTVASGWPPCLRMVAAIAILVKDAGKLTLGQPLTILTSHPVEALVRQPPNKWLSNARMTHYQAMLLDAERVHFGPTVSLNPATLLPLPSGGNHHDCLQILAETHGTRPDLTDQPLPDADLTWYTDGSSFIRNGEREAGAAVTTESEVIWAAPLPPGTSAQRAELIALTQALKMAEGKKLTVYTDSRYAFATTHVHGEIYRRRGWLTSEGKEIKNKNEILALLEALFLPKRLSIIHCPGHQKGDSPQAKGNRLADDTAKKAATETHSSLTVLPAGKRTADGSEFEKRTADGSEFESPKKKAKVE

SEQ ID NO: 1213 - protein, 2099 aa, synthetic construct
MPAAKRVKLDGGDKKYSIGLDIGTNSVGWAVITDEYKVPSKKFKVLGNTDRHSIKKNLIGALLFDSGETAEATRLKRTARRRYTRRKNRICYLQEIFSNEMAKVDDSFFHRLEESFLVEEDKKHERHPIFGNIVDEVAYHEKYPTIYHLRKKLVDSTDKADLRLIYLALAHMIKFRGHFLIEGDLNPDNSDVDKLFIQLVQTYNQLFEENPINASGVDAKAILSARLSKSRRLENLIAQLPGEKKNGLFGNLIALSLGLTPNFKSNFDLAEDAKLQLSKDTYDDDLDNLLAQIGDQYADLFLAAKNLSDAILLSDILRVNTEITKAPLSASMIKRYDEHHQDLTLLKALVRQQLPEKYKEIFFDQSKNGYAGYIDGGASQEEFYKFIKPILEKMDGTEELLVKLNREDLLRKQRTFDNGSIPHQIHLGELHAILRRQEDFYPFLKDNREKIEKILTFRIPYYVGPLARGNSRFAWMTRKSEETITPWNFEEVVDKGASAQSFIERMTNFDKNLPNEKVLPKHSLLYEYFTVYNELTKVKYVTEGMRKPAFLSGEQKKAIVDLLFKTNRKVTVKQLKEDYFKKIECFDSVEISGVEDRFNASLGTYHDLLKIIKDKDFLDNEENEDILEDIVLTLTLFEDREMIEERLKTYAHLFDDKVMKQLKRRRYTGWGRLSRKLINGIRDKQSGKTILDFLKSDGFANRNFMQLIHDDSLTFKEDIQKAQVSGQGDSLHEHIANLAGSPAIKKGILQTVKVVDELVKVMGRHKPENIVIEMARENQTTQKGQKNSRERMKRIEEGIKELGSQILKEHPVENTQLQNEKLYLYYLQNGRDMYVDQELDINRLSDYDVDHIVPQSFLKDDSIDNKVLTRSDKARGKSDNVPSEEVVKKMKNYWRQLLNAKLITQRKFDNLTKAERGGLSELDKAGFIKRQLVETRQITKHVAQILDSRMNTKYDENDKLIREVKVITLKSKLVSDFRKDFQFYKVREINNYHHAHDAYLNAVVGTALIKKYPKLESEFVYGDYKVYDVRKMIAKSEQEIGKATAKYFFYSNIMNFFKTEITLANGEIRKRPLIETNGETGEIVWDKGRDFATVRKVLSMPQVNIVKKTEVQTGGFSKESILPKRNSDKLIARKKDWDPKKYGGFDSPTVAYSVLVVAKVEKGKSKKLKSVKELLGITIMERSSFEKNPIDFLEAKGYKEVKKDLIIKLPKYSLFELENGRKRMLASAGELQKGNELALPSKYVNFLYLASHYEKLKGSPEDNEQKQLFVEQHKHYLDEIIEQISEFSKRVILADANLDKVLSAYNKHRDKPIREQAENIIHLFTLTNLGAPAAFKYFDTTIDRKRYTSTKEVLDATLIHQSITGLYETRIDLSQLGGDGGEAAAKEAAAKEAAAKGGTLQLEEEYRLFEPESTQKQEMDIWLKNFPQAWAETGGMGTAHCQAPVLIQLKATATPISIRQYPMPHEAYQGIKPHIRRMLDQGILKPCQSPWNTPLLPVKKPGTEDYRPVQDLREVNKRVEDIHPTVPNPYNLLSTLPPSHPWYTVLDLKDAFFCLRLHSESQLLFAFEWRDPEIGLSGQLTWTRLPQGFKNSPTLFNEALHSDLADFRVRYPALVLLQYVDDLLLAAATRTECLEGTKALLETLGNKGYRASAKKAQICLQEVTYLGYSLKDGQRWLTKARKEAILSIPVPKNSRQVREFLGKAGYCRLFIPGFAELAAPLYPLTRPGTLFQWGTEQQLAFEDIKKALLSSPALGLPDITKPFELFIDENSGFAKGVLVQKLGPWKRPVAYLSKKLDTVASGWPPCLRMVAAIAILVKDAGKLTLGQPLTILTSHPVEALVRQPPNKWLSNARMTHYQAMLLDAERVHFGPTVSLNPATLLPLPSGGNHHDCLQILAETHGTRPDLTDQPLPDADLTWYTDGSSFIRNGEREAGAAVTTESEVIWAAPLPPGTSAQRAELIALTQALKMAEGKKLTVYTDSRYAFATTHVHGEIYRRRGWLTSEGKEIKNKNEILALLEALFLPKRLSIIHCPGHQKGDSPQAKGNRLADDTAKKAATETHSSLTVLPAGKRTADGSEFEKRTADGSEFESPKKKAKVE

SEQ ID NO: 1214 - protein, 2095 aa, synthetic construct
MPAAKRVKLDGGDKKYSIGLDIGTNSVGWAVITDEYKVPSKKFKVLGNTDRHSIKKNLIGALLFDSGETAEATRLKRTARRRYTRRKNRICYLQEIFSNEMAKVDDSFFHRLEESFLVEEDKKHERHPIFGNIVDEVAYHEKYPTIYHLRKKLVDSTDKADLRLIYLALAHMIKFRGHFLIEGDLNPDNSDVDKLFIQLVQTYNQLFEENPINASGVDAKAILSARLSKSRRLENLIAQLPGEKKNGLFGNLIALSLGLTPNFKSNFDLAEDAKLQLSKDTYDDDLDNLLAQIGDQYADLFLAAKNLSDAILLSDILRVNTEITKAPLSASMIKRYDEHHQDLTLLKALVRQQLPEKYKEIFFDQSKNGYAGYIDGGASQEEFYKFIKPILEKMDGTEELLVKLNREDLLRKQRTFDNGSIPHQIHLGELHAILRRQEDFYPFLKDNREKIEKILTFRIPYYVGPLARGNSRFAWMTRKSEETITPWNFEEVVDKGASAQSFIERMTNFDKNLPNEKVLPKHSLLYEYFTVYNELTKVKYVTEGMRKPAFLSGEQKKAIVDLLFKTNRKVTVKQLKEDYFKKIECFDSVEISGVEDRFNASLGTYHDLLKIIKDKDFLDNEENEDILEDIVLTLTLFEDREMIEERLKTYAHLFDDKVMKQLKRRRYTGWGRLSRKLINGIRDKQSGKTILDFLKSDGFANRNFMQLIHDDSLTFKEDIQKAQVSGQGDSLHEHIANLAGSPAIKKGILQTVKVVDELVKVMGRHKPENIVIEMARENQTTQKGQKNSRERMKRIEEGIKELGSQILKEHPVENTQLQNEKLYLYYLQNGRDMYVDQELDINRLSDYDVDHIVPQSFLKDDSIDNKVLTRSDKARGKSDNVPSEEVVKKMKNYWRQLLNAKLITQRKFDNLTKAERGGLSELDKAGFIKRQLVETRQITKHVAQILDSRMNTKYDENDKLIREVKVITLKSKLVSDFRKDFQFYKVREINNYHHAHDAYLNAVVGTALIKKYPKLESEFVYGDYKVYDVRKMIAKSEQEIGKATAKYFFYSNIMNFFKTEITLANGEIRKRPLIETNGETGEIVWDKGRDFATVRKVLSMPQVNIVKKTEVQTGGFSKESILPKRNSDKLIARKKDWDPKKYGGFDSPTVAYSVLVVAKVEKGKSKKLKSVKELLGITIMERSSFEKNPIDFLEAKGYKEVKKDLIIKLPKYSLFELENGRKRMLASAGELQKGNELALPSKYVNFLYLASHYEKLKGSPEDNEQKQLFVEQHKHYLDEIIEQISEFSKRVILADANLDKVLSAYNKHRDKPIREQAENIIHLFTLTNLGAPAAFKYFDTTIDRKRYTSTKEVLDATLIHQSITGLYETRIDLSQLGGDGGPAPGSSEAAAKGGTLQLEEEYRLFEPESTQKQEMDIWLKNFPQAWAETGGMGTAHCQAPVLIQLKATATPISIRQYPMPHEAYQGIKPHIRRMLDQGILKPCQSPWNTPLLPVKKPGTEDYRPVQDLREVNKRVEDIHPTVPNPYNLLSTLPPSHPWYTVLDLKDAFFCLRLHSESQLLFAFEWRDPEIGLSGQLTWTRLPQGFKNSPTLFNEALHSDLADFRVRYPALVLLQYVDDLLLAAATRTECLEGTKALLETLGNKGYRASAKKAQICLQEVTYLGYSLKDGQRWLTKARKEAILSIPVPKNSRQVREFLGKAGYCRLFIPGFAELAAPLYPLTRPGTLFQWGTEQQLAFEDIKKALLSSPALGLPDITKPFELFIDENSGFAKGVLVQKLGPWKRPVAYLSKKLDTVASGWPPCLRMVAAIAILVKDAGKLTLGQPLTILTSHPVEALVRQPPNKWLSNARMTHYQAMLLDAERVHFGPTVSLNPATLLPLPSGGNHHDCLQILAETHGTRPDLTDQPLPDADLTWYTDGSSFIRNGEREAGAAVTTESEVIWAAPLPPGTSAQRAELIALTQALKMAEGKKLTVYTDSRYAFATTHVHGEIYRRRGWLTSEGKEIKNKNEILALLEALFLPKRLSIIHCPGHQKGDSPQAKGNRLADDTAKKAATETHSSLTVLPAGKRTADGSEFEKRTADGSEFESPKKKAKVE

SEQ ID NO: 1215 - protein, 2092 aa, synthetic construct
MPAAKRVKLDGGDKKYSIGLDIGTNSVGWAVITDEYKVPSKKFKVLGNTDRHSIKKNLIGALLFDSGETAEATRLKRTARRRYTRRKNRICYLQEIFSNEMAKVDDSFFHRLEESFLVEEDKKHERHPIFGNIVDEVAYHEKYPTIYHLRKKLVDSTDKADLRLIYLALAHMIKFRGHFLIEGDLNPDNSDVDKLFIQLVQTYNQLFEENPINASGVDAKAILSARLSKSRRLENLIAQLPGEKKNGLFGNLIALSLGLTPNFKSNFDLAEDAKLQLSKDTYDDDLDNLLAQIGDQYADLFLAAKNLSDAILLSDILRVNTEITKAPLSASMIKRYDEHHQDLTLLKALVRQQLPEKYKEIFFDQSKNGYAGYIDGGASQEEFYKFIKPILEKMDGTEELLVKLNREDLLRKQRTFDNGSIPHQIHLGELHAILRRQEDFYPFLKDNREKIEKILTFRIPYYVGPLARGNSRFAWMTRKSEETITPWNFEEVVDKGASAQSFIERMTNFDKNLPNEKVLPKHSLLYEYFTVYNELTKVKYVTEGMRKPAFLSGEQKKAIVDLLFKTNRKVTVKQLKEDYFKKIECFDSVEISGVEDRFNASLGTYHDLLKIIKDKDFLDNEENEDILEDIVLTLTLFEDREMIEERLKTYAHLFDDKVMKQLKRRRYTGWGRLSRKLINGIRDKQSGKTILDFLKSDGFANRNFMQLIHDDSLTFKEDIQKAQVSGQGDSLHEHIANLAGSPAIKKGILQTVKVVDELVKVMGRHKPENIVIEMARENQTTQKGQKNSRERMKRIEEGIKELGSQILKEHPVENTQLQNEKLYLYYLQNGRDMYVDQELDINRLSDYDVDHIVPQSFLKDDSIDNKVLTRSDKARGKSDNVPSEEVVKKMKNYWRQLLNAKLITQRKFDNLTKAERGGLSELDKAGFIKRQLVETRQITKHVAQILDSRMNTKYDENDKLIREVKVITLKSKLVSDFRKDFQFYKVREINNYHHAHDAYLNAVVGTALIKKYPKLESEFVYGDYKVYDVRKMIAKSEQEIGKATAKYFFYSNIMNFFKTEITLANGEIRKRPLIETNGETGEIVWDKGRDFATVRKVLSMPQVNIVKKTEVQTGGFSKESILPKRNSDKLIARKKDWDPKKYGGFDSPTVAYSVLVVAKVEKGKSKKLKSVKELLGITIMERSSFEKNPIDFLEAKGYKEVKKDLIIKLPKYSLFELENGRKRMLASAGELQKGNELALPSKYVNFLYLASHYEKLKGSPEDNEQKQLFVEQHKHYLDEIIEQISEFSKRVILADANLDKVLSAYNKHRDKPIREQAENIIHLFTLTNLGAPAAFKYFDTTIDRKRYTSTKEVLDATLIHQSITGLYETRIDLSQLGGDGGGGGGGGGGGGTLQLEEEYRLFEPESTQKQEMDIWLKNFPQAWAETGGMGTAHCQAPVLIQLKATATPISIRQYPMPHEAYQGIKPHIRRMLDQGILKPCQSPWNTPLLPVKKPGTEDYRPVQDLREVNKRVEDIHPTVPNPYNLLSTLPPSHPWYTVLDLKDAFFCLRLHSESQLLFAFEWRDPEIGLSGQLTWTRLPQGFKNSPTLFNEALHSDLADFRVRYPALVLLQYVDDLLLAAATRTECLEGTKALLETLGNKGYRASAKKAQICLQEVTYLGYSLKDGQRWLTKARKEAILSIPVPKNSRQVREFLGKAGYCRLFIPGFAELAAPLYPLTRPGTLFQWGTEQQLAFEDIKKALLSSPALGLPDITKPFELFIDENSGFAKGVLVQKLGPWKRPVAYLSKKLDTVASGWPPCLRMVAAIAILVKDAGKLTLGQPLTILTSHPVEALVRQPPNKWLSNARMTHYQAMLLDAERVHFGPTVSLNPATLLPLPSGGNHHDCLQILAETHGTRPDLTDQPLPDADLTWYTDGSSFIRNGEREAGAAVTTESEVIWAAPLPPGTSAQRAELIALTQALKMAEGKKLTVYTDSRYAFATTHVHGEIYRRRGWLTSEGKEIKNKNEILALLEALFLPKRLSIIHCPGHQKGDSPQAKGNRLADDTAKKAATETHSSLTVLPAGKRTADGSEFEKRTADGSEFESPKKKAKVE

SEQ ID NO: 1216 - protein, 2093 aa, synthetic construct
MPAAKRVKLDGGDKKYSIGLDIGTNSVGWAVITDEYKVPSKKFKVLGNTDRHSIKKNLIGALLFDSGETAEATRLKRTARRRYTRRKNRICYLQEIFSNEMAKVDDSFFHRLEESFLVEEDKKHERHPIFGNIVDEVAYHEKYPTIYHLRKKLVDSTDKADLRLIYLALAHMIKFRGHFLIEGDLNPDNSDVDKLFIQLVQTYNQLFEENPINASGVDAKAILSARLSKSRRLENLIAQLPGEKKNGLFGNLIALSLGLTPNFKSNFDLAEDAKLQLSKDTYDDDLDNLLAQIGDQYADLFLAAKNLSDAILLSDILRVNTEITKAPLSASMIKRYDEHHQDLTLLKALVRQQLPEKYKEIFFDQSKNGYAGYIDGGASQEEFYKFIKPILEKMDGTEELLVKLNREDLLRKQRTFDNGSIPHQIHLGELHAILRRQEDFYPFLKDNREKIEKILTFRIPYYVGPLARGNSRFAWMTRKSEETITPWNFEEVVDKGASAQSFIERMTNFDKNLPNEKVLPKHSLLYEYFTVYNELTKVKYVTEGMRKPAFLSGEQKKAIVDLLFKTNRKVTVKQLKEDYFKKIECFDSVEISGVEDRFNASLGTYHDLLKIIKDKDFLDNEENEDILEDIVLTLTLFEDREMIEERLKTYAHLFDDKVMKQLKRRRYTGWGRLSRKLINGIRDKQSGKTILDFLKSDGFANRNFMQLIHDDSLTFKEDIQKAQVSGQGDSLHEHIANLAGSPAIKKGILQTVKVVDELVKVMGRHKPENIVIEMARENQTTQKGQKNSRERMKRIEEGIKELGSQILKEHPVENTQLQNEKLYLYYLQNGRDMYVDQELDINRLSDYDVDHIVPQSFLKDDSIDNKVLTRSDKARGKSDNVPSEEVVKKMKNYWRQLLNAKLITQRKFDNLTKAERGGLSELDKAGFIKRQLVETRQITKHVAQILDSRMNTKYDENDKLIREVKVITLKSKLVSDFRKDFQFYKVREINNYHHAHDAYLNAVVGTALIKKYPKLESEFVYGDYKVYDVRKMIAKSEQEIGKATAKYFFYSNIMNFFKTEITLANGEIRKRPLIETNGETGEIVWDKGRDFATVRKVLSMPQVNIVKKTEVQTGGFSKESILPKRNSDKLIARKKDWDPKKYGGFDSPTVAYSVLVVAKVEKGKSKKLKSVKELLGITIMERSSFEKNPIDFLEAKGYKEVKKDLIIKLPKYSLFELENGRKRMLASAGELQKGNELALPSKYVNFLYLASHYEKLKGSPEDNEQKQLFVEQHKHYLDEIIEQISEFSKRVILADANLDKVLSAYNKHRDKPIREQAENIIHLFTLTNLGAPAAFKYFDTTIDRKRYTSTKEVLDATLIHQSITGLYETRIDLSQLGGDGGPAPAPAPAPGGTLQLEEEYRLFEPESTQKQEMDIWLKNFPQAWAETGGMGTAHCQAPVLIQLKATATPISIRQYPMPHEAYQGIKPHIRRMLDQGILKPCQSPWNTPLLPVKKPGTEDYRPVQDLREVNKRVEDIHPTVPNPYNLLSTLPPSHPWYTVLDLKDAFFCLRLHSESQLLFAFEWRDPEIGLSGQLTWTRLPQGFKNSPTLFNEALHSDLADFRVRYPALVLLQYVDDLLLAAATRTECLEGTKALLETLGNKGYRASAKKAQICLQEVTYLGYSLKDGQRWLTKARKEAILSIPVPKNSRQVREFLGKAGYCRLFIPGFAELAAPLYPLTRPGTLFQWGTEQQLAFEDIKKALLSSPALGLPDITKPFELFIDENSGFAKGVLVQKLGPWKRPVAYLSKKLDTVASGWPPCLRMVAAIAILVKDAGKLTLGQPLTILTSHPVEALVRQPPNKWLSNARMTHYQAMLLDAERVHFGPTVSLNPATLLPLPSGGNHHDCLQILAETHGTRPDLTDQPLPDADLTWYTDGSSFIRNGEREAGAAVTTESEVIWAAPLPPGTSAQRAELIALTQALKMAEGKKLTVYTDSRYAFATTHVHGEIYRRRGWLTSEGKEIKNKNEILALLEALFLPKRLSIIHCPGHQKGDSPQAKGNRLADDTAKKAATETHSSLTVLPAGKRTADGSEFEKRTADGSEFESPKKKAKVE

SEQ ID NO: 1217 - protein, 2089 aa, synthetic construct
MPAAKRVKLDGGDKKYSIGLDIGTNSVGWAVITDEYKVPSKKFKVLGNTDRHSIKKNLIGALLFDSGETAEATRLKRTARRRYTRRKNRICYLQEIFSNEMAKVDDSFFHRLEESFLVEEDKKHERHPIFGNIVDEVAYHEKYPTIYHLRKKLVDSTDKADLRLIYLALAHMIKFRGHFLIEGDLNPDNSDVDKLFIQLVQTYNQLFEENPINASGVDAKAILSARLSKSRRLENLIAQLPGEKKNGLFGNLIALSLGLTPNFKSNFDLAEDAKLQLSKDTYDDDLDNLLAQIGDQYADLFLAAKNLSDAILLSDILRVNTEITKAPLSASMIKRYDEHHQDLTLLKALVRQQLPEKYKEIFFDQSKNGYAGYIDGGASQEEFYKFIKPILEKMDGTEELLVKLNREDLLRKQRTFDNGSIPHQIHLGELHAILRRQEDFYPFLKDNREKIEKILTFRIPYYVGPLARGNSRFAWMTRKSEETITPWNFEEVVDKGASAQSFIERMTNFDKNLPNEKVLPKHSLLYEYFTVYNELTKVKYVTEGMRKPAFLSGEQKKAIVDLLFKTNRKVTVKQLKEDYFKKIECFDSVEISGVEDRFNASLGTYHDLLKIIKDKDFLDNEENEDILEDIVLTLTLFEDREMIEERLKTYAHLFDDKVMKQLKRRRYTGWGRLSRKLINGIRDKQSGKTILDFLKSDGFANRNFMQLIHDDSLTFKEDIQKAQVSGQGDSLHEHIANLAGSPAIKKGILQTVKVVDELVKVMGRHKPENIVIEMARENQTTQKGQKNSRERMKRIEEGIKELGSQILKEHPVENTQLQNEKLYLYYLQNGRDMYVDQELDINRLSDYDVDHIVPQSFLKDDSIDNKVLTRSDKARGKSDNVPSEEVVKKMKNYWRQLLNAKLITQRKFDNLTKAERGGLSELDKAGFIKRQLVETRQITKHVAQILDSRMNTKYDENDKLIREVKVITLKSKLVSDFRKDFQFYKVREINNYHHAHDAYLNAVVGTALIKKYPKLESEFVYGDYKVYDVRKMIAKSEQEIGKATAKYFFYSNIMNFFKTEITLANGEIRKRPLIETNGETGEIVWDKGRDFATVRKVLSMPQVNIVKKTEVQTGGFSKESILPKRNSDKLIARKKDWDPKKYGGFDSPTVAYSVLVVAKVEKGKSKKLKSVKELLGITIMERSSFEKNPIDFLEAKGYKEVKKDLIIKLPKYSLFELENGRKRMLASAGELQKGNELALPSKYVNFLYLASHYEKLKGSPEDNEQKQLFVEQHKHYLDEIIEQISEFSKRVILADANLDKVLSAYNKHRDKPIREQAENIIHLFTLTNLGAPAAFKYFDTTIDRKRYTSTKEVLDATLIHQSITGLYETRIDLSQLGGDGGGGGGGGGTLQLEEEYRLFEPESTQKQEMDIWLKNFPQAWAETGGMGTAHCQAPVLIQLKATATPISIRQYPMPHEAYQGIKPHIRRMLDQGILKPCQSPWNTPLLPVKKPGTEDYRPVQDLREVNKRVEDIHPTVPNPYNLLSTLPPSHPWYTVLDLKDAFFCLRLHSESQLLFAFEWRDPEIGLSGQLTWTRLPQGFKNSPTLFNEALHSDLADFRVRYPALVLLQYVDDLLLAAATRTECLEGTKALLETLGNKGYRASAKKAQICLQEVTYLGYSLKDGQRWLTKARKEAILSIPVPKNSRQVREFLGKAGYCRLFIPGFAELAAPLYPLTRPGTLFQWGTEQQLAFEDIKKALLSSPALGLPDITKPFELFIDENSGFAKGVLVQKLGPWKRPVAYLSKKLDTVASGWPPCLRMVAAIAILVKDAGKLTLGQPLTILTSHPVEALVRQPPNKWLSNARMTHYQAMLLDAERVHFGPTVSLNPATLLPLPSGGNHHDCLQILAETHGTRPDLTDQPLPDADLTWYTDGSSFIRNGEREAGAAVTTESEVIWAAPLPPGTSAQRAELIALTQALKMAEGKKLTVYTDSRYAFATTHVHGEIYRRRGWLTSEGKEIKNKNEILALLEALFLPKRLSIIHCPGHQKGDSPQAKGNRLADDTAKKAATETHSSLTVLPAGKRTADGSEFEKRTADGSEFESPKKKAKVE

SEQ ID NO: 1218 - protein, 2095 aa, synthetic construct
MPAAKRVKLDGGDKKYSIGLDIGTNSVGWAVITDEYKVPSKKFKVLGNTDRHSIKKNLIGALLFDSGETAEATRLKRTARRRYTRRKNRICYLQEIFSNEMAKVDDSFFHRLEESFLVEEDKKHERHPIFGNIVDEVAYHEKYPTIYHLRKKLVDSTDKADLRLIYLALAHMIKFRGHFLIEGDLNPDNSDVDKLFIQLVQTYNQLFEENPINASGVDAKAILSARLSKSRRLENLIAQLPGEKKNGLFGNLIALSLGLTPNFKSNFDLAEDAKLQLSKDTYDDDLDNLLAQIGDQYADLFLAAKNLSDAILLSDILRVNTEITKAPLSASMIKRYDEHHQDLTLLKALVRQQLPEKYKEIFFDQSKNGYAGYIDGGASQEEFYKFIKPILEKMDGTEELLVKLNREDLLRKQRTFDNGSIPHQIHLGELHAILRRQEDFYPFLKDNREKIEKILTFRIPYYVGPLARGNSRFAWMTRKSEETITPWNFEEVVDKGASAQSFIERMTNFDKNLPNEKVLPKHSLLYEYFTVYNELTKVKYVTEGMRKPAFLSGEQKKAIVDLLFKTNRKVTVKQLKEDYFKKIECFDSVEISGVEDRFNASLGTYHDLLKIIKDKDFLDNEENEDILEDIVLTLTLFEDREMIEERLKTYAHLFDDKVMKQLKRRRYTGWGRLSRKLINGIRDKQSGKTILDFLKSDGFANRNFMQLIHDDSLTFKEDIQKAQVSGQGDSLHEHIANLAGSPAIKKGILQTVKVVDELVKVMGRHKPENIVIEMARENQTTQKGQKNSRERMKRIEEGIKELGSQILKEHPVENTQLQNEKLYLYYLQNGRDMYVDQELDINRLSDYDVDHIVPQSFLKDDSIDNKVLTRSDKARGKSDNVPSEEVVKKMKNYWRQLLNAKLITQRKFDNLTKAERGGLSELDKAGFIKRQLVETRQITKHVAQILDSRMNTKYDENDKLIREVKVITLKSKLVSDFRKDFQFYKVREINNYHHAHDAYLNAVVGTALIKKYPKLESEFVYGDYKVYDVRKMIAKSEQEIGKATAKYFFYSNIMNFFKTEITLANGEIRKRPLIETNGETGEIVWDKGRDFATVRKVLSMPQVNIVKKTEVQTGGFSKESILPKRNSDKLIARKKDWDPKKYGGFDSPTVAYSVLVVAKVEKGKSKKLKSVKELLGITIMERSSFEKNPIDFLEAKGYKEVKKDLIIKLPKYSLFELENGRKRMLASAGELQKGNELALPSKYVNFLYLASHYEKLKGSPEDNEQKQLFVEQHKHYLDEIIEQISEFSKRVILADANLDKVLSAYNKHRDKPIREQAENIIHLFTLTNLGAPAAFKYFDTTIDRKRYTSTKEVLDATLIHQSITGLYETRIDLSQLGGDGGGSSEAAAKPAPGGTLQLEEEYRLFEPESTQKQEMDIWLKNFPQAWAETGGMGTAHCQAPVLIQLKATATPISIRQYPMPHEAYQGIKPHIRRMLDQGILKPCQSPWNTPLLPVKKPGTEDYRPVQDLREVNKRVEDIHPTVPNPYNLLSTLPPSHPWYTVLDLKDAFFCLRLHSESQLLFAFEWRDPEIGLSGQLTWTRLPQGFKNSPTLFNEALHSDLADFRVRYPALVLLQYVDDLLLAAATRTECLEGTKALLETLGNKGYRASAKKAQICLQEVTYLGYSLKDGQRWLTKARKEAILSIPVPKNSRQVREFLGKAGYCRLFIPGFAELAAPLYPLTRPGTLFQWGTEQQLAFEDIKKALLSSPALGLPDITKPFELFIDENSGFAKGVLVQKLGPWKRPVAYLSKKLDTVASGWPPCLRMVAAIAILVKDAGKLTLGQPLTILTSHPVEALVRQPPNKWLSNARMTHYQAMLLDAERVHFGPTVSLNPATLLPLPSGGNHHDCLQILAETHGTRPDLTDQPLPDADLTWYTDGSSFIRNGEREAGAAVTTESEVIWAAPLPPGTSAQRAELIALTQALKMAEGKKLTVYTDSRYAFATTHVHGEIYRRRGWLTSEGKEIKNKNEILALLEALFLPKRLSIIHCPGHQKGDSPQAKGNRLADDTAKKAATETHSSLTVLPAGKRTADGSEFEKRTADGSEFESPKKKAKVE

SEQ ID NO: 1219 - protein, 2097 aa, synthetic construct
MPAAKRVKLDGGDKKYSIGLDIGTNSVGWAVITDEYKVPSKKFKVLGNTDRHSIKKNLIGALLFDSGETAEATRLKRTARRRYTRRKNRICYLQEIFSNEMAKVDDSFFHRLEESFLVEEDKKHERHPIFGNIVDEVAYHEKYPTIYHLRKKLVDSTDKADLRLIYLALAHMIKFRGHFLIEGDLNPDNSDVDKLFIQLVQTYNQLFEENPINASGVDAKAILSARLSKSRRLENLIAQLPGEKKNGLFGNLIALSLGLTPNFKSNFDLAEDAKLQLSKDTYDDDLDNLLAQIGDQYADLFLAAKNLSDAILLSDILRVNTEITKAPLSASMIKRYDEHHQDLTLLKALVRQQLPEKYKEIFFDQSKNGYAGYIDGGASQEEFYKFIKPILEKMDGTEELLVKLNREDLLRKQRTFDNGSIPHQIHLGELHAILRRQEDFYPFLKDNREKIEKILTFRIPYYVGPLARGNSRFAWMTRKSEETITPWNFEEVVDKGASAQSFIERMTNFDKNLPNEKVLPKHSLLYEYFTVYNELTKVKYVTEGMRKPAFLSGEQKKAIVDLLFKTNRKVTVKQLKEDYFKKIECFDSVEISGVEDRFNASLGTYHDLLKIIKDKDFLDNEENEDILEDIVLTLTLFEDREMIEERLKTYAHLFDDKVMKQLKRRRYTGWGRLSRKLINGIRDKQSGKTILDFLKSDGFANRNFMQLIHDDSLTFKEDIQKAQVSGQGDSLHEHIANLAGSPAIKKGILQTVKVVDELVKVMGRHKPENIVIEMARENQTTQKGQKNSRERMKRIEEGIKELGSQILKEHPVENTQLQNEKLYLYYLQNGRDMYVDQELDINRLSDYDVDHIVPQSFLKDDSIDNKVLTRSDKARGKSDNVPSEEVVKKMKNYWRQLLNAKLITQRKFDNLTKAERGGLSELDKAGFIKRQLVETRQITKHVAQILDSRMNTKYDENDKLIREVKVITLKSKLVSDFRKDFQFYKVREINNYHHAHDAYLNAVVGTALIKKYPKLESEFVYGDYKVYDVRKMIAKSEQEIGKATAKYFFYSNIMNFFKTEITLANGEIRKRPLIETNGETGEIVWDKGRDFATVRKVLSMPQVNIVKKTEVQTGGFSKESILPKRNSDKLIARKKDWDPKKYGGFDSPTVAYSVLVVAKVEKGKSKKLKSVKELLGITIMERSSFEKNPIDFLEAKGYKEVKKDLIIKLPKYSLFELENGRKRMLASAGELQKGNELALPSKYVNFLYLASHYEKLKGSPEDNEQKQLFVEQHKHYLDEIIEQISEFSKRVILADANLDKVLSAYNKHRDKPIREQAENIIHLFTLTNLGAPAAFKYFDTTIDRKRYTSTKEVLDATLIHQSITGLYETRIDLSQLGGDGGPAPAPAPAPAPAPGGTLQLEEEYRLFEPESTQKQEMDIWLKNFPQAWAETGGMGTAHCQAPVLIQLKATATPISIRQYPMPHEAYQGIKPHIRRMLDQGILKPCQSPWNTPLLPVKKPGTEDYRPVQDLREVNKRVEDIHPTVPNPYNLLSTLPPSHPWYTVLDLKDAFFCLRLHSESQLLFAFEWRDPEIGLSGQLTWTRLPQGFKNSPTLFNEALHSDLADFRVRYPALVLLQYVDDLLLAAATRTECLEGTKALLETLGNKGYRASAKKAQICLQEVTYLGYSLKDGQRWLTKARKEAILSIPVPKNSRQVREFLGKAGYCRLFIPGFAELAAPLYPLTRPGTLFQWGTEQQLAFEDIKKALLSSPALGLPDITKPFELFIDENSGFAKGVLVQKLGPWKRPVAYLSKKLDTVASGWPPCLRMVAAIAILVKDAGKLTLGQPLTILTSHPVEALVRQPPNKWLSNARMTHYQAMLLDAERVHFGPTVSLNPATLLPLPSGGNHHDCLQILAETHGTRPDLTDQPLPDADLTWYTDGSSFIRNGEREAGAAVTTESEVIWAAPLPPGTSAQRAELIALTQALKMAEGKKLTVYTDSRYAFATTHVHGEIYRRRGWLTSEGKEIKNKNEILALLEALFLPKRLSIIHCPGHQKGDSPQAKGNRLADDTAKKAATETHSSLTVLPAGKRTADGSEFEKRTADGSEFESPKKKAKVE

SEQ ID NO: 1220 - protein, 2095 aa, synthetic construct
MPAAKRVKLDGGDKKYSIGLDIGTNSVGWAVITDEYKVPSKKFKVLGNTDRHSIKKNLIGALLFDSGETAEATRLKRTARRRYTRRKNRICYLQEIFSNEMAKVDDSFFHRLEESFLVEEDKKHERHPIFGNIVDEVAYHEKYPTIYHLRKKLVDSTDKADLRLIYLALAHMIKFRGHFLIEGDLNPDNSDVDKLFIQLVQTYNQLFEENPINASGVDAKAILSARLSKSRRLENLIAQLPGEKKNGLFGNLIALSLGLTPNFKSNFDLAEDAKLQLSKDTYDDDLDNLLAQIGDQYADLFLAAKNLSDAILLSDILRVNTEITKAPLSASMIKRYDEHHQDLTLLKALVRQQLPEKYKEIFFDQSKNGYAGYIDGGASQEEFYKFIKPILEKMDGTEELLVKLNREDLLRKQRTFDNGSIPHQIHLGELHAILRRQEDFYPFLKDNREKIEKILTFRIPYYVGPLARGNSRFAWMTRKSEETITPWNFEEVVDKGASAQSFIERMTNFDKNLPNEKVLPKHSLLYEYFTVYNELTKVKYVTEGMRKPAFLSGEQKKAIVDLLFKTNRKVTVKQLKEDYFKKIECFDSVEISGVEDRFNASLGTYHDLLKIIKDKDFLDNEENEDILEDIVLTLTLFEDREMIEERLKTYAHLFDDKVMKQLKRRRYTGWGRLSRKLINGIRDKQSGKTILDFLKSDGFANRNFMQLIHDDSLTFKEDIQKAQVSGQGDSLHEHIANLAGSPAIKKGILQTVKVVDELVKVMGRHKPENIVIEMARENQTTQKGQKNSRERMKRIEEGIKELGSQILKEHPVENTQLQNEKLYLYYLQNGRDMYVDQELDINRLSDYDVDHIVPQSFLKDDSIDNKVLTRSDKARGKSDNVPSEEVVKKMKNYWRQLLNAKLITQRKFDNLTKAERGGLSELDKAGFIKRQLVETRQITKHVAQILDSRMNTKYDENDKLIREVKVITLKSKLVSDFRKDFQFYKVREINNYHHAHDAYLNAVVGTALIKKYPKLESEFVYGDYKVYDVRKMIAKSEQEIGKATAKYFFYSNIMNFFKTEITLANGEIRKRPLIETNGETGEIVWDKGRDFATVRKVLSMPQVNIVKKTEVQTGGFSKESILPKRNSDKLIARKKDWDPKKYGGFDSPTVAYSVLVVAKVEKGKSKKLKSVKELLGITIMERSSFEKNPIDFLEAKGYKEVKKDLIIKLPKYSLFELENGRKRMLASAGELQKGNELALPSKYVNFLYLASHYEKLKGSPEDNEQKQLFVEQHKHYLDEIIEQISEFSKRVILADANLDKVLSAYNKHRDKPIREQAENIIHLFTLTNLGAPAAFKYFDTTIDRKRYTSTKEVLDATLIHQSITGLYETRIDLSQLGGDGGGGSGSSEAAAKGGTLQLEEEYRLFEPESTQKQEMDIWLKNFPQAWAETGGMGTAHCQAPVLIQLKATATPISIRQYPMPHEAYQGIKPHIRRMLDQGILKPCQSPWNTPLLPVKKPGTEDYRPVQDLREVNKRVEDIHPTVPNPYNLLSTLPPSHPWYTVLDLKDAFFCLRLHSESQLLFAFEWRDPEIGLSGQLTWTRLPQGFKNSPTLFNEALHSDLADFRVRYPALVLLQYVDDLLLAAATRTECLEGTKALLETLGNKGYRASAKKAQICLQEVTYLGYSLKDGQRWLTKARKEAILSIPVPKNSRQVREFLGKAGYCRLFIPGFAELAAPLYPLTRPGTLFQWGTEQQLAFEDIKKALLSSPALGLPDITKPFELFIDENSGFAKGVLVQKLGPWKRPVAYLSKKLDTVASGWPPCLRMVAAIAILVKDAGKLTLGQPLTILTSHPVEALVRQPPNKWLSNARMTHYQAMLLDAERVHFGPTVSLNPATLLPLPSGGNHHDCLQILAETHGTRPDLTDQPLPDADLTWYTDGSSFIRNGEREAGAAVTTESEVIWAAPLPPGTSAQRAELIALTQALKMAEGKKLTVYTDSRYAFATTHVHGEIYRRRGWLTSEGKEIKNKNEILALLEALFLPKRLSIIHCPGHQKGDSPQAKGNRLADDTAKKAATETHSSLTVLPAGKRTADGSEFEKRTADGSEFESPKKKAKVE

SEQ ID NO: 1221 - protein, 2095 aa, synthetic construct
MPAAKRVKLDGGDKKYSIGLDIGTNSVGWAVITDEYKVPSKKFKVLGNTDRHSIKKNLIGALLFDSGETAEATRLKRTARRRYTRRKNRICYLQEIFSNEMAKVDDSFFHRLEESFLVEEDKKHERHPIFGNIVDEVAYHEKYPTIYHLRKKLVDSTDKADLRLIYLALAHMIKFRGHFLIEGDLNPDNSDVDKLFIQLVQTYNQLFEENPINASGVDAKAILSARLSKSRRLENLIAQLPGEKKNGLFGNLIALSLGLTPNFKSNFDLAEDAKLQLSKDTYDDDLDNLLAQIGDQYADLFLAAKNLSDAILLSDILRVNTEITKAPLSASMIKRYDEHHQDLTLLKALVRQQLPEKYKEIFFDQSKNGYAGYIDGGASQEEFYKFIKPILEKMDGTEELLVKLNREDLLRKQRTFDNGSIPHQIHLGELHAILRRQEDFYPFLKDNREKIEKILTFRIPYYVGPLARGNSRFAWMTRKSEETITPWNFEEVVDKGASAQSFIERMTNFDKNLPNEKVLPKHSLLYEYFTVYNELTKVKYVTEGMRKPAFLSGEQKKAIVDLLFKTNRKVTVKQLKEDYFKKIECFDSVEISGVEDRFNASLGTYHDLLKIIKDKDFLDNEENEDILEDIVLTLTLFEDREMIEERLKTYAHLFDDKVMKQLKRRRYTGWGRLSRKLINGIRDKQSGKTILDFLKSDGFANRNFMQLIHDDSLTFKEDIQKAQVSGQGDSLHEHIANLAGSPAIKKGILQTVKVVDELVKVMGRHKPENIVIEMARENQTTQKGQKNSRERMKRIEEGIKELGSQILKEHPVENTQLQNEKLYLYYLQNGRDMYVDQELDINRLSDYDVDHIVPQSFLKDDSIDNKVLTRSDKARGKSDNVPSEEVVKKMKNYWRQLLNAKLITQRKFDNLTKAERGGLSELDKAGFIKRQLVETRQITKHVAQILDSRMNTKYDENDKLIREVKVITLKSKLVSDFRKDFQFYKVREINNYHHAHDAYLNAVVGTALIKKYPKLESEFVYGDYKVYDVRKMIAKSEQEIGKATAKYFFYSNIMNFFKTEITLANGEIRKRPLIETNGETGEIVWDKGRDFATVRKVLSMPQVNIVKKTEVQTGGFSKESILPKRNSDKLIARKKDWDPKKYGGFDSPTVAYSVLVVAKVEKGKSKKLKSVKELLGITIMERSSFEKNPIDFLEAKGYKEVKKDLIIKLPKYSLFELENGRKRMLASAGELQKGNELALPSKYVNFLYLASHYEKLKGSPEDNEQKQLFVEQHKHYLDEIIEQISEFSKRVILADANLDKVLSAYNKHRDKPIREQAENIIHLFTLTNLGAPAAFKYFDTTIDRKRYTSTKEVLDATLIHQSITGLYETRIDLSQLGGDGGGGGPAPEAAAKGGTLQLEEEYRLFEPESTQKQEMDIWLKNFPQAWAETGGMGTAHCQAPVLIQLKATATPISIRQYPMPHEAYQGIKPHIRRMLDQGILKPCQSPWNTPLLPVKKPGTEDYRPVQDLREVNKRVEDIHPTVPNPYNLLSTLPPSHPWYTVLDLKDAFFCLRLHSESQLLFAFEWRDPEIGLSGQLTWTRLPQGFKNSPTLFNEALHSDLADFRVRYPALVLLQYVDDLLLAAATRTECLEGTKALLETLGNKGYRASAKKAQICLQEVTYLGYSLKDGQRWLTKARKEAILSIPVPKNSRQVREFLGKAGYCRLFIPGFAELAAPLYPLTRPGTLFQWGTEQQLAFEDIKKALLSSPALGLPDITKPFELFIDENSGFAKGVLVQKLGPWKRPVAYLSKKLDTVASGWPPCLRMVAAIAILVKDAGKLTLGQPLTILTSHPVEALVRQPPNKWLSNARMTHYQAMLLDAERVHFGPTVSLNPATLLPLPSGGNHHDCLQILAETHGTRPDLTDQPLPDADLTWYTDGSSFIRNGEREAGAAVTTESEVIWAAPLPPGTSAQRAELIALTQALKMAEGKKLTVYTDSRYAFATTHVHGEIYRRRGWLTSEGKEIKNKNEILALLEALFLPKRLSIIHCPGHQKGDSPQAKGNRLADDTAKKAATETHSSLTVLPAGKRTADGSEFEKRTADGSEFESPKKKAKVE

SEQ ID NO: 1222 - protein, 2117 aa, synthetic construct
MPAAKRVKLDGGDKKYSIGLDIGTNSVGWAVITDEYKVPSKKFKVLGNTDRHSIKKNLIGALLFDSGETAEATRLKRTARRRYTRRKNRICYLQEIFSNEMAKVDDSFFHRLEESFLVEEDKKHERHPIFGNIVDEVAYHEKYPTIYHLRKKLVDSTDKADLRLIYLALAHMIKFRGHFLIEGDLNPDNSDVDKLFIQLVQTYNQLFEENPINASGVDAKAILSARLSKSRRLENLIAQLPGEKKNGLFGNLIALSLGLTPNFKSNFDLAEDAKLQLSKDTYDDDLDNLLAQIGDQYADLFLAAKNLSDAILLSDILRVNTEITKAPLSASMIKRYDEHHQDLTLLKALVRQQLPEKYKEIFFDQSKNGYAGYIDGGASQEEFYKFIKPILEKMDGTEELLVKLNREDLLRKQRTFDNGSIPHQIHLGELHAILRRQEDFYPFLKDNREKIEKILTFRIPYYVGPLARGNSRFAWMTRKSEETITPWNFEEVVDKGASAQSFIERMTNFDKNLPNEKVLPKHSLLYEYFTVYNELTKVKYVTEGMRKPAFLSGEQKKAIVDLLFKTNRKVTVKQLKEDYFKKIECFDSVEISGVEDRFNASLGTYHDLLKIIKDKDFLDNEENEDILEDIVLTLTLFEDREMIEERLKTYAHLFDDKVMKQLKRRRYTGWGRLSRKLINGIRDKQSGKTILDFLKSDGFANRNFMQLIHDDSLTFKEDIQKAQVSGQGDSLHEHIANLAGSPAIKKGILQTVKVVDELVKVMGRHKPENIVIEMARENQTTQKGQKNSRERMKRIEEGIKELGSQILKEHPVENTQLQNEKLYLYYLQNGRDMYVDQELDINRLSDYDVDHIVPQSFLKDDSIDNKVLTRSDKARGKSDNVPSEEVVKKMKNYWRQLLNAKLITQRKFDNLTKAERGGLSELDKAGFIKRQLVETRQITKHVAQILDSRMNTKYDENDKLIREVKVITLKSKLVSDFRKDFQFYKVREINNYHHAHDAYLNAVVGTALIKKYPKLESEFVYGDYKVYDVRKMIAKSEQEIGKATAKYFFYSNIMNFFKTEITLANGEIRKRPLIETNGETGEIVWDKGRDFATVRKVLSMPQVNIVKKTEVQTGGFSKESILPKRNSDKLIARKKDWDPKKYGGFDSPTVAYSVLVVAKVEKGKSKKLKSVKELLGITIMERSSFEKNPIDFLEAKGYKEVKKDLIIKLPKYSLFELENGRKRMLASAGELQKGNELALPSKYVNFLYLASHYEKLKGSPEDNEQKQLFVEQHKHYLDEIIEQISEFSKRVILADANLDKVLSAYNKHRDKPIREQAENIIHLFTLTNLGAPAAFKYFDTTIDRKRYTSTKEVLDATLIHQSITGLYETRIDLSQLGGDGGSGGSSGGSSGSETPGTSESATPESSGGSSGGSSGGTLQLEEEYRLFEPESTQKQEMDIWLKNFPQAWAETGGMGTAHCQAPVLIQLKATATPISIRQYPMPHEAYQGIKPHIRRMLDQGILKPCQSPWNTPLLPVKKPGTEDYRPVQDLREVNKRVEDIHPTVPNPYNLLSTLPPSHPWYTVLDLKDAFFCLRLHSESQLLFAFEWRDPEIGLSGQLTWTRLPQGFKNSPTLFNEALHSDLADFRVRYPALVLLQYVDDLLLAAATRTECLEGTKALLETLGNKGYRASAKKAQICLQEVTYLGYSLKDGQRWLTKARKEAILSIPVPKNSRQVREFLGKAGYCRLFIPGFAELAAPLYPLTRPGTLFQWGTEQQLAFEDIKKALLSSPALGLPDITKPFELFIDENSGFAKGVLVQKLGPWKRPVAYLSKKLDTVASGWPPCLRMVAAIAILVKDAGKLTLGQPLTILTSHPVEALVRQPPNKWLSNARMTHYQAMLLDAERVHFGPTVSLNPATLLPLPSGGNHHDCLQILAETHGTRPDLTDQPLPDADLTWYTDGSSFIRNGEREAGAAVTTESEVIWAAPLPPGTSAQRAELIALTQALKMAEGKKLTVYTDSRYAFATTHVHGEIYRRRGWLTSEGKEIKNKNEILALLEALFLPKRLSIIHCPGHQKGDSPQAKGNRLADDTAKKAATETHSSLTVLPAGKRTADGSEFEKRTADGSEFESPKKKAKVE

SEQ ID NO: 1223 - protein, 2087 aa, synthetic construct
MPAAKRVKLDGGDKKYSIGLDIGTNSVGWAVITDEYKVPSKKFKVLGNTDRHSIKKNLIGALLFDSGETAEATRLKRTARRRYTRRKNRICYLQEIFSNEMAKVDDSFFHRLEESFLVEEDKKHERHPIFGNIVDEVAYHEKYPTIYHLRKKLVDSTDKADLRLIYLALAHMIKFRGHFLIEGDLNPDNSDVDKLFIQLVQTYNQLFEENPINASGVDAKAILSARLSKSRRLENLIAQLPGEKKNGLFGNLIALSLGLTPNFKSNFDLAEDAKLQLSKDTYDDDLDNLLAQIGDQYADLFLAAKNLSDAILLSDILRVNTEITKAPLSASMIKRYDEHHQDLTLLKALVRQQLPEKYKEIFFDQSKNGYAGYIDGGASQEEFYKFIKPILEKMDGTEELLVKLNREDLLRKQRTFDNGSIPHQIHLGELHAILRRQEDFYPFLKDNREKIEKILTFRIPYYVGPLARGNSRFAWMTRKSEETITPWNFEEVVDKGASAQSFIERMTNFDKNLPNEKVLPKHSLLYEYFTVYNELTKVKYVTEGMRKPAFLSGEQKKAIVDLLFKTNRKVTVKQLKEDYFKKIECFDSVEISGVEDRFNASLGTYHDLLKIIKDKDFLDNEENEDILEDIVLTLTLFEDREMIEERLKTYAHLFDDKVMKQLKRRRYTGWGRLSRKLINGIRDKQSGKTILDFLKSDGFANRNFMQLIHDDSLTFKEDIQKAQVSGQGDSLHEHIANLAGSPAIKKGILQTVKVVDELVKVMGRHKPENIVIEMARENQTTQKGQKNSRERMKRIEEGIKELGSQILKEHPVENTQLQNEKLYLYYLQNGRDMYVDQELDINRLSDYDVDHIVPQSFLKDDSIDNKVLTRSDKARGKSDNVPSEEVVKKMKNYWRQLLNAKLITQRKFDNLTKAERGGLSELDKAGFIKRQLVETRQITKHVAQILDSRMNTKYDENDKLIREVKVITLKSKLVSDFRKDFQFYKVREINNYHHAHDAYLNAVVGTALIKKYPKLESEFVYGDYKVYDVRKMIAKSEQEIGKATAKYFFYSNIMNFFKTEITLANGEIRKRPLIETNGETGEIVWDKGRDFATVRKVLSMPQVNIVKKTEVQTGGFSKESILPKRNSDKLIARKKDWDPKKYGGFDSPTVAYSVLVVAKVEKGKSKKLKSVKELLGITIMERSSFEKNPIDFLEAKGYKEVKKDLIIKLPKYSLFELENGRKRMLASAGELQKGNELALPSKYVNFLYLASHYEKLKGSPEDNEQKQLFVEQHKHYLDEIIEQISEFSKRVILADANLDKVLSAYNKHRDKPIREQAENIIHLFTLTNLGAPAAFKYFDTTIDRKRYTSTKEVLDATLIHQSITGLYETRIDLSQLGGDGGPAPGGTLQLEEEYRLFEPESTQKQEMDIWLKNFPQAWAETGGMGTAHCQAPVLIQLKATATPISIRQYPMPHEAYQGIKPHIRRMLDQGILKPCQSPWNTPLLPVKKPGTEDYRPVQDLREVNKRVEDIHPTVPNPYNLLSTLPPSHPWYTVLDLKDAFFCLRLHSESQLLFAFEWRDPEIGLSGQLTWTRLPQGFKNSPTLFNEALHSDLADFRVRYPALVLLQYVDDLLLAAATRTECLEGTKALLETLGNKGYRASAKKAQICLQEVTYLGYSLKDGQRWLTKARKEAILSIPVPKNSRQVREFLGKAGYCRLFIPGFAELAAPLYPLTRPGTLFQWGTEQQLAFEDIKKALLSSPALGLPDITKPFELFIDENSGFAKGVLVQKLGPWKRPVAYLSKKLDTVASGWPPCLRMVAAIAILVKDAGKLTLGQPLTILTSHPVEALVRQPPNKWLSNARMTHYQAMLLDAERVHFGPTVSLNPATLLPLPSGGNHHDCLQILAETHGTRPDLTDQPLPDADLTWYTDGSSFIRNGEREAGAAVTTESEVIWAAPLPPGTSAQRAELIALTQALKMAEGKKLTVYTDSRYAFATTHVHGEIYRRRGWLTSEGKEIKNKNEILALLEALFLPKRLSIIHCPGHQKGDSPQAKGNRLADDTAKKAATETHSSLTVLPAGKRTADGSEFEKRTADGSEFESPKKKAKVE

SEQ ID NO: 1224 - protein, 2093 aa, synthetic construct
MPAAKRVKLDGGDKKYSIGLDIGTNSVGWAVITDEYKVPSKKFKVLGNTDRHSIKKNLIGALLFDSGETAEATRLKRTARRRYTRRKNRICYLQEIFSNEMAKVDDSFFHRLEESFLVEEDKKHERHPIFGNIVDEVAYHEKYPTIYHLRKKLVDSTDKADLRLIYLALAHMIKFRGHFLIEGDLNPDNSDVDKLFIQLVQTYNQLFEENPINASGVDAKAILSARLSKSRRLENLIAQLPGEKKNGLFGNLIALSLGLTPNFKSNFDLAEDAKLQLSKDTYDDDLDNLLAQIGDQYADLFLAAKNLSDAILLSDILRVNTEITKAPLSASMIKRYDEHHQDLTLLKALVRQQLPEKYKEIFFDQSKNGYAGYIDGGASQEEFYKFIKPILEKMDGTEELLVKLNREDLLRKQRTFDNGSIPHQIHLGELHAILRRQEDFYPFLKDNREKIEKILTFRIPYYVGPLARGNSRFAWMTRKSEETITPWNFEEVVDKGASAQSFIERMTNFDKNLPNEKVLPKHSLLYEYFTVYNELTKVKYVTEGMRKPAFLSGEQKKAIVDLLFKTNRKVTVKQLKEDYFKKIECFDSVEISGVEDRFNASLGTYHDLLKIIKDKDFLDNEENEDILEDIVLTLTLFEDREMIEERLKTYAHLFDDKVMKQLKRRRYTGWGRLSRKLINGIRDKQSGKTILDFLKSDGFANRNFMQLIHDDSLTFKEDIQKAQVSGQGDSLHEHIANLAGSPAIKKGILQTVKVVDELVKVMGRHKPENIVIEMARENQTTQKGQKNSRERMKRIEEGIKELGSQILKEHPVENTQLQNEKLYLYYLQNGRDMYVDQELDINRLSDYDVDHIVPQSFLKDDSIDNKVLTRSDKARGKSDNVPSEEVVKKMKNYWRQLLNAKLITQRKFDNLTKAERGGLSELDKAGFIKRQLVETRQITKHVAQILDSRMNTKYDENDKLIREVKVITLKSKLVSDFRKDFQFYKVREINNYHHAHDAYLNAVVGTALIKKYPKLESEFVYGDYKVYDVRKMIAKSEQEIGKATAKYFFYSNIMNFFKTEITLANGEIRKRPLIETNGETGEIVWDKGRDFATVRKVLSMPQVNIVKKTEVQTGGFSKESILPKRNSDKLIARKKDWDPKKYGGFDSPTVAYSVLVVAKVEKGKSKKLKSVKELLGITIMERSSFEKNPIDFLEAKGYKEVKKDLIIKLPKYSLFELENGRKRMLASAGELQKGNELALPSKYVNFLYLASHYEKLKGSPEDNEQKQLFVEQHKHYLDEIIEQISEFSKRVILADANLDKVLSAYNKHRDKPIREQAENIIHLFTLTNLGAPAAFKYFDTTIDRKRYTSTKEVLDATLIHQSITGLYETRIDLSQLGGDGGGSSPAPGGGGGTLQLEEEYRLFEPESTQKQEMDIWLKNFPQAWAETGGMGTAHCQAPVLIQLKATATPISIRQYPMPHEAYQGIKPHIRRMLDQGILKPCQSPWNTPLLPVKKPGTEDYRPVQDLREVNKRVEDIHPTVPNPYNLLSTLPPSHPWYTVLDLKDAFFCLRLHSESQLLFAFEWRDPEIGLSGQLTWTRLPQGFKNSPTLFNEALHSDLADFRVRYPALVLLQYVDDLLLAAATRTECLEGTKALLETLGNKGYRASAKKAQICLQEVTYLGYSLKDGQRWLTKARKEAILSIPVPKNSRQVREFLGKAGYCRLFIPGFAELAAPLYPLTRPGTLFQWGTEQQLAFEDIKKALLSSPALGLPDITKPFELFIDENSGFAKGVLVQKLGPWKRPVAYLSKKLDTVASGWPPCLRMVAAIAILVKDAGKLTLGQPLTILTSHPVEALVRQPPNKWLSNARMTHYQAMLLDAERVHFGPTVSLNPATLLPLPSGGNHHDCLQILAETHGTRPDLTDQPLPDADLTWYTDGSSFIRNGEREAGAAVTTESEVIWAAPLPPGTSAQRAELIALTQALKMAEGKKLTVYTDSRYAFATTHVHGEIYRRRGWLTSEGKEIKNKNEILALLEALFLPKRLSIIHCPGHQKGDSPQAKGNRLADDTAKKAATETHSSLTVLPAGKRTADGSEFEKRTADGSEFESPKKKAKVE

SEQ ID NO: 1225 - protein, 2095 aa, synthetic construct
MPAAKRVKLDGGDKKYSIGLDIGTNSVGWAVITDEYKVPSKKFKVLGNTDRHSIKKNLIGALLFDSGETAEATRLKRTARRRYTRRKNRICYLQEIFSNEMAKVDDSFFHRLEESFLVEEDKKHERHPIFGNIVDEVAYHEKYPTIYHLRKKLVDSTDKADLRLIYLALAHMIKFRGHFLIEGDLNPDNSDVDKLFIQLVQTYNQLFEENPINASGVDAKAILSARLSKSRRLENLIAQLPGEKKNGLFGNLIALSLGLTPNFKSNFDLAEDAKLQLSKDTYDDDLDNLLAQIGDQYADLFLAAKNLSDAILLSDILRVNTEITKAPLSASMIKRYDEHHQDLTLLKALVRQQLPEKYKEIFFDQSKNGYAGYIDGGASQEEFYKFIKPILEKMDGTEELLVKLNREDLLRKQRTFDNGSIPHQIHLGELHAILRRQEDFYPFLKDNREKIEKILTFRIPYYVGPLARGNSRFAWMTRKSEETITPWNFEEVVDKGASAQSFIERMTNFDKNLPNEKVLPKHSLLYEYFTVYNELTKVKYVTEGMRKPAFLSGEQKKAIVDLLFKTNRKVTVKQLKEDYFKKIECFDSVEISGVEDRFNASLGTYHDLLKIIKDKDFLDNEENEDILEDIVLTLTLFEDREMIEERLKTYAHLFDDKVMKQLKRRRYTGWGRLSRKLINGIRDKQSGKTILDFLKSDGFANRNFMQLIHDDSLTFKEDIQKAQVSGQGDSLHEHIANLAGSPAIKKGILQTVKVVDELVKVMGRHKPENIVIEMARENQTTQKGQKNSRERMKRIEEGIKELGSQILKEHPVENTQLQNEKLYLYYLQNGRDMYVDQELDINRLSDYDVDHIVPQSFLKDDSIDNKVLTRSDKARGKSDNVPSEEVVKKMKNYWRQLLNAKLITQRKFDNLTKAERGGLSELDKAGFIKRQLVETRQITKHVAQILDSRMNTKYDENDKLIREVKVITLKSKLVSDFRKDFQFYKVREINNYHHAHDAYLNAVVGTALIKKYPKLESEFVYGDYKVYDVRKMIAKSEQEIGKATAKYFFYSNIMNFFKTEITLANGEIRKRPLIETNGETGEIVWDKGRDFATVRKVLSMPQVNIVKKTEVQTGGFSKESILPKRNSDKLIARKKDWDPKKYGGFDSPTVAYSVLVVAKVEKGKSKKLKSVKELLGITIMERSSFEKNPIDFLEAKGYKEVKKDLIIKLPKYSLFELENGRKRMLASAGELQKGNELALPSKYVNFLYLASHYEKLKGSPEDNEQKQLFVEQHKHYLDEIIEQISEFSKRVILADANLDKVLSAYNKHRDKPIREQAENIIHLFTLTNLGAPAAFKYFDTTIDRKRYTSTKEVLDATLIHQSITGLYETRIDLSQLGGDGGGSSPAPEAAAKGGTLQLEEEYRLFEPESTQKQEMDIWLKNFPQAWAETGGMGTAHCQAPVLIQLKATATPISIRQYPMPHEAYQGIKPHIRRMLDQGILKPCQSPWNTPLLPVKKPGTEDYRPVQDLREVNKRVEDIHPTVPNPYNLLSTLPPSHPWYTVLDLKDAFFCLRLHSESQLLFAFEWRDPEIGLSGQLTWTRLPQGFKNSPTLFNEALHSDLADFRVRYPALVLLQYVDDLLLAAATRTECLEGTKALLETLGNKGYRASAKKAQICLQEVTYLGYSLKDGQRWLTKARKEAILSIPVPKNSRQVREFLGKAGYCRLFIPGFAELAAPLYPLTRPGTLFQWGTEQQLAFEDIKKALLSSPALGLPDITKPFELFIDENSGFAKGVLVQKLGPWKRPVAYLSKKLDTVASGWPPCLRMVAAIAILVKDAGKLTLGQPLTILTSHPVEALVRQPPNKWLSNARMTHYQAMLLDAERVHFGPTVSLNPATLLPLPSGGNHHDCLQILAETHGTRPDLTDQPLPDADLTWYTDGSSFIRNGEREAGAAVTTESEVIWAAPLPPGTSAQRAELIALTQALKMAEGKKLTVYTDSRYAFATTHVHGEIYRRRGWLTSEGKEIKNKNEILALLEALFLPKRLSIIHCPGHQKGDSPQAKGNRLADDTAKKAATETHSSLTVLPAGKRTADGSEFEKRTADGSEFESPKKKAKVE

SEQ ID NO: 1226 - protein, 2087 aa, synthetic construct
MPAAKRVKLDGGDKKYSIGLDIGTNSVGWAVITDEYKVPSKKFKVLGNTDRHSIKKNLIGALLFDSGETAEATRLKRTARRRYTRRKNRICYLQEIFSNEMAKVDDSFFHRLEESFLVEEDKKHERHPIFGNIVDEVAYHEKYPTIYHLRKKLVDSTDKADLRLIYLALAHMIKFRGHFLIEGDLNPDNSDVDKLFIQLVQTYNQLFEENPINASGVDAKAILSARLSKSRRLENLIAQLPGEKKNGLFGNLIALSLGLTPNFKSNFDLAEDAKLQLSKDTYDDDLDNLLAQIGDQYADLFLAAKNLSDAILLSDILRVNTEITKAPLSASMIKRYDEHHQDLTLLKALVRQQLPEKYKEIFFDQSKNGYAGYIDGGASQEEFYKFIKPILEKMDGTEELLVKLNREDLLRKQRTFDNGSIPHQIHLGELHAILRRQEDFYPFLKDNREKIEKILTFRIPYYVGPLARGNSRFAWMTRKSEETITPWNFEEVVDKGASAQSFIERMTNFDKNLPNEKVLPKHSLLYEYFTVYNELTKVKYVTEGMRKPAFLSGEQKKAIVDLLFKTNRKVTVKQLKEDYFKKIECFDSVEISGVEDRFNASLGTYHDLLKIIKDKDFLDNEENEDILEDIVLTLTLFEDREMIEERLKTYAHLFDDKVMKQLKRRRYTGWGRLSRKLINGIRDKQSGKTILDFLKSDGFANRNFMQLIHDDSLTFKEDIQKAQVSGQGDSLHEHIANLAGSPAIKKGILQTVKVVDELVKVMGRHKPENIVIEMARENQTTQKGQKNSRERMKRIEEGIKELGSQILKEHPVENTQLQNEKLYLYYLQNGRDMYVDQELDINRLSDYDVDHIVPQSFLKDDSIDNKVLTRSDKARGKSDNVPSEEVVKKMKNYWRQLLNAKLITQRKFDNLTKAERGGLSELDKAGFIKRQLVETRQITKHVAQILDSRMNTKYDENDKLIREVKVITLKSKLVSDFRKDFQFYKVREINNYHHAHDAYLNAVVGTALIKKYPKLESEFVYGDYKVYDVRKMIAKSEQEIGKATAKYFFYSNIMNFFKTEITLANGEIRKRPLIETNGETGEIVWDKGRDFATVRKVLSMPQVNIVKKTEVQTGGFSKESILPKRNSDKLIARKKDWDPKKYGGFDSPTVAYSVLVVAKVEKGKSKKLKSVKELLGITIMERSSFEKNPIDFLEAKGYKEVKKDLIIKLPKYSLFELENGRKRMLASAGELQKGNELALPSKYVNFLYLASHYEKLKGSPEDNEQKQLFVEQHKHYLDEIIEQISEFSKRVILADANLDKVLSAYNKHRDKPIREQAENIIHLFTLTNLGAPAAFKYFDTTIDRKRYTSTKEVLDATLIHQSITGLYETRIDLSQLGGDGGGSSGGTLQLEEEYRLFEPESTQKQEMDIWLKNFPQAWAETGGMGTAHCQAPVLIQLKATATPISIRQYPMPHEAYQGIKPHIRRMLDQGILKPCQSPWNTPLLPVKKPGTEDYRPVQDLREVNKRVEDIHPTVPNPYNLLSTLPPSHPWYTVLDLKDAFFCLRLHSESQLLFAFEWRDPEIGLSGQLTWTRLPQGFKNSPTLFNEALHSDLADFRVRYPALVLLQYVDDLLLAAATRTECLEGTKALLETLGNKGYRASAKKAQICLQEVTYLGYSLKDGQRWLTKARKEAILSIPVPKNSRQVREFLGKAGYCRLFIPGFAELAAPLYPLTRPGTLFQWGTEQQLAFEDIKKALLSSPALGLPDITKPFELFIDENSGFAKGVLVQKLGPWKRPVAYLSKKLDTVASGWPPCLRMVAAIAILVKDAGKLTLGQPLTILTSHPVEALVRQPPNKWLSNARMTHYQAMLLDAERVHFGPTVSLNPATLLPLPSGGNHHDCLQILAETHGTRPDLTDQPLPDADLTWYTDGSSFIRNGEREAGAAVTTESEVIWAAPLPPGTSAQRAELIALTQALKMAEGKKLTVYTDSRYAFATTHVHGEIYRRRGWLTSEGKEIKNKNEILALLEALFLPKRLSIIHCPGHQKGDSPQAKGNRLADDTAKKAATETHSSLTVLPAGKRTADGSEFEKRTADGSEFESPKKKAKVE

SEQ ID NO: 1227 - protein, 2095 aa, synthetic construct
MPAAKRVKLDGGDKKYSIGLDIGTNSVGWAVITDEYKVPSKKFKVLGNTDRHSIKKNLIGALLFDSGETAEATRLKRTARRRYTRRKNRICYLQEIFSNEMAKVDDSFFHRLEESFLVEEDKKHERHPIFGNIVDEVAYHEKYPTIYHLRKKLVDSTDKADLRLIYLALAHMIKFRGHFLIEGDLNPDNSDVDKLFIQLVQTYNQLFEENPINASGVDAKAILSARLSKSRRLENLIAQLPGEKKNGLFGNLIALSLGLTPNFKSNFDLAEDAKLQLSKDTYDDDLDNLLAQIGDQYADLFLAAKNLSDAILLSDILRVNTEITKAPLSASMIKRYDEHHQDLTLLKALVRQQLPEKYKEIFFDQSKNGYAGYIDGGASQEEFYKFIKPILEKMDGTEELLVKLNREDLLRKQRTFDNGSIPHQIHLGELHAILRRQEDFYPFLKDNREKIEKILTFRIPYYVGPLARGNSRFAWMTRKSEETITPWNFEEVVDKGASAQSFIERMTNFDKNLPNEKVLPKHSLLYEYFTVYNELTKVKYVTEGMRKPAFLSGEQKKAIVDLLFKTNRKVTVKQLKEDYFKKIECFDSVEISGVEDRFNASLGTYHDLLKIIKDKDFLDNEENEDILEDIVLTLTLFEDREMIEERLKTYAHLFDDKVMKQLKRRRYTGWGRLSRKLINGIRDKQSGKTILDFLKSDGFANRNFMQLIHDDSLTFKEDIQKAQVSGQGDSLHEHIANLAGSPAIKKGILQTVKVVDELVKVMGRHKPENIVIEMARENQTTQKGQKNSRERMKRIEEGIKELGSQILKEHPVENTQLQNEKLYLYYLQNGRDMYVDQELDINRLSDYDVDHIVPQSFLKDDSIDNKVLTRSDKARGKSDNVPSEEVVKKMKNYWRQLLNAKLITQRKFDNLTKAERGGLSELDKAGFIKRQLVETRQITKHVAQILDSRMNTKYDENDKLIREVKVITLKSKLVSDFRKDFQFYKVREINNYHHAHDAYLNAVVGTALIKKYPKLESEFVYGDYKVYDVRKMIAKSEQEIGKATAKYFFYSNIMNFFKTEITLANGEIRKRPLIETNGETGEIVWDKGRDFATVRKVLSMPQVNIVKKTEVQTGGFSKESILPKRNSDKLIARKKDWDPKKYGGFDSPTVAYSVLVVAKVEKGKSKKLKSVKELLGITIMERSSFEKNPIDFLEAKGYKEVKKDLIIKLPKYSLFELENGRKRMLASAGELQKGNELALPSKYVNFLYLASHYEKLKGSPEDNEQKQLFVEQHKHYLDEIIEQISEFSKRVILADANLDKVLSAYNKHRDKPIREQAENIIHLFTLTNLGAPAAFKYFDTTIDRKRYTSTKEVLDATLIHQSITGLYETRIDLSQLGGDGGGSSGGGEAAAKGGTLQLEEEYRLFEPESTQKQEMDIWLKNFPQAWAETGGMGTAHCQAPVLIQLKATATPISIRQYPMPHEAYQGIKPHIRRMLDQGILKPCQSPWNTPLLPVKKPGTEDYRPVQDLREVNKRVEDIHPTVPNPYNLLSTLPPSHPWYTVLDLKDAFFCLRLHSESQLLFAFEWRDPEIGLSGQLTWTRLPQGFKNSPTLFNEALHSDLADFRVRYPALVLLQYVDDLLLAAATRTECLEGTKALLETLGNKGYRASAKKAQICLQEVTYLGYSLKDGQRWLTKARKEAILSIPVPKNSRQVREFLGKAGYCRLFIPGFAELAAPLYPLTRPGTLFQWGTEQQLAFEDIKKALLSSPALGLPDITKPFELFIDENSGFAKGVLVQKLGPWKRPVAYLSKKLDTVASGWPPCLRMVAAIAILVKDAGKLTLGQPLTILTSHPVEALVRQPPNKWLSNARMTHYQAMLLDAERVHFGPTVSLNPATLLPLPSGGNHHDCLQILAETHGTRPDLTDQPLPDADLTWYTDGSSFIRNGEREAGAAVTTESEVIWAAPLPPGTSAQRAELIALTQALKMAEGKKLTVYTDSRYAFATTHVHGEIYRRRGWLTSEGKEIKNKNEILALLEALFLPKRLSIIHCPGHQKGDSPQAKGNRLADDTAKKAATETHSSLTVLPAGKRTADGSEFEKRTADGSEFESPKKKAKVE

SEQ ID NO: 1228 - protein, 2090 aa, synthetic construct
MPAAKRVKLDGGDKKYSIGLDIGTNSVGWAVITDEYKVPSKKFKVLGNTDRHSIKKNLIGALLFDSGETAEATRLKRTARRRYTRRKNRICYLQEIFSNEMAKVDDSFFHRLEESFLVEEDKKHERHPIFGNIVDEVAYHEKYPTIYHLRKKLVDSTDKADLRLIYLALAHMIKFRGHFLIEGDLNPDNSDVDKLFIQLVQTYNQLFEENPINASGVDAKAILSARLSKSRRLENLIAQLPGEKKNGLFGNLIALSLGLTPNFKSNFDLAEDAKLQLSKDTYDDDLDNLLAQIGDQYADLFLAAKNLSDAILLSDILRVNTEITKAPLSASMIKRYDEHHQDLTLLKALVRQQLPEKYKEIFFDQSKNGYAGYIDGGASQEEFYKFIKPILEKMDGTEELLVKLNREDLLRKQRTFDNGSIPHQIHLGELHAILRRQEDFYPFLKDNREKIEKILTFRIPYYVGPLARGNSRFAWMTRKSEETITPWNFEEVVDKGASAQSFIERMTNFDKNLPNEKVLPKHSLLYEYFTVYNELTKVKYVTEGMRKPAFLSGEQKKAIVDLLFKTNRKVTVKQLKEDYFKKIECFDSVEISGVEDRFNASLGTYHDLLKIIKDKDFLDNEENEDILEDIVLTLTLFEDREMIEERLKTYAHLFDDKVMKQLKRRRYTGWGRLSRKLINGIRDKQSGKTILDFLKSDGFANRNFMQLIHDDSLTFKEDIQKAQVSGQGDSLHEHIANLAGSPAIKKGILQTVKVVDELVKVMGRHKPENIVIEMARENQTTQKGQKNSRERMKRIEEGIKELGSQILKEHPVENTQLQNEKLYLYYLQNGRDMYVDQELDINRLSDYDVDHIVPQSFLKDDSIDNKVLTRSDKARGKSDNVPSEEVVKKMKNYWRQLLNAKLITQRKFDNLTKAERGGLSELDKAGFIKRQLVETRQITKHVAQILDSRMNTKYDENDKLIREVKVITLKSKLVSDFRKDFQFYKVREINNYHHAHDAYLNAVVGTALIKKYPKLESEFVYGDYKVYDVRKMIAKSEQEIGKATAKYFFYSNIMNFFKTEITLANGEIRKRPLIETNGETGEIVWDKGRDFATVRKVLSMPQVNIVKKTEVQTGGFSKESILPKRNSDKLIARKKDWDPKKYGGFDSPTVAYSVLVVAKVEKGKSKKLKSVKELLGITIMERSSFEKNPIDFLEAKGYKEVKKDLIIKLPKYSLFELENGRKRMLASAGELQKGNELALPSKYVNFLYLASHYEKLKGSPEDNEQKQLFVEQHKHYLDEIIEQISEFSKRVILADANLDKVLSAYNKHRDKPIREQAENIIHLFTLTNLGAPAAFKYFDTTIDRKRYTSTKEVLDATLIHQSITGLYETRIDLSQLGGDGGPAPGGSGGTLQLEEEYRLFEPESTQKQEMDIWLKNFPQAWAETGGMGTAHCQAPVLIQLKATATPISIRQYPMPHEAYQGIKPHIRRMLDQGILKPCQSPWNTPLLPVKKPGTEDYRPVQDLREVNKRVEDIHPTVPNPYNLLSTLPPSHPWYTVLDLKDAFFCLRLHSESQLLFAFEWRDPEIGLSGQLTWTRLPQGFKNSPTLFNEALHSDLADFRVRYPALVLLQYVDDLLLAAATRTECLEGTKALLETLGNKGYRASAKKAQICLQEVTYLGYSLKDGQRWLTKARKEAILSIPVPKNSRQVREFLGKAGYCRLFIPGFAELAAPLYPLTRPGTLFQWGTEQQLAFEDIKKALLSSPALGLPDITKPFELFIDENSGFAKGVLVQKLGPWKRPVAYLSKKLDTVASGWPPCLRMVAAIAILVKDAGKLTLGQPLTILTSHPVEALVRQPPNKWLSNARMTHYQAMLLDAERVHFGPTVSLNPATLLPLPSGGNHHDCLQILAETHGTRPDLTDQPLPDADLTWYTDGSSFIRNGEREAGAAVTTESEVIWAAPLPPGTSAQRAELIALTQALKMAEGKKLTVYTDSRYAFATTHVHGEIYRRRGWLTSEGKEIKNKNEILALLEALFLPKRLSIIHCPGHQKGDSPQAKGNRLADDTAKKAATETHSSLTVLPAGKRTADGSEFEKRTADGSEFESPKKKAKVE

SEQ ID NO: 1229 - protein, 2090 aa, synthetic construct
MPAAKRVKLDGGDKKYSIGLDIGTNSVGWAVITDEYKVPSKKFKVLGNTDRHSIKKNLIGALLFDSGETAEATRLKRTARRRYTRRKNRICYLQEIFSNEMAKVDDSFFHRLEESFLVEEDKKHERHPIFGNIVDEVAYHEKYPTIYHLRKKLVDSTDKADLRLIYLALAHMIKFRGHFLIEGDLNPDNSDVDKLFIQLVQTYNQLFEENPINASGVDAKAILSARLSKSRRLENLIAQLPGEKKNGLFGNLIALSLGLTPNFKSNFDLAEDAKLQLSKDTYDDDLDNLLAQIGDQYADLFLAAKNLSDAILLSDILRVNTEITKAPLSASMIKRYDEHHQDLTLLKALVRQQLPEKYKEIFFDQSKNGYAGYIDGGASQEEFYKFIKPILEKMDGTEELLVKLNREDLLRKQRTFDNGSIPHQIHLGELHAILRRQEDFYPFLKDNREKIEKILTFRIPYYVGPLARGNSRFAWMTRKSEETITPWNFEEVVDKGASAQSFIERMTNFDKNLPNEKVLPKHSLLYEYFTVYNELTKVKYVTEGMRKPAFLSGEQKKAIVDLLFKTNRKVTVKQLKEDYFKKIECFDSVEISGVEDRFNASLGTYHDLLKIIKDKDFLDNEENEDILEDIVLTLTLFEDREMIEERLKTYAHLFDDKVMKQLKRRRYTGWGRLSRKLINGIRDKQSGKTILDFLKSDGFANRNFMQLIHDDSLTFKEDIQKAQVSGQGDSLHEHIANLAGSPAIKKGILQTVKVVDELVKVMGRHKPENIVIEMARENQTTQKGQKNSRERMKRIEEGIKELGSQILKEHPVENTQLQNEKLYLYYLQNGRDMYVDQELDINRLSDYDVDHIVPQSFLKDDSIDNKVLTRSDKARGKSDNVPSEEVVKKMKNYWRQLLNAKLITQRKFDNLTKAERGGLSELDKAGFIKRQLVETRQITKHVAQILDSRMNTKYDENDKLIREVKVITLKSKLVSDFRKDFQFYKVREINNYHHAHDAYLNAVVGTALIKKYPKLESEFVYGDYKVYDVRKMIAKSEQEIGKATAKYFFYSNIMNFFKTEITLANGEIRKRPLIETNGETGEIVWDKGRDFATVRKVLSMPQVNIVKKTEVQTGGFSKESILPKRNSDKLIARKKDWDPKKYGGFDSPTVAYSVLVVAKVEKGKSKKLKSVKELLGITIMERSSFEKNPIDFLEAKGYKEVKKDLIIKLPKYSLFELENGRKRMLASAGELQKGNELALPSKYVNFLYLASHYEKLKGSPEDNEQKQLFVEQHKHYLDEIIEQISEFSKRVILADANLDKVLSAYNKHRDKPIREQAENIIHLFTLTNLGAPAAFKYFDTTIDRKRYTSTKEVLDATLIHQSITGLYETRIDLSQLGGDGGGGGPAPGGTLQLEEEYRLFEPESTQKQEMDIWLKNFPQAWAETGGMGTAHCQAPVLIQLKATATPISIRQYPMPHEAYQGIKPHIRRMLDQGILKPCQSPWNTPLLPVKKPGTEDYRPVQDLREVNKRVEDIHPTVPNPYNLLSTLPPSHPWYTVLDLKDAFFCLRLHSESQLLFAFEWRDPEIGLSGQLTWTRLPQGFKNSPTLFNEALHSDLADFRVRYPALVLLQYVDDLLLAAATRTECLEGTKALLETLGNKGYRASAKKAQICLQEVTYLGYSLKDGQRWLTKARKEAILSIPVPKNSRQVREFLGKAGYCRLFIPGFAELAAPLYPLTRPGTLFQWGTEQQLAFEDIKKALLSSPALGLPDITKPFELFIDENSGFAKGVLVQKLGPWKRPVAYLSKKLDTVASGWPPCLRMVAAIAILVKDAGKLTLGQPLTILTSHPVEALVRQPPNKWLSNARMTHYQAMLLDAERVHFGPTVSLNPATLLPLPSGGNHHDCLQILAETHGTRPDLTDQPLPDADLTWYTDGSSFIRNGEREAGAAVTTESEVIWAAPLPPGTSAQRAELIALTQALKMAEGKKLTVYTDSRYAFATTHVHGEIYRRRGWLTSEGKEIKNKNEILALLEALFLPKRLSIIHCPGHQKGDSPQAKGNRLADDTAKKAATETHSSLTVLPAGKRTADGSEFEKRTADGSEFESPKKKAKVE

SEQ ID NO: 1230 - protein, 2092 aa, synthetic construct
MPAAKRVKLDGGDKKYSIGLDIGTNSVGWAVITDEYKVPSKKFKVLGNTDRHSIKKNLIGALLFDSGETAEATRLKRTARRRYTRRKNRICYLQEIFSNEMAKVDDSFFHRLEESFLVEEDKKHERHPIFGNIVDEVAYHEKYPTIYHLRKKLVDSTDKADLRLIYLALAHMIKFRGHFLIEGDLNPDNSDVDKLFIQLVQTYNQLFEENPINASGVDAKAILSARLSKSRRLENLIAQLPGEKKNGLFGNLIALSLGLTPNFKSNFDLAEDAKLQLSKDTYDDDLDNLLAQIGDQYADLFLAAKNLSDAILLSDILRVNTEITKAPLSASMIKRYDEHHQDLTLLKALVRQQLPEKYKEIFFDQSKNGYAGYIDGGASQEEFYKFIKPILEKMDGTEELLVKLNREDLLRKQRTFDNGSIPHQIHLGELHAILRRQEDFYPFLKDNREKIEKILTFRIPYYVGPLARGNSRFAWMTRKSEETITPWNFEEVVDKGASAQSFIERMTNFDKNLPNEKVLPKHSLLYEYFTVYNELTKVKYVTEGMRKPAFLSGEQKKAIVDLLFKTNRKVTVKQLKEDYFKKIECFDSVEISGVEDRFNASLGTYHDLLKIIKDKDFLDNEENEDILEDIVLTLTLFEDREMIEERLKTYAHLFDDKVMKQLKRRRYTGWGRLSRKLINGIRDKQSGKTILDFLKSDGFANRNFMQLIHDDSLTFKEDIQKAQVSGQGDSLHEHIANLAGSPAIKKGILQTVKVVDELVKVMGRHKPENIVIEMARENQTTQKGQKNSRERMKRIEEGIKELGSQILKEHPVENTQLQNEKLYLYYLQNGRDMYVDQELDINRLSDYDVDHIVPQSFLKDDSIDNKVLTRSDKARGKSDNVPSEEVVKKMKNYWRQLLNAKLITQRKFDNLTKAERGGLSELDKAGFIKRQLVETRQITKHVAQILDSRMNTKYDENDKLIREVKVITLKSKLVSDFRKDFQFYKVREINNYHHAHDAYLNAVVGTALIKKYPKLESEFVYGDYKVYDVRKMIAKSEQEIGKATAKYFFYSNIMNFFKTEITLANGEIRKRPLIETNGETGEIVWDKGRDFATVRKVLSMPQVNIVKKTEVQTGGFSKESILPKRNSDKLIARKKDWDPKKYGGFDSPTVAYSVLVVAKVEKGKSKKLKSVKELLGITIMERSSFEKNPIDFLEAKGYKEVKKDLIIKLPKYSLFELENGRKRMLASAGELQKGNELALPSKYVNFLYLASHYEKLKGSPEDNEQKQLFVEQHKHYLDEIIEQISEFSKRVILADANLDKVLSAYNKHRDKPIREQAENIIHLFTLTNLGAPAAFKYFDTTIDRKRYTSTKEVLDATLIHQSITGLYETRIDLSQLGGDGGPAPEAAAKGGTLQLEEEYRLFEPESTQKQEMDIWLKNFPQAWAETGGMGTAHCQAPVLIQLKATATPISIRQYPMPHEAYQGIKPHIRRMLDQGILKPCQSPWNTPLLPVKKPGTEDYRPVQDLREVNKRVEDIHPTVPNPYNLLSTLPPSHPWYTVLDLKDAFFCLRLHSESQLLFAFEWRDPEIGLSGQLTWTRLPQGFKNSPTLFNEALHSDLADFRVRYPALVLLQYVDDLLLAAATRTECLEGTKALLETLGNKGYRASAKKAQICLQEVTYLGYSLKDGQRWLTKARKEAILSIPVPKNSRQVREFLGKAGYCRLFIPGFAELAAPLYPLTRPGTLFQWGTEQQLAFEDIKKALLSSPALGLPDITKPFELFIDENSGFAKGVLVQKLGPWKRPVAYLSKKLDTVASGWPPCLRMVAAIAILVKDAGKLTLGQPLTILTSHPVEALVRQPPNKWLSNARMTHYQAMLLDAERVHFGPTVSLNPATLLPLPSGGNHHDCLQILAETHGTRPDLTDQPLPDADLTWYTDGSSFIRNGEREAGAAVTTESEVIWAAPLPPGTSAQRAELIALTQALKMAEGKKLTVYTDSRYAFATTHVHGEIYRRRGWLTSEGKEIKNKNEILALLEALFLPKRLSIIHCPGHQKGDSPQAKGNRLADDTAKKAATETHSSLTVLPAGKRTADGSEFEKRTADGSEFESPKKKAKVE

SEQ ID NO: 1231 - protein, 2099 aa, synthetic construct
MPAAKRVKLDGGDKKYSIGLDIGTNSVGWAVITDEYKVPSKKFKVLGNTDRHSIKKNLIGALLFDSGETAEATRLKRTARRRYTRRKNRICYLQEIFSNEMAKVDDSFFHRLEESFLVEEDKKHERHPIFGNIVDEVAYHEKYPTIYHLRKKLVDSTDKADLRLIYLALAHMIKFRGHFLIEGDLNPDNSDVDKLFIQLVQTYNQLFEENPINASGVDAKAILSARLSKSRRLENLIAQLPGEKKNGLFGNLIALSLGLTPNFKSNFDLAEDAKLQLSKDTYDDDLDNLLAQIGDQYADLFLAAKNLSDAILLSDILRVNTEITKAPLSASMIKRYDEHHQDLTLLKALVRQQLPEKYKEIFFDQSKNGYAGYIDGGASQEEFYKFIKPILEKMDGTEELLVKLNREDLLRKQRTFDNGSIPHQIHLGELHAILRRQEDFYPFLKDNREKIEKILTFRIPYYVGPLARGNSRFAWMTRKSEETITPWNFEEVVDKGASAQSFIERMTNFDKNLPNEKVLPKHSLLYEYFTVYNELTKVKYVTEGMRKPAFLSGEQKKAIVDLLFKTNRKVTVKQLKEDYFKKIECFDSVEISGVEDRFNASLGTYHDLLKIIKDKDFLDNEENEDILEDIVLTLTLFEDREMIEERLKTYAHLFDDKVMKQLKRRRYTGWGRLSRKLINGIRDKQSGKTILDFLKSDGFANRNFMQLIHDDSLTFKEDIQKAQVSGQGDSLHEHIANLAGSPAIKKGILQTVKVVDELVKVMGRHKPENIVIEMARENQTTQKGQKNSRERMKRIEEGIKELGSQILKEHPVENTQLQNEKLYLYYLQNGRDMYVDQELDINRLSDYDVDHIVPQSFLKDDSIDNKVLTRSDKARGKSDNVPSEEVVKKMKNYWRQLLNAKLITQRKFDNLTKAERGGLSELDKAGFIKRQLVETRQITKHVAQILDSRMNTKYDENDKLIREVKVITLKSKLVSDFRKDFQFYKVREINNYHHAHDAYLNAVVGTALIKKYPKLESEFVYGDYKVYDVRKMIAKSEQEIGKATAKYFFYSNIMNFFKTEITLANGEIRKRPLIETNGETGEIVWDKGRDFATVRKVLSMPQVNIVKKTEVQTGGFSKESILPKRNSDKLIARKKDWDPKKYGGFDSPTVAYSVLVVAKVEKGKSKKLKSVKELLGITIMERSSFEKNPIDFLEAKGYKEVKKDLIIKLPKYSLFELENGRKRMLASAGELQKGNELALPSKYVNFLYLASHYEKLKGSPEDNEQKQLFVEQHKHYLDEIIEQISEFSKRVILADANLDKVLSAYNKHRDKPIREQAENIIHLFTLTNLGAPAAFKYFDTTIDRKRYTSTKEVLDATLIHQSITGLYETRIDLSQLGGDGGGGGGSGGGGSGGGGSGGTLQLEEEYRLFEPESTQKQEMDIWLKNFPQAWAETGGMGTAHCQAPVLIQLKATATPISIRQYPMPHEAYQGIKPHIRRMLDQGILKPCQSPWNTPLLPVKKPGTEDYRPVQDLREVNKRVEDIHPTVPNPYNLLSTLPPSHPWYTVLDLKDAFFCLRLHSESQLLFAFEWRDPEIGLSGQLTWTRLPQGFKNSPTLFNEALHSDLADFRVRYPALVLLQYVDDLLLAAATRTECLEGTKALLETLGNKGYRASAKKAQICLQEVTYLGYSLKDGQRWLTKARKEAILSIPVPKNSRQVREFLGKAGYCRLFIPGFAELAAPLYPLTRPGTLFQWGTEQQLAFEDIKKALLSSPALGLPDITKPFELFIDENSGFAKGVLVQKLGPWKRPVAYLSKKLDTVASGWPPCLRMVAAIAILVKDAGKLTLGQPLTILTSHPVEALVRQPPNKWLSNARMTHYQAMLLDAERVHFGPTVSLNPATLLPLPSGGNHHDCLQILAETHGTRPDLTDQPLPDADLTWYTDGSSFIRNGEREAGAAVTTESEVIWAAPLPPGTSAQRAELIALTQALKMAEGKKLTVYTDSRYAFATTHVHGEIYRRRGWLTSEGKEIKNKNEILALLEALFLPKRLSIIHCPGHQKGDSPQAKGNRLADDTAKKAATETHSSLTVLPAGKRTADGSEFEKRTADGSEFESPKKKAKVE

SEQ ID NO: 1232 - protein, 2095 aa, synthetic construct
MPAAKRVKLDGGDKKYSIGLDIGTNSVGWAVITDEYKVPSKKFKVLGNTDRHSIKKNLIGALLFDSGETAEATRLKRTARRRYTRRKNRICYLQEIFSNEMAKVDDSFFHRLEESFLVEEDKKHERHPIFGNIVDEVAYHEKYPTIYHLRKKLVDSTDKADLRLIYLALAHMIKFRGHFLIEGDLNPDNSDVDKLFIQLVQTYNQLFEENPINASGVDAKAILSARLSKSRRLENLIAQLPGEKKNGLFGNLIALSLGLTPNFKSNFDLAEDAKLQLSKDTYDDDLDNLLAQIGDQYADLFLAAKNLSDAILLSDILRVNTEITKAPLSASMIKRYDEHHQDLTLLKALVRQQLPEKYKEIFFDQSKNGYAGYIDGGASQEEFYKFIKPILEKMDGTEELLVKLNREDLLRKQRTFDNGSIPHQIHLGELHAILRRQEDFYPFLKDNREKIEKILTFRIPYYVGPLARGNSRFAWMTRKSEETITPWNFEEVVDKGASAQSFIERMTNFDKNLPNEKVLPKHSLLYEYFTVYNELTKVKYVTEGMRKPAFLSGEQKKAIVDLLFKTNRKVTVKQLKEDYFKKIECFDSVEISGVEDRFNASLGTYHDLLKIIKDKDFLDNEENEDILEDIVLTLTLFEDREMIEERLKTYAHLFDDKVMKQLKRRRYTGWGRLSRKLINGIRDKQSGKTILDFLKSDGFANRNFMQLIHDDSLTFKEDIQKAQVSGQGDSLHEHIANLAGSPAIKKGILQTVKVVDELVKVMGRHKPENIVIEMARENQTTQKGQKNSRERMKRIEEGIKELGSQILKEHPVENTQLQNEKLYLYYLQNGRDMYVDQELDINRLSDYDVDHIVPQSFLKDDSIDNKVLTRSDKARGKSDNVPSEEVVKKMKNYWRQLLNAKLITQRKFDNLTKAERGGLSELDKAGFIKRQLVETRQITKHVAQILDSRMNTKYDENDKLIREVKVITLKSKLVSDFRKDFQFYKVREINNYHHAHDAYLNAVVGTALIKKYPKLESEFVYGDYKVYDVRKMIAKSEQEIGKATAKYFFYSNIMNFFKTEITLANGEIRKRPLIETNGETGEIVWDKGRDFATVRKVLSMPQVNIVKKTEVQTGGFSKESILPKRNSDKLIARKKDWDPKKYGGFDSPTVAYSVLVVAKVEKGKSKKLKSVKELLGITIMERSSFEKNPIDFLEAKGYKEVKKDLIIKLPKYSLFELENGRKRMLASAGELQKGNELALPSKYVNFLYLASHYEKLKGSPEDNEQKQLFVEQHKHYLDEIIEQISEFSKRVILADANLDKVLSAYNKHRDKPIREQAENIIHLFTLTNLGAPAAFKYFDTTIDRKRYTSTKEVLDATLIHQSITGLYETRIDLSQLGGDGGPAPAPAPAPAPGGTLQLEEEYRLFEPESTQKQEMDIWLKNFPQAWAETGGMGTAHCQAPVLIQLKATATPISIRQYPMPHEAYQGIKPHIRRMLDQGILKPCQSPWNTPLLPVKKPGTEDYRPVQDLREVNKRVEDIHPTVPNPYNLLSTLPPSHPWYTVLDLKDAFFCLRLHSESQLLFAFEWRDPEIGLSGQLTWTRLPQGFKNSPTLFNEALHSDLADFRVRYPALVLLQYVDDLLLAAATRTECLEGTKALLETLGNKGYRASAKKAQICLQEVTYLGYSLKDGQRWLTKARKEAILSIPVPKNSRQVREFLGKAGYCRLFIPGFAELAAPLYPLTRPGTLFQWGTEQQLAFEDIKKALLSSPALGLPDITKPFELFIDENSGFAKGVLVQKLGPWKRPVAYLSKKLDTVASGWPPCLRMVAAIAILVKDAGKLTLGQPLTILTSHPVEALVRQPPNKWLSNARMTHYQAMLLDAERVHFGPTVSLNPATLLPLPSGGNHHDCLQILAETHGTRPDLTDQPLPDADLTWYTDGSSFIRNGEREAGAAVTTESEVIWAAPLPPGTSAQRAELIALTQALKMAEGKKLTVYTDSRYAFATTHVHGEIYRRRGWLTSEGKEIKNKNEILALLEALFLPKRLSIIHCPGHQKGDSPQAKGNRLADDTAKKAATETHSSLTVLPAGKRTADGSEFEKRTADGSEFESPKKKAKVE

SEQ ID NO: 1233 - protein, 2094 aa, synthetic construct
MPAAKRVKLDGGDKKYSIGLDIGTNSVGWAVITDEYKVPSKKFKVLGNTDRHSIKKNLIGALLFDSGETAEATRLKRTARRRYTRRKNRICYLQEIFSNEMAKVDDSFFHRLEESFLVEEDKKHERHPIFGNIVDEVAYHEKYPTIYHLRKKLVDSTDKADLRLIYLALAHMIKFRGHFLIEGDLNPDNSDVDKLFIQLVQTYNQLFEENPINASGVDAKAILSARLSKSRRLENLIAQLPGEKKNGLFGNLIALSLGLTPNFKSNFDLAEDAKLQLSKDTYDDDLDNLLAQIGDQYADLFLAAKNLSDAILLSDILRVNTEITKAPLSASMIKRYDEHHQDLTLLKALVRQQLPEKYKEIFFDQSKNGYAGYIDGGASQEEFYKFIKPILEKMDGTEELLVKLNREDLLRKQRTFDNGSIPHQIHLGELHAILRRQEDFYPFLKDNREKIEKILTFRIPYYVGPLARGNSRFAWMTRKSEETITPWNFEEVVDKGASAQSFIERMTNFDKNLPNEKVLPKHSLLYEYFTVYNELTKVKYVTEGMRKPAFLSGEQKKAIVDLLFKTNRKVTVKQLKEDYFKKIECFDSVEISGVEDRFNASLGTYHDLLKIIKDKDFLDNEENEDILEDIVLTLTLFEDREMIEERLKTYAHLFDDKVMKQLKRRRYTGWGRLSRKLINGIRDKQSGKTILDFLKSDGFANRNFMQLIHDDSLTFKEDIQKAQVSGQGDSLHEHIANLAGSPAIKKGILQTVKVVDELVKVMGRHKPENIVIEMARENQTTQKGQKNSRERMKRIEEGIKELGSQILKEHPVENTQLQNEKLYLYYLQNGRDMYVDQELDINRLSDYDVDHIVPQSFLKDDSIDNKVLTRSDKARGKSDNVPSEEVVKKMKNYWRQLLNAKLITQRKFDNLTKAERGGLSELDKAGFIKRQLVETRQITKHVAQILDSRMNTKYDENDKLIREVKVITLKSKLVSDFRKDFQFYKVREINNYHHAHDAYLNAVVGTALIKKYPKLESEFVYGDYKVYDVRKMIAKSEQEIGKATAKYFFYSNIMNFFKTEITLANGEIRKRPLIETNGETGEIVWDKGRDFATVRKVLSMPQVNIVKKTEVQTGGFSKESILPKRNSDKLIARKKDWDPKKYGGFDSPTVAYSVLVVAKVEKGKSKKLKSVKELLGITIMERSSFEKNPIDFLEAKGYKEVKKDLIIKLPKYSLFELENGRKRMLASAGELQKGNELALPSKYVNFLYLASHYEKLKGSPEDNEQKQLFVEQHKHYLDEIIEQISEFSKRVILADANLDKVLSAYNKHRDKPIREQAENIIHLFTLTNLGAPAAFKYFDTTIDRKRYTSTKEVLDATLIHQSITGLYETRIDLSQLGGDGGGGGGSGGGGSGGTLQLEEEYRLFEPESTQKQEMDIWLKNFPQAWAETGGMGTAHCQAPVLIQLKATATPISIRQYPMPHEAYQGIKPHIRRMLDQGILKPCQSPWNTPLLPVKKPGTEDYRPVQDLREVNKRVEDIHPTVPNPYNLLSTLPPSHPWYTVLDLKDAFFCLRLHSESQLLFAFEWRDPEIGLSGQLTWTRLPQGFKNSPTLFNEALHSDLADFRVRYPALVLLQYVDDLLLAAATRTECLEGTKALLETLGNKGYRASAKKAQICLQEVTYLGYSLKDGQRWLTKARKEAILSIPVPKNSRQVREFLGKAGYCRLFIPGFAELAAPLYPLTRPGTLFQWGTEQQLAFEDIKKALLSSPALGLPDITKPFELFIDENSGFAKGVLVQKLGPWKRPVAYLSKKLDTVASGWPPCLRMVAAIAILVKDAGKLTLGQPLTILTSHPVEALVRQPPNKWLSNARMTHYQAMLLDAERVHFGPTVSLNPATLLPLPSGGNHHDCLQILAETHGTRPDLTDQPLPDADLTWYTDGSSFIRNGEREAGAAVTTESEVIWAAPLPPGTSAQRAELIALTQALKMAEGKKLTVYTDSRYAFATTHVHGEIYRRRGWLTSEGKEIKNKNEILALLEALFLPKRLSIIHCPGHQKGDSPQAKGNRLADDTAKKAATETHSSLTVLPAGKRTADGSEFEKRTADGSEFESPKKKAKVE

SEQ ID NO: 1234 - protein, 2095 aa, synthetic construct
MPAAKRVKLDGGDKKYSIGLDIGTNSVGWAVITDEYKVPSKKFKVLGNTDRHSIKKNLIGALLFDSGETAEATRLKRTARRRYTRRKNRICYLQEIFSNEMAKVDDSFFHRLEESFLVEEDKKHERHPIFGNIVDEVAYHEKYPTIYHLRKKLVDSTDKADLRLIYLALAHMIKFRGHFLIEGDLNPDNSDVDKLFIQLVQTYNQLFEENPINASGVDAKAILSARLSKSRRLENLIAQLPGEKKNGLFGNLIALSLGLTPNFKSNFDLAEDAKLQLSKDTYDDDLDNLLAQIGDQYADLFLAAKNLSDAILLSDILRVNTEITKAPLSASMIKRYDEHHQDLTLLKALVRQQLPEKYKEIFFDQSKNGYAGYIDGGASQEEFYKFIKPILEKMDGTEELLVKLNREDLLRKQRTFDNGSIPHQIHLGELHAILRRQEDFYPFLKDNREKIEKILTFRIPYYVGPLARGNSRFAWMTRKSEETITPWNFEEVVDKGASAQSFIERMTNFDKNLPNEKVLPKHSLLYEYFTVYNELTKVKYVTEGMRKPAFLSGEQKKAIVDLLFKTNRKVTVKQLKEDYFKKIECFDSVEISGVEDRFNASLGTYHDLLKIIKDKDFLDNEENEDILEDIVLTLTLFEDREMIEERLKTYAHLFDDKVMKQLKRRRYTGWGRLSRKLINGIRDKQSGKTILDFLKSDGFANRNFMQLIHDDSLTFKEDIQKAQVSGQGDSLHEHIANLAGSPAIKKGILQTVKVVDELVKVMGRHKPENIVIEMARENQTTQKGQKNSRERMKRIEEGIKELGSQILKEHPVENTQLQNEKLYLYYLQNGRDMYVDQELDINRLSDYDVDHIVPQSFLKDDSIDNKVLTRSDKARGKSDNVPSEEVVKKMKNYWRQLLNAKLITQRKFDNLTKAERGGLSELDKAGFIKRQLVETRQITKHVAQILDSRMNTKYDENDKLIREVKVITLKSKLVSDFRKDFQFYKVREINNYHHAHDAYLNAVVGTALIKKYPKLESEFVYGDYKVYDVRKMIAKSEQEIGKATAKYFFYSNIMNFFKTEITLANGEIRKRPLIETNGETGEIVWDKGRDFATVRKVLSMPQVNIVKKTEVQTGGFSKESILPKRNSDKLIARKKDWDPKKYGGFDSPTVAYSVLVVAKVEKGKSKKLKSVKELLGITIMERSSFEKNPIDFLEAKGYKEVKKDLIIKLPKYSLFELENGRKRMLASAGELQKGNELALPSKYVNFLYLASHYEKLKGSPEDNEQKQLFVEQHKHYLDEIIEQISEFSKRVILADANLDKVLSAYNKHRDKPIREQAENIIHLFTLTNLGAPAAFKYFDTTIDRKRYTSTKEVLDATLIHQSITGLYETRIDLSQLGGDGGEAAAKGSSGGSGGTLQLEEEYRLFEPESTQKQEMDIWLKNFPQAWAETGGMGTAHCQAPVLIQLKATATPISIRQYPMPHEAYQGIKPHIRRMLDQGILKPCQSPWNTPLLPVKKPGTEDYRPVQDLREVNKRVEDIHPTVPNPYNLLSTLPPSHPWYTVLDLKDAFFCLRLHSESQLLFAFEWRDPEIGLSGQLTWTRLPQGFKNSPTLFNEALHSDLADFRVRYPALVLLQYVDDLLLAAATRTECLEGTKALLETLGNKGYRASAKKAQICLQEVTYLGYSLKDGQRWLTKARKEAILSIPVPKNSRQVREFLGKAGYCRLFIPGFAELAAPLYPLTRPGTLFQWGTEQQLAFEDIKKALLSSPALGLPDITKPFELFIDENSGFAKGVLVQKLGPWKRPVAYLSKKLDTVASGWPPCLRMVAAIAILVKDAGKLTLGQPLTILTSHPVEALVRQPPNKWLSNARMTHYQAMLLDAERVHFGPTVSLNPATLLPLPSGGNHHDCLQILAETHGTRPDLTDQPLPDADLTWYTDGSSFIRNGEREAGAAVTTESEVIWAAPLPPGTSAQRAELIALTQALKMAEGKKLTVYTDSRYAFATTHVHGEIYRRRGWLTSEGKEIKNKNEILALLEALFLPKRLSIIHCPGHQKGDSPQAKGNRLADDTAKKAATETHSSLTVLPAGKRTADGSEFEKRTADGSEFESPKKKAKVE

SEQ ID NO: 1235 - protein, 2095 aa, synthetic construct
MPAAKRVKLDGGDKKYSIGLDIGTNSVGWAVITDEYKVPSKKFKVLGNTDRHSIKKNLIGALLFDSGETAEATRLKRTARRRYTRRKNRICYLQEIFSNEMAKVDDSFFHRLEESFLVEEDKKHERHPIFGNIVDEVAYHEKYPTIYHLRKKLVDSTDKADLRLIYLALAHMIKFRGHFLIEGDLNPDNSDVDKLFIQLVQTYNQLFEENPINASGVDAKAILSARLSKSRRLENLIAQLPGEKKNGLFGNLIALSLGLTPNFKSNFDLAEDAKLQLSKDTYDDDLDNLLAQIGDQYADLFLAAKNLSDAILLSDILRVNTEITKAPLSASMIKRYDEHHQDLTLLKALVRQQLPEKYKEIFFDQSKNGYAGYIDGGASQEEFYKFIKPILEKMDGTEELLVKLNREDLLRKQRTFDNGSIPHQIHLGELHAILRRQEDFYPFLKDNREKIEKILTFRIPYYVGPLARGNSRFAWMTRKSEETITPWNFEEVVDKGASAQSFIERMTNFDKNLPNEKVLPKHSLLYEYFTVYNELTKVKYVTEGMRKPAFLSGEQKKAIVDLLFKTNRKVTVKQLKEDYFKKIECFDSVEISGVEDRFNASLGTYHDLLKIIKDKDFLDNEENEDILEDIVLTLTLFEDREMIEERLKTYAHLFDDKVMKQLKRRRYTGWGRLSRKLINGIRDKQSGKTILDFLKSDGFANRNFMQLIHDDSLTFKEDIQKAQVSGQGDSLHEHIANLAGSPAIKKGILQTVKVVDELVKVMGRHKPENIVIEMARENQTTQKGQKNSRERMKRIEEGIKELGSQILKEHPVENTQLQNEKLYLYYLQNGRDMYVDQELDINRLSDYDVDHIVPQSFLKDDSIDNKVLTRSDKARGKSDNVPSEEVVKKMKNYWRQLLNAKLITQRKFDNLTKAERGGLSELDKAGFIKRQLVETRQITKHVAQILDSRMNTKYDENDKLIREVKVITLKSKLVSDFRKDFQFYKVREINNYHHAHDAYLNAVVGTALIKKYPKLESEFVYGDYKVYDVRKMIAKSEQEIGKATAKYFFYSNIMNFFKTEITLANGEIRKRPLIETNGETGEIVWDKGRDFATVRKVLSMPQVNIVKKTEVQTGGFSKESILPKRNSDKLIARKKDWDPKKYGGFDSPTVAYSVLVVAKVEKGKSKKLKSVKELLGITIMERSSFEKNPIDFLEAKGYKEVKKDLIIKLPKYSLFELENGRKRMLASAGELQKGNELALPSKYVNFLYLASHYEKLKGSPEDNEQKQLFVEQHKHYLDEIIEQISEFSKRVILADANLDKVLSAYNKHRDKPIREQAENIIHLFTLTNLGAPAAFKYFDTTIDRKRYTSTKEVLDATLIHQSITGLYETRIDLSQLGGDGGEAAAKGGGGGSGGTLQLEEEYRLFEPESTQKQEMDIWLKNFPQAWAETGGMGTAHCQAPVLIQLKATATPISIRQYPMPHEAYQGIKPHIRRMLDQGILKPCQSPWNTPLLPVKKPGTEDYRPVQDLREVNKRVEDIHPTVPNPYNLLSTLPPSHPWYTVLDLKDAFFCLRLHSESQLLFAFEWRDPEIGLSGQLTWTRLPQGFKNSPTLFNEALHSDLADFRVRYPALVLLQYVDDLLLAAATRTECLEGTKALLETLGNKGYRASAKKAQICLQEVTYLGYSLKDGQRWLTKARKEAILSIPVPKNSRQVREFLGKAGYCRLFIPGFAELAAPLYPLTRPGTLFQWGTEQQLAFEDIKKALLSSPALGLPDITKPFELFIDENSGFAKGVLVQKLGPWKRPVAYLSKKLDTVASGWPPCLRMVAAIAILVKDAGKLTLGQPLTILTSHPVEALVRQPPNKWLSNARMTHYQAMLLDAERVHFGPTVSLNPATLLPLPSGGNHHDCLQILAETHGTRPDLTDQPLPDADLTWYTDGSSFIRNGEREAGAAVTTESEVIWAAPLPPGTSAQRAELIALTQALKMAEGKKLTVYTDSRYAFATTHVHGEIYRRRGWLTSEGKEIKNKNEILALLEALFLPKRLSIIHCPGHQKGDSPQAKGNRLADDTAKKAATETHSSLTVLPAGKRTADGSEFEKRTADGSEFESPKKKAKVE

SEQ ID NO: 1236 - protein, 2092 aa, synthetic construct
MPAAKRVKLDGGDKKYSIGLDIGTNSVGWAVITDEYKVPSKKFKVLGNTDRHSIKKNLIGALLFDSGETAEATRLKRTARRRYTRRKNRICYLQEIFSNEMAKVDDSFFHRLEESFLVEEDKKHERHPIFGNIVDEVAYHEKYPTIYHLRKKLVDSTDKADLRLIYLALAHMIKFRGHFLIEGDLNPDNSDVDKLFIQLVQTYNQLFEENPINASGVDAKAILSARLSKSRRLENLIAQLPGEKKNGLFGNLIALSLGLTPNFKSNFDLAEDAKLQLSKDTYDDDLDNLLAQIGDQYADLFLAAKNLSDAILLSDILRVNTEITKAPLSASMIKRYDEHHQDLTLLKALVRQQLPEKYKEIFFDQSKNGYAGYIDGGASQEEFYKFIKPILEKMDGTEELLVKLNREDLLRKQRTFDNGSIPHQIHLGELHAILRRQEDFYPFLKDNREKIEKILTFRIPYYVGPLARGNSRFAWMTRKSEETITPWNFEEVVDKGASAQSFIERMTNFDKNLPNEKVLPKHSLLYEYFTVYNELTKVKYVTEGMRKPAFLSGEQKKAIVDLLFKTNRKVTVKQLKEDYFKKIECFDSVEISGVEDRFNASLGTYHDLLKIIKDKDFLDNEENEDILEDIVLTLTLFEDREMIEERLKTYAHLFDDKVMKQLKRRRYTGWGRLSRKLINGIRDKQSGKTILDFLKSDGFANRNFMQLIHDDSLTFKEDIQKAQVSGQGDSLHEHIANLAGSPAIKKGILQTVKVVDELVKVMGRHKPENIVIEMARENQTTQKGQKNSRERMKRIEEGIKELGSQILKEHPVENTQLQNEKLYLYYLQNGRDMYVDQELDINRLSDYDVDHIVPQSFLKDDSIDNKVLTRSDKARGKSDNVPSEEVVKKMKNYWRQLLNAKLITQRKFDNLTKAERGGLSELDKAGFIKRQLVETRQITKHVAQILDSRMNTKYDENDKLIREVKVITLKSKLVSDFRKDFQFYKVREINNYHHAHDAYLNAVVGTALIKKYPKLESEFVYGDYKVYDVRKMIAKSEQEIGKATAKYFFYSNIMNFFKTEITLANGEIRKRPLIETNGETGEIVWDKGRDFATVRKVLSMPQVNIVKKTEVQTGGFSKESILPKRNSDKLIARKKDWDPKKYGGFDSPTVAYSVLVVAKVEKGKSKKLKSVKELLGITIMERSSFEKNPIDFLEAKGYKEVKKDLIIKLPKYSLFELENGRKRMLASAGELQKGNELALPSKYVNFLYLASHYEKLKGSPEDNEQKQLFVEQHKHYLDEIIEQISEFSKRVILADANLDKVLSAYNKHRDKPIREQAENIIHLFTLTNLGAPAAFKYFDTTIDRKRYTSTKEVLDATLIHQSITGLYETRIDLSQLGGDGGGSSEAAAKGGTLQLEEEYRLFEPESTQKQEMDIWLKNFPQAWAETGGMGTAHCQAPVLIQLKATATPISIRQYPMPHEAYQGIKPHIRRMLDQGILKPCQSPWNTPLLPVKKPGTEDYRPVQDLREVNKRVEDIHPTVPNPYNLLSTLPPSHPWYTVLDLKDAFFCLRLHSESQLLFAFEWRDPEIGLSGQLTWTRLPQGFKNSPTLFNEALHSDLADFRVRYPALVLLQYVDDLLLAAATRTECLEGTKALLETLGNKGYRASAKKAQICLQEVTYLGYSLKDGQRWLTKARKEAILSIPVPKNSRQVREFLGKAGYCRLFIPGFAELAAPLYPLTRPGTLFQWGTEQQLAFEDIKKALLSSPALGLPDITKPFELFIDENSGFAKGVLVQKLGPWKRPVAYLSKKLDTVASGWPPCLRMVAAIAILVKDAGKLTLGQPLTILTSHPVEALVRQPPNKWLSNARMTHYQAMLLDAERVHFGPTVSLNPATLLPLPSGGNHHDCLQILAETHGTRPDLTDQPLPDADLTWYTDGSSFIRNGEREAGAAVTTESEVIWAAPLPPGTSAQRAELIALTQALKMAEGKKLTVYTDSRYAFATTHVHGEIYRRRGWLTSEGKEIKNKNEILALLEALFLPKRLSIIHCPGHQKGDSPQAKGNRLADDTAKKAATETHSSLTVLPAGKRTADGSEFEKRTADGSEFESPKKKAKVE

SEQ ID NO: 1237 - protein, 2095 aa, synthetic construct
MPAAKRVKLDGGDKKYSIGLDIGTNSVGWAVITDEYKVPSKKFKVLGNTDRHSIKKNLIGALLFDSGETAEATRLKRTARRRYTRRKNRICYLQEIFSNEMAKVDDSFFHRLEESFLVEEDKKHERHPIFGNIVDEVAYHEKYPTIYHLRKKLVDSTDKADLRLIYLALAHMIKFRGHFLIEGDLNPDNSDVDKLFIQLVQTYNQLFEENPINASGVDAKAILSARLSKSRRLENLIAQLPGEKKNGLFGNLIALSLGLTPNFKSNFDLAEDAKLQLSKDTYDDDLDNLLAQIGDQYADLFLAAKNLSDAILLSDILRVNTEITKAPLSASMIKRYDEHHQDLTLLKALVRQQLPEKYKEIFFDQSKNGYAGYIDGGASQEEFYKFIKPILEKMDGTEELLVKLNREDLLRKQRTFDNGSIPHQIHLGELHAILRRQEDFYPFLKDNREKIEKILTFRIPYYVGPLARGNSRFAWMTRKSEETITPWNFEEVVDKGASAQSFIERMTNFDKNLPNEKVLPKHSLLYEYFTVYNELTKVKYVTEGMRKPAFLSGEQKKAIVDLLFKTNRKVTVKQLKEDYFKKIECFDSVEISGVEDRFNASLGTYHDLLKIIKDKDFLDNEENEDILEDIVLTLTLFEDREMIEERLKTYAHLFDDKVMKQLKRRRYTGWGRLSRKLINGIRDKQSGKTILDFLKSDGFANRNFMQLIHDDSLTFKEDIQKAQVSGQGDSLHEHIANLAGSPAIKKGILQTVKVVDELVKVMGRHKPENIVIEMARENQTTQKGQKNSRERMKRIEEGIKELGSQILKEHPVENTQLQNEKLYLYYLQNGRDMYVDQELDINRLSDYDVDHIVPQSFLKDDSIDNKVLTRSDKARGKSDNVPSEEVVKKMKNYWRQLLNAKLITQRKFDNLTKAERGGLSELDKAGFIKRQLVETRQITKHVAQILDSRMNTKYDENDKLIREVKVITLKSKLVSDFRKDFQFYKVREINNYHHAHDAYLNAVVGTALIKKYPKLESEFVYGDYKVYDVRKMIAKSEQEIGKATAKYFFYSNIMNFFKTEITLANGEIRKRPLIETNGETGEIVWDKGRDFATVRKVLSMPQVNIVKKTEVQTGGFSKESILPKRNSDKLIARKKDWDPKKYGGFDSPTVAYSVLVVAKVEKGKSKKLKSVKELLGITIMERSSFEKNPIDFLEAKGYKEVKKDLIIKLPKYSLFELENGRKRMLASAGELQKGNELALPSKYVNFLYLASHYEKLKGSPEDNEQKQLFVEQHKHYLDEIIEQISEFSKRVILADANLDKVLSAYNKHRDKPIREQAENIIHLFTLTNLGAPAAFKYFDTTIDRKRYTSTKEVLDATLIHQSITGLYETRIDLSQLGGDGGGGSEAAAKGGGGGTLQLEEEYRLFEPESTQKQEMDIWLKNFPQAWAETGGMGTAHCQAPVLIQLKATATPISIRQYPMPHEAYQGIKPHIRRMLDQGILKPCQSPWNTPLLPVKKPGTEDYRPVQDLREVNKRVEDIHPTVPNPYNLLSTLPPSHPWYTVLDLKDAFFCLRLHSESQLLFAFEWRDPEIGLSGQLTWTRLPQGFKNSPTLFNEALHSDLADFRVRYPALVLLQYVDDLLLAAATRTECLEGTKALLETLGNKGYRASAKKAQICLQEVTYLGYSLKDGQRWLTKARKEAILSIPVPKNSRQVREFLGKAGYCRLFIPGFAELAAPLYPLTRPGTLFQWGTEQQLAFEDIKKALLSSPALGLPDITKPFELFIDENSGFAKGVLVQKLGPWKRPVAYLSKKLDTVASGWPPCLRMVAAIAILVKDAGKLTLGQPLTILTSHPVEALVRQPPNKWLSNARMTHYQAMLLDAERVHFGPTVSLNPATLLPLPSGGNHHDCLQILAETHGTRPDLTDQPLPDADLTWYTDGSSFIRNGEREAGAAVTTESEVIWAAPLPPGTSAQRAELIALTQALKMAEGKKLTVYTDSRYAFATTHVHGEIYRRRGWLTSEGKEIKNKNEILALLEALFLPKRLSIIHCPGHQKGDSPQAKGNRLADDTAKKAATETHSSLTVLPAGKRTADGSEFEKRTADGSEFESPKKKAKVE

SEQ ID NO: 1238 - protein, 2093 aa, synthetic construct
MPAAKRVKLDGGDKKYSIGLDIGTNSVGWAVITDEYKVPSKKFKVLGNTDRHSIKKNLIGALLFDSGETAEATRLKRTARRRYTRRKNRICYLQEIFSNEMAKVDDSFFHRLEESFLVEEDKKHERHPIFGNIVDEVAYHEKYPTIYHLRKKLVDSTDKADLRLIYLALAHMIKFRGHFLIEGDLNPDNSDVDKLFIQLVQTYNQLFEENPINASGVDAKAILSARLSKSRRLENLIAQLPGEKKNGLFGNLIALSLGLTPNFKSNFDLAEDAKLQLSKDTYDDDLDNLLAQIGDQYADLFLAAKNLSDAILLSDILRVNTEITKAPLSASMIKRYDEHHQDLTLLKALVRQQLPEKYKEIFFDQSKNGYAGYIDGGASQEEFYKFIKPILEKMDGTEELLVKLNREDLLRKQRTFDNGSIPHQIHLGELHAILRRQEDFYPFLKDNREKIEKILTFRIPYYVGPLARGNSRFAWMTRKSEETITPWNFEEVVDKGASAQSFIERMTNFDKNLPNEKVLPKHSLLYEYFTVYNELTKVKYVTEGMRKPAFLSGEQKKAIVDLLFKTNRKVTVKQLKEDYFKKIECFDSVEISGVEDRFNASLGTYHDLLKIIKDKDFLDNEENEDILEDIVLTLTLFEDREMIEERLKTYAHLFDDKVMKQLKRRRYTGWGRLSRKLINGIRDKQSGKTILDFLKSDGFANRNFMQLIHDDSLTFKEDIQKAQVSGQGDSLHEHIANLAGSPAIKKGILQTVKVVDELVKVMGRHKPENIVIEMARENQTTQKGQKNSRERMKRIEEGIKELGSQILKEHPVENTQLQNEKLYLYYLQNGRDMYVDQELDINRLSDYDVDHIVPQSFLKDDSIDNKVLTRSDKARGKSDNVPSEEVVKKMKNYWRQLLNAKLITQRKFDNLTKAERGGLSELDKAGFIKRQLVETRQITKHVAQILDSRMNTKYDENDKLIREVKVITLKSKLVSDFRKDFQFYKVREINNYHHAHDAYLNAVVGTALIKKYPKLESEFVYGDYKVYDVRKMIAKSEQEIGKATAKYFFYSNIMNFFKTEITLANGEIRKRPLIETNGETGEIVWDKGRDFATVRKVLSMPQVNIVKKTEVQTGGFSKESILPKRNSDKLIARKKDWDPKKYGGFDSPTVAYSVLVVAKVEKGKSKKLKSVKELLGITIMERSSFEKNPIDFLEAKGYKEVKKDLIIKLPKYSLFELENGRKRMLASAGELQKGNELALPSKYVNFLYLASHYEKLKGSPEDNEQKQLFVEQHKHYLDEIIEQISEFSKRVILADANLDKVLSAYNKHRDKPIREQAENIIHLFTLTNLGAPAAFKYFDTTIDRKRYTSTKEVLDATLIHQSITGLYETRIDLSQLGGDGGPAPGSSGGGGGTLQLEEEYRLFEPESTQKQEMDIWLKNFPQAWAETGGMGTAHCQAPVLIQLKATATPISIRQYPMPHEAYQGIKPHIRRMLDQGILKPCQSPWNTPLLPVKKPGTEDYRPVQDLREVNKRVEDIHPTVPNPYNLLSTLPPSHPWYTVLDLKDAFFCLRLHSESQLLFAFEWRDPEIGLSGQLTWTRLPQGFKNSPTLFNEALHSDLADFRVRYPALVLLQYVDDLLLAAATRTECLEGTKALLETLGNKGYRASAKKAQICLQEVTYLGYSLKDGQRWLTKARKEAILSIPVPKNSRQVREFLGKAGYCRLFIPGFAELAAPLYPLTRPGTLFQWGTEQQLAFEDIKKALLSSPALGLPDITKPFELFIDENSGFAKGVLVQKLGPWKRPVAYLSKKLDTVASGWPPCLRMVAAIAILVKDAGKLTLGQPLTILTSHPVEALVRQPPNKWLSNARMTHYQAMLLDAERVHFGPTVSLNPATLLPLPSGGNHHDCLQILAETHGTRPDLTDQPLPDADLTWYTDGSSFIRNGEREAGAAVTTESEVIWAAPLPPGTSAQRAELIALTQALKMAEGKKLTVYTDSRYAFATTHVHGEIYRRRGWLTSEGKEIKNKNEILALLEALFLPKRLSIIHCPGHQKGDSPQAKGNRLADDTAKKAATETHSSLTVLPAGKRTADGSEFEKRTADGSEFESPKKKAKVE

SEQ ID NO: 1239 - protein, 2095 aa, synthetic construct
MPAAKRVKLDGGDKKYSIGLDIGTNSVGWAVITDEYKVPSKKFKVLGNTDRHSIKKNLIGALLFDSGETAEATRLKRTARRRYTRRKNRICYLQEIFSNEMAKVDDSFFHRLEESFLVEEDKKHERHPIFGNIVDEVAYHEKYPTIYHLRKKLVDSTDKADLRLIYLALAHMIKFRGHFLIEGDLNPDNSDVDKLFIQLVQTYNQLFEENPINASGVDAKAILSARLSKSRRLENLIAQLPGEKKNGLFGNLIALSLGLTPNFKSNFDLAEDAKLQLSKDTYDDDLDNLLAQIGDQYADLFLAAKNLSDAILLSDILRVNTEITKAPLSASMIKRYDEHHQDLTLLKALVRQQLPEKYKEIFFDQSKNGYAGYIDGGASQEEFYKFIKPILEKMDGTEELLVKLNREDLLRKQRTFDNGSIPHQIHLGELHAILRRQEDFYPFLKDNREKIEKILTFRIPYYVGPLARGNSRFAWMTRKSEETITPWNFEEVVDKGASAQSFIERMTNFDKNLPNEKVLPKHSLLYEYFTVYNELTKVKYVTEGMRKPAFLSGEQKKAIVDLLFKTNRKVTVKQLKEDYFKKIECFDSVEISGVEDRFNASLGTYHDLLKIIKDKDFLDNEENEDILEDIVLTLTLFEDREMIEERLKTYAHLFDDKVMKQLKRRRYTGWGRLSRKLINGIRDKQSGKTILDFLKSDGFANRNFMQLIHDDSLTFKEDIQKAQVSGQGDSLHEHIANLAGSPAIKKGILQTVKVVDELVKVMGRHKPENIVIEMARENQTTQKGQKNSRERMKRIEEGIKELGSQILKEHPVENTQLQNEKLYLYYLQNGRDMYVDQELDINRLSDYDVDHIVPQSFLKDDSIDNKVLTRSDKARGKSDNVPSEEVVKKMKNYWRQLLNAKLITQRKFDNLTKAERGGLSELDKAGFIKRQLVETRQITKHVAQILDSRMNTKYDENDKLIREVKVITLKSKLVSDFRKDFQFYKVREINNYHHAHDAYLNAVVGTALIKKYPKLESEFVYGDYKVYDVRKMIAKSEQEIGKATAKYFFYSNIMNFFKTEITLANGEIRKRPLIETNGETGEIVWDKGRDFATVRKVLSMPQVNIVKKTEVQTGGFSKESILPKRNSDKLIARKKDWDPKKYGGFDSPTVAYSVLVVAKVEKGKSKKLKSVKELLGITIMERSSFEKNPIDFLEAKGYKEVKKDLIIKLPKYSLFELENGRKRMLASAGELQKGNELALPSKYVNFLYLASHYEKLKGSPEDNEQKQLFVEQHKHYLDEIIEQISEFSKRVILADANLDKVLSAYNKHRDKPIREQAENIIHLFTLTNLGAPAAFKYFDTTIDRKRYTSTKEVLDATLIHQSITGLYETRIDLSQLGGDGGPAPGGSEAAAKGGTLQLEEEYRLFEPESTQKQEMDIWLKNFPQAWAETGGMGTAHCQAPVLIQLKATATPISIRQYPMPHEAYQGIKPHIRRMLDQGILKPCQSPWNTPLLPVKKPGTEDYRPVQDLREVNKRVEDIHPTVPNPYNLLSTLPPSHPWYTVLDLKDAFFCLRLHSESQLLFAFEWRDPEIGLSGQLTWTRLPQGFKNSPTLFNEALHSDLADFRVRYPALVLLQYVDDLLLAAATRTECLEGTKALLETLGNKGYRASAKKAQICLQEVTYLGYSLKDGQRWLTKARKEAILSIPVPKNSRQVREFLGKAGYCRLFIPGFAELAAPLYPLTRPGTLFQWGTEQQLAFEDIKKALLSSPALGLPDITKPFELFIDENSGFAKGVLVQKLGPWKRPVAYLSKKLDTVASGWPPCLRMVAAIAILVKDAGKLTLGQPLTILTSHPVEALVRQPPNKWLSNARMTHYQAMLLDAERVHFGPTVSLNPATLLPLPSGGNHHDCLQILAETHGTRPDLTDQPLPDADLTWYTDGSSFIRNGEREAGAAVTTESEVIWAAPLPPGTSAQRAELIALTQALKMAEGKKLTVYTDSRYAFATTHVHGEIYRRRGWLTSEGKEIKNKNEILALLEALFLPKRLSIIHCPGHQKGDSPQAKGNRLADDTAKKAATETHSSLTVLPAGKRTADGSEFEKRTADGSEFESPKKKAKVE

SEQ ID NO: 1240 - protein, 2093 aa, synthetic construct
MPAAKRVKLDGGDKKYSIGLDIGTNSVGWAVITDEYKVPSKKFKVLGNTDRHSIKKNLIGALLFDSGETAEATRLKRTARRRYTRRKNRICYLQEIFSNEMAKVDDSFFHRLEESFLVEEDKKHERHPIFGNIVDEVAYHEKYPTIYHLRKKLVDSTDKADLRLIYLALAHMIKFRGHFLIEGDLNPDNSDVDKLFIQLVQTYNQLFEENPINASGVDAKAILSARLSKSRRLENLIAQLPGEKKNGLFGNLIALSLGLTPNFKSNFDLAEDAKLQLSKDTYDDDLDNLLAQIGDQYADLFLAAKNLSDAILLSDILRVNTEITKAPLSASMIKRYDEHHQDLTLLKALVRQQLPEKYKEIFFDQSKNGYAGYIDGGASQEEFYKFIKPILEKMDGTEELLVKLNREDLLRKQRTFDNGSIPHQIHLGELHAILRRQEDFYPFLKDNREKIEKILTFRIPYYVGPLARGNSRFAWMTRKSEETITPWNFEEVVDKGASAQSFIERMTNFDKNLPNEKVLPKHSLLYEYFTVYNELTKVKYVTEGMRKPAFLSGEQKKAIVDLLFKTNRKVTVKQLKEDYFKKIECFDSVEISGVEDRFNASLGTYHDLLKIIKDKDFLDNEENEDILEDIVLTLTLFEDREMIEERLKTYAHLFDDKVMKQLKRRRYTGWGRLSRKLINGIRDKQSGKTILDFLKSDGFANRNFMQLIHDDSLTFKEDIQKAQVSGQGDSLHEHIANLAGSPAIKKGILQTVKVVDELVKVMGRHKPENIVIEMARENQTTQKGQKNSRERMKRIEEGIKELGSQILKEHPVENTQLQNEKLYLYYLQNGRDMYVDQELDINRLSDYDVDHIVPQSFLKDDSIDNKVLTRSDKARGKSDNVPSEEVVKKMKNYWRQLLNAKLITQRKFDNLTKAERGGLSELDKAGFIKRQLVETRQITKHVAQILDSRMNTKYDENDKLIREVKVITLKSKLVSDFRKDFQFYKVREINNYHHAHDAYLNAVVGTALIKKYPKLESEFVYGDYKVYDVRKMIAKSEQEIGKATAKYFFYSNIMNFFKTEITLANGEIRKRPLIETNGETGEIVWDKGRDFATVRKVLSMPQVNIVKKTEVQTGGFSKESILPKRNSDKLIARKKDWDPKKYGGFDSPTVAYSVLVVAKVEKGKSKKLKSVKELLGITIMERSSFEKNPIDFLEAKGYKEVKKDLIIKLPKYSLFELENGRKRMLASAGELQKGNELALPSKYVNFLYLASHYEKLKGSPEDNEQKQLFVEQHKHYLDEIIEQISEFSKRVILADANLDKVLSAYNKHRDKPIREQAENIIHLFTLTNLGAPAAFKYFDTTIDRKRYTSTKEVLDATLIHQSITGLYETRIDLSQLGGDGGGSSGGGPAPGGTLQLEEEYRLFEPESTQKQEMDIWLKNFPQAWAETGGMGTAHCQAPVLIQLKATATPISIRQYPMPHEAYQGIKPHIRRMLDQGILKPCQSPWNTPLLPVKKPGTEDYRPVQDLREVNKRVEDIHPTVPNPYNLLSTLPPSHPWYTVLDLKDAFFCLRLHSESQLLFAFEWRDPEIGLSGQLTWTRLPQGFKNSPTLFNEALHSDLADFRVRYPALVLLQYVDDLLLAAATRTECLEGTKALLETLGNKGYRASAKKAQICLQEVTYLGYSLKDGQRWLTKARKEAILSIPVPKNSRQVREFLGKAGYCRLFIPGFAELAAPLYPLTRPGTLFQWGTEQQLAFEDIKKALLSSPALGLPDITKPFELFIDENSGFAKGVLVQKLGPWKRPVAYLSKKLDTVASGWPPCLRMVAAIAILVKDAGKLTLGQPLTILTSHPVEALVRQPPNKWLSNARMTHYQAMLLDAERVHFGPTVSLNPATLLPLPSGGNHHDCLQILAETHGTRPDLTDQPLPDADLTWYTDGSSFIRNGEREAGAAVTTESEVIWAAPLPPGTSAQRAELIALTQALKMAEGKKLTVYTDSRYAFATTHVHGEIYRRRGWLTSEGKEIKNKNEILALLEALFLPKRLSIIHCPGHQKGDSPQAKGNRLADDTAKKAATETHSSLTVLPAGKRTADGSEFEKRTADGSEFESPKKKAKVE

SEQ ID NO: 1241 - protein, 2095 aa, synthetic construct
MPAAKRVKLDGGDKKYSIGLDIGTNSVGWAVITDEYKVPSKKFKVLGNTDRHSIKKNLIGALLFDSGETAEATRLKRTARRRYTRRKNRICYLQEIFSNEMAKVDDSFFHRLEESFLVEEDKKHERHPIFGNIVDEVAYHEKYPTIYHLRKKLVDSTDKADLRLIYLALAHMIKFRGHFLIEGDLNPDNSDVDKLFIQLVQTYNQLFEENPINASGVDAKAILSARLSKSRRLENLIAQLPGEKKNGLFGNLIALSLGLTPNFKSNFDLAEDAKLQLSKDTYDDDLDNLLAQIGDQYADLFLAAKNLSDAILLSDILRVNTEITKAPLSASMIKRYDEHHQDLTLLKALVRQQLPEKYKEIFFDQSKNGYAGYIDGGASQEEFYKFIKPILEKMDGTEELLVKLNREDLLRKQRTFDNGSIPHQIHLGELHAILRRQEDFYPFLKDNREKIEKILTFRIPYYVGPLARGNSRFAWMTRKSEETITPWNFEEVVDKGASAQSFIERMTNFDKNLPNEKVLPKHSLLYEYFTVYNELTKVKYVTEGMRKPAFLSGEQKKAIVDLLFKTNRKVTVKQLKEDYFKKIECFDSVEISGVEDRFNASLGTYHDLLKIIKDKDFLDNEENEDILEDIVLTLTLFEDREMIEERLKTYAHLFDDKVMKQLKRRRYTGWGRLSRKLINGIRDKQSGKTILDFLKSDGFANRNFMQLIHDDSLTFKEDIQKAQVSGQGDSLHEHIANLAGSPAIKKGILQTVKVVDELVKVMGRHKPENIVIEMARENQTTQKGQKNSRERMKRIEEGIKELGSQILKEHPVENTQLQNEKLYLYYLQNGRDMYVDQELDINRLSDYDVDHIVPQSFLKDDSIDNKVLTRSDKARGKSDNVPSEEVVKKMKNYWRQLLNAKLITQRKFDNLTKAERGGLSELDKAGFIKRQLVETRQITKHVAQILDSRMNTKYDENDKLIREVKVITLKSKLVSDFRKDFQFYKVREINNYHHAHDAYLNAVVGTALIKKYPKLESEFVYGDYKVYDVRKMIAKSEQEIGKATAKYFFYSNIMNFFKTEITLANGEIRKRPLIETNGETGEIVWDKGRDFATVRKVLSMPQVNIVKKTEVQTGGFSKESILPKRNSDKLIARKKDWDPKKYGGFDSPTVAYSVLVVAKVEKGKSKKLKSVKELLGITIMERSSFEKNPIDFLEAKGYKEVKKDLIIKLPKYSLFELENGRKRMLASAGELQKGNELALPSKYVNFLYLASHYEKLKGSPEDNEQKQLFVEQHKHYLDEIIEQISEFSKRVILADANLDKVLSAYNKHRDKPIREQAENIIHLFTLTNLGAPAAFKYFDTTIDRKRYTSTKEVLDATLIHQSITGLYETRIDLSQLGGDGGEAAAKGGSGSSGGTLQLEEEYRLFEPESTQKQEMDIWLKNFPQAWAETGGMGTAHCQAPVLIQLKATATPISIRQYPMPHEAYQGIKPHIRRMLDQGILKPCQSPWNTPLLPVKKPGTEDYRPVQDLREVNKRVEDIHPTVPNPYNLLSTLPPSHPWYTVLDLKDAFFCLRLHSESQLLFAFEWRDPEIGLSGQLTWTRLPQGFKNSPTLFNEALHSDLADFRVRYPALVLLQYVDDLLLAAATRTECLEGTKALLETLGNKGYRASAKKAQICLQEVTYLGYSLKDGQRWLTKARKEAILSIPVPKNSRQVREFLGKAGYCRLFIPGFAELAAPLYPLTRPGTLFQWGTEQQLAFEDIKKALLSSPALGLPDITKPFELFIDENSGFAKGVLVQKLGPWKRPVAYLSKKLDTVASGWPPCLRMVAAIAILVKDAGKLTLGQPLTILTSHPVEALVRQPPNKWLSNARMTHYQAMLLDAERVHFGPTVSLNPATLLPLPSGGNHHDCLQILAETHGTRPDLTDQPLPDADLTWYTDGSSFIRNGEREAGAAVTTESEVIWAAPLPPGTSAQRAELIALTQALKMAEGKKLTVYTDSRYAFATTHVHGEIYRRRGWLTSEGKEIKNKNEILALLEALFLPKRLSIIHCPGHQKGDSPQAKGNRLADDTAKKAATETHSSLTVLPAGKRTADGSEFEKRTADGSEFESPKKKAKVE

SEQ ID NO: 1242 - protein, 2095 aa, synthetic construct
MPAAKRVKLDGGDKKYSIGLDIGTNSVGWAVITDEYKVPSKKFKVLGNTDRHSIKKNLIGALLFDSGETAEATRLKRTARRRYTRRKNRICYLQEIFSNEMAKVDDSFFHRLEESFLVEEDKKHERHPIFGNIVDEVAYHEKYPTIYHLRKKLVDSTDKADLRLIYLALAHMIKFRGHFLIEGDLNPDNSDVDKLFIQLVQTYNQLFEENPINASGVDAKAILSARLSKSRRLENLIAQLPGEKKNGLFGNLIALSLGLTPNFKSNFDLAEDAKLQLSKDTYDDDLDNLLAQIGDQYADLFLAAKNLSDAILLSDILRVNTEITKAPLSASMIKRYDEHHQDLTLLKALVRQQLPEKYKEIFFDQSKNGYAGYIDGGASQEEFYKFIKPILEKMDGTEELLVKLNREDLLRKQRTFDNGSIPHQIHLGELHAILRRQEDFYPFLKDNREKIEKILTFRIPYYVGPLARGNSRFAWMTRKSEETITPWNFEEVVDKGASAQSFIERMTNFDKNLPNEKVLPKHSLLYEYFTVYNELTKVKYVTEGMRKPAFLSGEQKKAIVDLLFKTNRKVTVKQLKEDYFKKIECFDSVEISGVEDRFNASLGTYHDLLKIIKDKDFLDNEENEDILEDIVLTLTLFEDREMIEERLKTYAHLFDDKVMKQLKRRRYTGWGRLSRKLINGIRDKQSGKTILDFLKSDGFANRNFMQLIHDDSLTFKEDIQKAQVSGQGDSLHEHIANLAGSPAIKKGILQTVKVVDELVKVMGRHKPENIVIEMARENQTTQKGQKNSRERMKRIEEGIKELGSQILKEHPVENTQLQNEKLYLYYLQNGRDMYVDQELDINRLSDYDVDHIVPQSFLKDDSIDNKVLTRSDKARGKSDNVPSEEVVKKMKNYWRQLLNAKLITQRKFDNLTKAERGGLSELDKAGFIKRQLVETRQITKHVAQILDSRMNTKYDENDKLIREVKVITLKSKLVSDFRKDFQFYKVREINNYHHAHDAYLNAVVGTALIKKYPKLESEFVYGDYKVYDVRKMIAKSEQEIGKATAKYFFYSNIMNFFKTEITLANGEIRKRPLIETNGETGEIVWDKGRDFATVRKVLSMPQVNIVKKTEVQTGGFSKESILPKRNSDKLIARKKDWDPKKYGGFDSPTVAYSVLVVAKVEKGKSKKLKSVKELLGITIMERSSFEKNPIDFLEAKGYKEVKKDLIIKLPKYSLFELENGRKRMLASAGELQKGNELALPSKYVNFLYLASHYEKLKGSPEDNEQKQLFVEQHKHYLDEIIEQISEFSKRVILADANLDKVLSAYNKHRDKPIREQAENIIHLFTLTNLGAPAAFKYFDTTIDRKRYTSTKEVLDATLIHQSITGLYETRIDLSQLGGDGGGSSGGSEAAAKGGTLQLEEEYRLFEPESTQKQEMDIWLKNFPQAWAETGGMGTAHCQAPVLIQLKATATPISIRQYPMPHEAYQGIKPHIRRMLDQGILKPCQSPWNTPLLPVKKPGTEDYRPVQDLREVNKRVEDIHPTVPNPYNLLSTLPPSHPWYTVLDLKDAFFCLRLHSESQLLFAFEWRDPEIGLSGQLTWTRLPQGFKNSPTLFNEALHSDLADFRVRYPALVLLQYVDDLLLAAATRTECLEGTKALLETLGNKGYRASAKKAQICLQEVTYLGYSLKDGQRWLTKARKEAILSIPVPKNSRQVREFLGKAGYCRLFIPGFAELAAPLYPLTRPGTLFQWGTEQQLAFEDIKKALLSSPALGLPDITKPFELFIDENSGFAKGVLVQKLGPWKRPVAYLSKKLDTVASGWPPCLRMVAAIAILVKDAGKLTLGQPLTILTSHPVEALVRQPPNKWLSNARMTHYQAMLLDAERVHFGPTVSLNPATLLPLPSGGNHHDCLQILAETHGTRPDLTDQPLPDADLTWYTDGSSFIRNGEREAGAAVTTESEVIWAAPLPPGTSAQRAELIALTQALKMAEGKKLTVYTDSRYAFATTHVHGEIYRRRGWLTSEGKEIKNKNEILALLEALFLPKRLSIIHCPGHQKGDSPQAKGNRLADDTAKKAATETHSSLTVLPAGKRTADGSEFEKRTADGSEFESPKKKAKVE

SEQ ID NO: 1243 - protein, 2099 aa, synthetic construct
MPAAKRVKLDGGDKKYSIGLDIGTNSVGWAVITDEYKVPSKKFKVLGNTDRHSIKKNLIGALLFDSGETAEATRLKRTARRRYTRRKNRICYLQEIFSNEMAKVDDSFFHRLEESFLVEEDKKHERHPIFGNIVDEVAYHEKYPTIYHLRKKLVDSTDKADLRLIYLALAHMIKFRGHFLIEGDLNPDNSDVDKLFIQLVQTYNQLFEENPINASGVDAKAILSARLSKSRRLENLIAQLPGEKKNGLFGNLIALSLGLTPNFKSNFDLAEDAKLQLSKDTYDDDLDNLLAQIGDQYADLFLAAKNLSDAILLSDILRVNTEITKAPLSASMIKRYDEHHQDLTLLKALVRQQLPEKYKEIFFDQSKNGYAGYIDGGASQEEFYKFIKPILEKMDGTEELLVKLNREDLLRKQRTFDNGSIPHQIHLGELHAILRRQEDFYPFLKDNREKIEKILTFRIPYYVGPLARGNSRFAWMTRKSEETITPWNFEEVVDKGASAQSFIERMTNFDKNLPNEKVLPKHSLLYEYFTVYNELTKVKYVTEGMRKPAFLSGEQKKAIVDLLFKTNRKVTVKQLKEDYFKKIECFDSVEISGVEDRFNASLGTYHDLLKIIKDKDFLDNEENEDILEDIVLTLTLFEDREMIEERLKTYAHLFDDKVMKQLKRRRYTGWGRLSRKLINGIRDKQSGKTILDFLKSDGFANRNFMQLIHDDSLTFKEDIQKAQVSGQGDSLHEHIANLAGSPAIKKGILQTVKVVDELVKVMGRHKPENIVIEMARENQTTQKGQKNSRERMKRIEEGIKELGSQILKEHPVENTQLQNEKLYLYYLQNGRDMYVDQELDINRLSDYDVDHIVPQSFLKDDSIDNKVLTRSDKARGKSDNVPSEEVVKKMKNYWRQLLNAKLITQRKFDNLTKAERGGLSELDKAGFIKRQLVETRQITKHVAQILDSRMNTKYDENDKLIREVKVITLKSKLVSDFRKDFQFYKVREINNYHHAHDAYLNAVVGTALIKKYPKLESEFVYGDYKVYDVRKMIAKSEQEIGKATAKYFFYSNIMNFFKTEITLANGEIRKRPLIETNGETGEIVWDKGRDFATVRKVLSMPQVNIVKKTEVQTGGFSKESILPKRNSDKLIARKKDWDPKKYGGFDSPTVAYSVLVVAKVEKGKSKKLKSVKELLGITIMERSSFEKNPIDFLEAKGYKEVKKDLIIKLPKYSLFELENGRKRMLASAGELQKGNELALPSKYVNFLYLASHYEKLKGSPEDNEQKQLFVEQHKHYLDEIIEQISEFSKRVILADANLDKVLSAYNKHRDKPIREQAENIIHLFTLTNLGAPAAFKYFDTTIDRKRYTSTKEVLDATLIHQSITGLYETRIDLSQLGGDGGEAAAKGGGGSEAAAKGGTLQLEEEYRLFEPESTQKQEMDIWLKNFPQAWAETGGMGTAHCQAPVLIQLKATATPISIRQYPMPHEAYQGIKPHIRRMLDQGILKPCQSPWNTPLLPVKKPGTEDYRPVQDLREVNKRVEDIHPTVPNPYNLLSTLPPSHPWYTVLDLKDAFFCLRLHSESQLLFAFEWRDPEIGLSGQLTWTRLPQGFKNSPTLFNEALHSDLADFRVRYPALVLLQYVDDLLLAAATRTECLEGTKALLETLGNKGYRASAKKAQICLQEVTYLGYSLKDGQRWLTKARKEAILSIPVPKNSRQVREFLGKAGYCRLFIPGFAELAAPLYPLTRPGTLFQWGTEQQLAFEDIKKALLSSPALGLPDITKPFELFIDENSGFAKGVLVQKLGPWKRPVAYLSKKLDTVASGWPPCLRMVAAIAILVKDAGKLTLGQPLTILTSHPVEALVRQPPNKWLSNARMTHYQAMLLDAERVHFGPTVSLNPATLLPLPSGGNHHDCLQILAETHGTRPDLTDQPLPDADLTWYTDGSSFIRNGEREAGAAVTTESEVIWAAPLPPGTSAQRAELIALTQALKMAEGKKLTVYTDSRYAFATTHVHGEIYRRRGWLTSEGKEIKNKNEILALLEALFLPKRLSIIHCPGHQKGDSPQAKGNRLADDTAKKAATETHSSLTVLPAGKRTADGSEFEKRTADGSEFESPKKKAKVE

SEQ ID NO: 1244 - protein, 2093 aa, synthetic construct
MPAAKRVKLDGGDKKYSIGLDIGTNSVGWAVITDEYKVPSKKFKVLGNTDRHSIKKNLIGALLFDSGETAEATRLKRTARRRYTRRKNRICYLQEIFSNEMAKVDDSFFHRLEESFLVEEDKKHERHPIFGNIVDEVAYHEKYPTIYHLRKKLVDSTDKADLRLIYLALAHMIKFRGHFLIEGDLNPDNSDVDKLFIQLVQTYNQLFEENPINASGVDAKAILSARLSKSRRLENLIAQLPGEKKNGLFGNLIALSLGLTPNFKSNFDLAEDAKLQLSKDTYDDDLDNLLAQIGDQYADLFLAAKNLSDAILLSDILRVNTEITKAPLSASMIKRYDEHHQDLTLLKALVRQQLPEKYKEIFFDQSKNGYAGYIDGGASQEEFYKFIKPILEKMDGTEELLVKLNREDLLRKQRTFDNGSIPHQIHLGELHAILRRQEDFYPFLKDNREKIEKILTFRIPYYVGPLARGNSRFAWMTRKSEETITPWNFEEVVDKGASAQSFIERMTNFDKNLPNEKVLPKHSLLYEYFTVYNELTKVKYVTEGMRKPAFLSGEQKKAIVDLLFKTNRKVTVKQLKEDYFKKIECFDSVEISGVEDRFNASLGTYHDLLKIIKDKDFLDNEENEDILEDIVLTLTLFEDREMIEERLKTYAHLFDDKVMKQLKRRRYTGWGRLSRKLINGIRDKQSGKTILDFLKSDGFANRNFMQLIHDDSLTFKEDIQKAQVSGQGDSLHEHIANLAGSPAIKKGILQTVKVVDELVKVMGRHKPENIVIEMARENQTTQKGQKNSRERMKRIEEGIKELGSQILKEHPVENTQLQNEKLYLYYLQNGRDMYVDQELDINRLSDYDVDHIVPQSFLKDDSIDNKVLTRSDKARGKSDNVPSEEVVKKMKNYWRQLLNAKLITQRKFDNLTKAERGGLSELDKAGFIKRQLVETRQITKHVAQILDSRMNTKYDENDKLIREVKVITLKSKLVSDFRKDFQFYKVREINNYHHAHDAYLNAVVGTALIKKYPKLESEFVYGDYKVYDVRKMIAKSEQEIGKATAKYFFYSNIMNFFKTEITLANGEIRKRPLIETNGETGEIVWDKGRDFATVRKVLSMPQVNIVKKTEVQTGGFSKESILPKRNSDKLIARKKDWDPKKYGGFDSPTVAYSVLVVAKVEKGKSKKLKSVKELLGITIMERSSFEKNPIDFLEAKGYKEVKKDLIIKLPKYSLFELENGRKRMLASAGELQKGNELALPSKYVNFLYLASHYEKLKGSPEDNEQKQLFVEQHKHYLDEIIEQISEFSKRVILADANLDKVLSAYNKHRDKPIREQAENIIHLFTLTNLGAPAAFKYFDTTIDRKRYTSTKEVLDATLIHQSITGLYETRIDLSQLGGDGGGGSGSSPAPGGTLQLEEEYRLFEPESTQKQEMDIWLKNFPQAWAETGGMGTAHCQAPVLIQLKATATPISIRQYPMPHEAYQGIKPHIRRMLDQGILKPCQSPWNTPLLPVKKPGTEDYRPVQDLREVNKRVEDIHPTVPNPYNLLSTLPPSHPWYTVLDLKDAFFCLRLHSESQLLFAFEWRDPEIGLSGQLTWTRLPQGFKNSPTLFNEALHSDLADFRVRYPALVLLQYVDDLLLAAATRTECLEGTKALLETLGNKGYRASAKKAQICLQEVTYLGYSLKDGQRWLTKARKEAILSIPVPKNSRQVREFLGKAGYCRLFIPGFAELAAPLYPLTRPGTLFQWGTEQQLAFEDIKKALLSSPALGLPDITKPFELFIDENSGFAKGVLVQKLGPWKRPVAYLSKKLDTVASGWPPCLRMVAAIAILVKDAGKLTLGQPLTILTSHPVEALVRQPPNKWLSNARMTHYQAMLLDAERVHFGPTVSLNPATLLPLPSGGNHHDCLQILAETHGTRPDLTDQPLPDADLTWYTDGSSFIRNGEREAGAAVTTESEVIWAAPLPPGTSAQRAELIALTQALKMAEGKKLTVYTDSRYAFATTHVHGEIYRRRGWLTSEGKEIKNKNEILALLEALFLPKRLSIIHCPGHQKGDSPQAKGNRLADDTAKKAATETHSSLTVLPAGKRTADGSEFEKRTADGSEFESPKKKAKVE

SEQ ID NO: 1245 - protein, 2090 aa, synthetic construct
MPAAKRVKLDGGDKKYSIGLDIGTNSVGWAVITDEYKVPSKKFKVLGNTDRHSIKKNLIGALLFDSGETAEATRLKRTARRRYTRRKNRICYLQEIFSNEMAKVDDSFFHRLEESFLVEEDKKHERHPIFGNIVDEVAYHEKYPTIYHLRKKLVDSTDKADLRLIYLALAHMIKFRGHFLIEGDLNPDNSDVDKLFIQLVQTYNQLFEENPINASGVDAKAILSARLSKSRRLENLIAQLPGEKKNGLFGNLIALSLGLTPNFKSNFDLAEDAKLQLSKDTYDDDLDNLLAQIGDQYADLFLAAKNLSDAILLSDILRVNTEITKAPLSASMIKRYDEHHQDLTLLKALVRQQLPEKYKEIFFDQSKNGYAGYIDGGASQEEFYKFIKPILEKMDGTEELLVKLNREDLLRKQRTFDNGSIPHQIHLGELHAILRRQEDFYPFLKDNREKIEKILTFRIPYYVGPLARGNSRFAWMTRKSEETITPWNFEEVVDKGASAQSFIERMTNFDKNLPNEKVLPKHSLLYEYFTVYNELTKVKYVTEGMRKPAFLSGEQKKAIVDLLFKTNRKVTVKQLKEDYFKKIECFDSVEISGVEDRFNASLGTYHDLLKIIKDKDFLDNEENEDILEDIVLTLTLFEDREMIEERLKTYAHLFDDKVMKQLKRRRYTGWGRLSRKLINGIRDKQSGKTILDFLKSDGFANRNFMQLIHDDSLTFKEDIQKAQVSGQGDSLHEHIANLAGSPAIKKGILQTVKVVDELVKVMGRHKPENIVIEMARENQTTQKGQKNSRERMKRIEEGIKELGSQILKEHPVENTQLQNEKLYLYYLQNGRDMYVDQELDINRLSDYDVDHIVPQSFLKDDSIDNKVLTRSDKARGKSDNVPSEEVVKKMKNYWRQLLNAKLITQRKFDNLTKAERGGLSELDKAGFIKRQLVETRQITKHVAQILDSRMNTKYDENDKLIREVKVITLKSKLVSDFRKDFQFYKVREINNYHHAHDAYLNAVVGTALIKKYPKLESEFVYGDYKVYDVRKMIAKSEQEIGKATAKYFFYSNIMNFFKTEITLANGEIRKRPLIETNGETGEIVWDKGRDFATVRKVLSMPQVNIVKKTEVQTGGFSKESILPKRNSDKLIARKKDWDPKKYGGFDSPTVAYSVLVVAKVEKGKSKKLKSVKELLGITIMERSSFEKNPIDFLEAKGYKEVKKDLIIKLPKYSLFELENGRKRMLASAGELQKGNELALPSKYVNFLYLASHYEKLKGSPEDNEQKQLFVEQHKHYLDEIIEQISEFSKRVILADANLDKVLSAYNKHRDKPIREQAENIIHLFTLTNLGAPAAFKYFDTTIDRKRYTSTKEVLDATLIHQSITGLYETRIDLSQLGGDGGGSSPAPGGTLQLEEEYRLFEPESTQKQEMDIWLKNFPQAWAETGGMGTAHCQAPVLIQLKATATPISIRQYPMPHEAYQGIKPHIRRMLDQGILKPCQSPWNTPLLPVKKPGTEDYRPVQDLREVNKRVEDIHPTVPNPYNLLSTLPPSHPWYTVLDLKDAFFCLRLHSESQLLFAFEWRDPEIGLSGQLTWTRLPQGFKNSPTLFNEALHSDLADFRVRYPALVLLQYVDDLLLAAATRTECLEGTKALLETLGNKGYRASAKKAQICLQEVTYLGYSLKDGQRWLTKARKEAILSIPVPKNSRQVREFLGKAGYCRLFIPGFAELAAPLYPLTRPGTLFQWGTEQQLAFEDIKKALLSSPALGLPDITKPFELFIDENSGFAKGVLVQKLGPWKRPVAYLSKKLDTVASGWPPCLRMVAAIAILVKDAGKLTLGQPLTILTSHPVEALVRQPPNKWLSNARMTHYQAMLLDAERVHFGPTVSLNPATLLPLPSGGNHHDCLQILAETHGTRPDLTDQPLPDADLTWYTDGSSFIRNGEREAGAAVTTESEVIWAAPLPPGTSAQRAELIALTQALKMAEGKKLTVYTDSRYAFATTHVHGEIYRRRGWLTSEGKEIKNKNEILALLEALFLPKRLSIIHCPGHQKGDSPQAKGNRLADDTAKKAATETHSSLTVLPAGKRTADGSEFEKRTADGSEFESPKKKAKVE

SEQ ID NO: 1246 - protein, 2089 aa, synthetic construct
MPAAKRVKLDGGDKKYSIGLDIGTNSVGWAVITDEYKVPSKKFKVLGNTDRHSIKKNLIGALLFDSGETAEATRLKRTARRRYTRRKNRICYLQEIFSNEMAKVDDSFFHRLEESFLVEEDKKHERHPIFGNIVDEVAYHEKYPTIYHLRKKLVDSTDKADLRLIYLALAHMIKFRGHFLIEGDLNPDNSDVDKLFIQLVQTYNQLFEENPINASGVDAKAILSARLSKSRRLENLIAQLPGEKKNGLFGNLIALSLGLTPNFKSNFDLAEDAKLQLSKDTYDDDLDNLLAQIGDQYADLFLAAKNLSDAILLSDILRVNTEITKAPLSASMIKRYDEHHQDLTLLKALVRQQLPEKYKEIFFDQSKNGYAGYIDGGASQEEFYKFIKPILEKMDGTEELLVKLNREDLLRKQRTFDNGSIPHQIHLGELHAILRRQEDFYPFLKDNREKIEKILTFRIPYYVGPLARGNSRFAWMTRKSEETITPWNFEEVVDKGASAQSFIERMTNFDKNLPNEKVLPKHSLLYEYFTVYNELTKVKYVTEGMRKPAFLSGEQKKAIVDLLFKTNRKVTVKQLKEDYFKKIECFDSVEISGVEDRFNASLGTYHDLLKIIKDKDFLDNEENEDILEDIVLTLTLFEDREMIEERLKTYAHLFDDKVMKQLKRRRYTGWGRLSRKLINGIRDKQSGKTILDFLKSDGFANRNFMQLIHDDSLTFKEDIQKAQVSGQGDSLHEHIANLAGSPAIKKGILQTVKVVDELVKVMGRHKPENIVIEMARENQTTQKGQKNSRERMKRIEEGIKELGSQILKEHPVENTQLQNEKLYLYYLQNGRDMYVDQELDINRLSDYDVDHIVPQSFLKDDSIDNKVLTRSDKARGKSDNVPSEEVVKKMKNYWRQLLNAKLITQRKFDNLTKAERGGLSELDKAGFIKRQLVETRQITKHVAQILDSRMNTKYDENDKLIREVKVITLKSKLVSDFRKDFQFYKVREINNYHHAHDAYLNAVVGTALIKKYPKLESEFVYGDYKVYDVRKMIAKSEQEIGKATAKYFFYSNIMNFFKTEITLANGEIRKRPLIETNGETGEIVWDKGRDFATVRKVLSMPQVNIVKKTEVQTGGFSKESILPKRNSDKLIARKKDWDPKKYGGFDSPTVAYSVLVVAKVEKGKSKKLKSVKELLGITIMERSSFEKNPIDFLEAKGYKEVKKDLIIKLPKYSLFELENGRKRMLASAGELQKGNELALPSKYVNFLYLASHYEKLKGSPEDNEQKQLFVEQHKHYLDEIIEQISEFSKRVILADANLDKVLSAYNKHRDKPIREQAENIIHLFTLTNLGAPAAFKYFDTTIDRKRYTSTKEVLDATLIHQSITGLYETRIDLSQLGGDGGPAPAPGGTLQLEEEYRLFEPESTQKQEMDIWLKNFPQAWAETGGMGTAHCQAPVLIQLKATATPISIRQYPMPHEAYQGIKPHIRRMLDQGILKPCQSPWNTPLLPVKKPGTEDYRPVQDLREVNKRVEDIHPTVPNPYNLLSTLPPSHPWYTVLDLKDAFFCLRLHSESQLLFAFEWRDPEIGLSGQLTWTRLPQGFKNSPTLFNEALHSDLADFRVRYPALVLLQYVDDLLLAAATRTECLEGTKALLETLGNKGYRASAKKAQICLQEVTYLGYSLKDGQRWLTKARKEAILSIPVPKNSRQVREFLGKAGYCRLFIPGFAELAAPLYPLTRPGTLFQWGTEQQLAFEDIKKALLSSPALGLPDITKPFELFIDENSGFAKGVLVQKLGPWKRPVAYLSKKLDTVASGWPPCLRMVAAIAILVKDAGKLTLGQPLTILTSHPVEALVRQPPNKWLSNARMTHYQAMLLDAERVHFGPTVSLNPATLLPLPSGGNHHDCLQILAETHGTRPDLTDQPLPDADLTWYTDGSSFIRNGEREAGAAVTTESEVIWAAPLPPGTSAQRAELIALTQALKMAEGKKLTVYTDSRYAFATTHVHGEIYRRRGWLTSEGKEIKNKNEILALLEALFLPKRLSIIHCPGHQKGDSPQAKGNRLADDTAKKAATETHSSLTVLPAGKRTADGSEFEKRTADGSEFESPKKKAKVE

SEQ ID NO: 1247 - protein, 2093 aa, synthetic construct
MPAAKRVKLDGGDKKYSIGLDIGTNSVGWAVITDEYKVPSKKFKVLGNTDRHSIKKNLIGALLFDSGETAEATRLKRTARRRYTRRKNRICYLQEIFSNEMAKVDDSFFHRLEESFLVEEDKKHERHPIFGNIVDEVAYHEKYPTIYHLRKKLVDSTDKADLRLIYLALAHMIKFRGHFLIEGDLNPDNSDVDKLFIQLVQTYNQLFEENPINASGVDAKAILSARLSKSRRLENLIAQLPGEKKNGLFGNLIALSLGLTPNFKSNFDLAEDAKLQLSKDTYDDDLDNLLAQIGDQYADLFLAAKNLSDAILLSDILRVNTEITKAPLSASMIKRYDEHHQDLTLLKALVRQQLPEKYKEIFFDQSKNGYAGYIDGGASQEEFYKFIKPILEKMDGTEELLVKLNREDLLRKQRTFDNGSIPHQIHLGELHAILRRQEDFYPFLKDNREKIEKILTFRIPYYVGPLARGNSRFAWMTRKSEETITPWNFEEVVDKGASAQSFIERMTNFDKNLPNEKVLPKHSLLYEYFTVYNELTKVKYVTEGMRKPAFLSGEQKKAIVDLLFKTNRKVTVKQLKEDYFKKIECFDSVEISGVEDRFNASLGTYHDLLKIIKDKDFLDNEENEDILEDIVLTLTLFEDREMIEERLKTYAHLFDDKVMKQLKRRRYTGWGRLSRKLINGIRDKQSGKTILDFLKSDGFANRNFMQLIHDDSLTFKEDIQKAQVSGQGDSLHEHIANLAGSPAIKKGILQTVKVVDELVKVMGRHKPENIVIEMARENQTTQKGQKNSRERMKRIEEGIKELGSQILKEHPVENTQLQNEKLYLYYLQNGRDMYVDQELDINRLSDYDVDHIVPQSFLKDDSIDNKVLTRSDKARGKSDNVPSEEVVKKMKNYWRQLLNAKLITQRKFDNLTKAERGGLSELDKAGFIKRQLVETRQITKHVAQILDSRMNTKYDENDKLIREVKVITLKSKLVSDFRKDFQFYKVREINNYHHAHDAYLNAVVGTALIKKYPKLESEFVYGDYKVYDVRKMIAKSEQEIGKATAKYFFYSNIMNFFKTEITLANGEIRKRPLIETNGETGEIVWDKGRDFATVRKVLSMPQVNIVKKTEVQTGGFSKESILPKRNSDKLIARKKDWDPKKYGGFDSPTVAYSVLVVAKVEKGKSKKLKSVKELLGITIMERSSFEKNPIDFLEAKGYKEVKKDLIIKLPKYSLFELENGRKRMLASAGELQKGNELALPSKYVNFLYLASHYEKLKGSPEDNEQKQLFVEQHKHYLDEIIEQISEFSKRVILADANLDKVLSAYNKHRDKPIREQAENIIHLFTLTNLGAPAAFKYFDTTIDRKRYTSTKEVLDATLIHQSITGLYETRIDLSQLGGDGGGGGGSSGGSGGTLQLEEEYRLFEPESTQKQEMDIWLKNFPQAWAETGGMGTAHCQAPVLIQLKATATPISIRQYPMPHEAYQGIKPHIRRMLDQGILKPCQSPWNTPLLPVKKPGTEDYRPVQDLREVNKRVEDIHPTVPNPYNLLSTLPPSHPWYTVLDLKDAFFCLRLHSESQLLFAFEWRDPEIGLSGQLTWTRLPQGFKNSPTLFNEALHSDLADFRVRYPALVLLQYVDDLLLAAATRTECLEGTKALLETLGNKGYRASAKKAQICLQEVTYLGYSLKDGQRWLTKARKEAILSIPVPKNSRQVREFLGKAGYCRLFIPGFAELAAPLYPLTRPGTLFQWGTEQQLAFEDIKKALLSSPALGLPDITKPFELFIDENSGFAKGVLVQKLGPWKRPVAYLSKKLDTVASGWPPCLRMVAAIAILVKDAGKLTLGQPLTILTSHPVEALVRQPPNKWLSNARMTHYQAMLLDAERVHFGPTVSLNPATLLPLPSGGNHHDCLQILAETHGTRPDLTDQPLPDADLTWYTDGSSFIRNGEREAGAAVTTESEVIWAAPLPPGTSAQRAELIALTQALKMAEGKKLTVYTDSRYAFATTHVHGEIYRRRGWLTSEGKEIKNKNEILALLEALFLPKRLSIIHCPGHQKGDSPQAKGNRLADDTAKKAATETHSSLTVLPAGKRTADGSEFEKRTADGSEFESPKKKAKVE

SEQ ID NO: 1248 - protein, 2090 aa, synthetic construct
MPAAKRVKLDGGDKKYSIGLDIGTNSVGWAVITDEYKVPSKKFKVLGNTDRHSIKKNLIGALLFDSGETAEATRLKRTARRRYTRRKNRICYLQEIFSNEMAKVDDSFFHRLEESFLVEEDKKHERHPIFGNIVDEVAYHEKYPTIYHLRKKLVDSTDKADLRLIYLALAHMIKFRGHFLIEGDLNPDNSDVDKLFIQLVQTYNQLFEENPINASGVDAKAILSARLSKSRRLENLIAQLPGEKKNGLFGNLIALSLGLTPNFKSNFDLAEDAKLQLSKDTYDDDLDNLLAQIGDQYADLFLAAKNLSDAILLSDILRVNTEITKAPLSASMIKRYDEHHQDLTLLKALVRQQLPEKYKEIFFDQSKNGYAGYIDGGASQEEFYKFIKPILEKMDGTEELLVKLNREDLLRKQRTFDNGSIPHQIHLGELHAILRRQEDFYPFLKDNREKIEKILTFRIPYYVGPLARGNSRFAWMTRKSEETITPWNFEEVVDKGASAQSFIERMTNFDKNLPNEKVLPKHSLLYEYFTVYNELTKVKYVTEGMRKPAFLSGEQKKAIVDLLFKTNRKVTVKQLKEDYFKKIECFDSVEISGVEDRFNASLGTYHDLLKIIKDKDFLDNEENEDILEDIVLTLTLFEDREMIEERLKTYAHLFDDKVMKQLKRRRYTGWGRLSRKLINGIRDKQSGKTILDFLKSDGFANRNFMQLIHDDSLTFKEDIQKAQVSGQGDSLHEHIANLAGSPAIKKGILQTVKVVDELVKVMGRHKPENIVIEMARENQTTQKGQKNSRERMKRIEEGIKELGSQILKEHPVENTQLQNEKLYLYYLQNGRDMYVDQELDINRLSDYDVDHIVPQSFLKDDSIDNKVLTRSDKARGKSDNVPSEEVVKKMKNYWRQLLNAKLITQRKFDNLTKAERGGLSELDKAGFIKRQLVETRQITKHVAQILDSRMNTKYDENDKLIREVKVITLKSKLVSDFRKDFQFYKVREINNYHHAHDAYLNAVVGTALIKKYPKLESEFVYGDYKVYDVRKMIAKSEQEIGKATAKYFFYSNIMNFFKTEITLANGEIRKRPLIETNGETGEIVWDKGRDFATVRKVLSMPQVNIVKKTEVQTGGFSKESILPKRNSDKLIARKKDWDPKKYGGFDSPTVAYSVLVVAKVEKGKSKKLKSVKELLGITIMERSSFEKNPIDFLEAKGYKEVKKDLIIKLPKYSLFELENGRKRMLASAGELQKGNELALPSKYVNFLYLASHYEKLKGSPEDNEQKQLFVEQHKHYLDEIIEQISEFSKRVILADANLDKVLSAYNKHRDKPIREQAENIIHLFTLTNLGAPAAFKYFDTTIDRKRYTSTKEVLDATLIHQSITGLYETRIDLSQLGGDGGPAPGGGGGTLQLEEEYRLFEPESTQKQEMDIWLKNFPQAWAETGGMGTAHCQAPVLIQLKATATPISIRQYPMPHEAYQGIKPHIRRMLDQGILKPCQSPWNTPLLPVKKPGTEDYRPVQDLREVNKRVEDIHPTVPNPYNLLSTLPPSHPWYTVLDLKDAFFCLRLHSESQLLFAFEWRDPEIGLSGQLTWTRLPQGFKNSPTLFNEALHSDLADFRVRYPALVLLQYVDDLLLAAATRTECLEGTKALLETLGNKGYRASAKKAQICLQEVTYLGYSLKDGQRWLTKARKEAILSIPVPKNSRQVREFLGKAGYCRLFIPGFAELAAPLYPLTRPGTLFQWGTEQQLAFEDIKKALLSSPALGLPDITKPFELFIDENSGFAKGVLVQKLGPWKRPVAYLSKKLDTVASGWPPCLRMVAAIAILVKDAGKLTLGQPLTILTSHPVEALVRQPPNKWLSNARMTHYQAMLLDAERVHFGPTVSLNPATLLPLPSGGNHHDCLQILAETHGTRPDLTDQPLPDADLTWYTDGSSFIRNGEREAGAAVTTESEVIWAAPLPPGTSAQRAELIALTQALKMAEGKKLTVYTDSRYAFATTHVHGEIYRRRGWLTSEGKEIKNKNEILALLEALFLPKRLSIIHCPGHQKGDSPQAKGNRLADDTAKKAATETHSSLTVLPAGKRTADGSEFEKRTADGSEFESPKKKAKVE

SEQ ID NO: 1249 - protein, 2090 aa, synthetic construct
MPAAKRVKLDGGDKKYSIGLDIGTNSVGWAVITDEYKVPSKKFKVLGNTDRHSIKKNLIGALLFDSGETAEATRLKRTARRRYTRRKNRICYLQEIFSNEMAKVDDSFFHRLEESFLVEEDKKHERHPIFGNIVDEVAYHEKYPTIYHLRKKLVDSTDKADLRLIYLALAHMIKFRGHFLIEGDLNPDNSDVDKLFIQLVQTYNQLFEENPINASGVDAKAILSARLSKSRRLENLIAQLPGEKKNGLFGNLIALSLGLTPNFKSNFDLAEDAKLQLSKDTYDDDLDNLLAQIGDQYADLFLAAKNLSDAILLSDILRVNTEITKAPLSASMIKRYDEHHQDLTLLKALVRQQLPEKYKEIFFDQSKNGYAGYIDGGASQEEFYKFIKPILEKMDGTEELLVKLNREDLLRKQRTFDNGSIPHQIHLGELHAILRRQEDFYPFLKDNREKIEKILTFRIPYYVGPLARGNSRFAWMTRKSEETITPWNFEEVVDKGASAQSFIERMTNFDKNLPNEKVLPKHSLLYEYFTVYNELTKVKYVTEGMRKPAFLSGEQKKAIVDLLFKTNRKVTVKQLKEDYFKKIECFDSVEISGVEDRFNASLGTYHDLLKIIKDKDFLDNEENEDILEDIVLTLTLFEDREMIEERLKTYAHLFDDKVMKQLKRRRYTGWGRLSRKLINGIRDKQSGKTILDFLKSDGFANRNFMQLIHDDSLTFKEDIQKAQVSGQGDSLHEHIANLAGSPAIKKGILQTVKVVDELVKVMGRHKPENIVIEMARENQTTQKGQKNSRERMKRIEEGIKELGSQILKEHPVENTQLQNEKLYLYYLQNGRDMYVDQELDINRLSDYDVDHIVPQSFLKDDSIDNKVLTRSDKARGKSDNVPSEEVVKKMKNYWRQLLNAKLITQRKFDNLTKAERGGLSELDKAGFIKRQLVETRQITKHVAQILDSRMNTKYDENDKLIREVKVITLKSKLVSDFRKDFQFYKVREINNYHHAHDAYLNAVVGTALIKKYPKLESEFVYGDYKVYDVRKMIAKSEQEIGKATAKYFFYSNIMNFFKTEITLANGEIRKRPLIETNGETGEIVWDKGRDFATVRKVLSMPQVNIVKKTEVQTGGFSKESILPKRNSDKLIARKKDWDPKKYGGFDSPTVAYSVLVVAKVEKGKSKKLKSVKELLGITIMERSSFEKNPIDFLEAKGYKEVKKDLIIKLPKYSLFELENGRKRMLASAGELQKGNELALPSKYVNFLYLASHYEKLKGSPEDNEQKQLFVEQHKHYLDEIIEQISEFSKRVILADANLDKVLSAYNKHRDKPIREQAENIIHLFTLTNLGAPAAFKYFDTTIDRKRYTSTKEVLDATLIHQSITGLYETRIDLSQLGGDGGGSSGGGGGTLQLEEEYRLFEPESTQKQEMDIWLKNFPQAWAETGGMGTAHCQAPVLIQLKATATPISIRQYPMPHEAYQGIKPHIRRMLDQGILKPCQSPWNTPLLPVKKPGTEDYRPVQDLREVNKRVEDIHPTVPNPYNLLSTLPPSHPWYTVLDLKDAFFCLRLHSESQLLFAFEWRDPEIGLSGQLTWTRLPQGFKNSPTLFNEALHSDLADFRVRYPALVLLQYVDDLLLAAATRTECLEGTKALLETLGNKGYRASAKKAQICLQEVTYLGYSLKDGQRWLTKARKEAILSIPVPKNSRQVREFLGKAGYCRLFIPGFAELAAPLYPLTRPGTLFQWGTEQQLAFEDIKKALLSSPALGLPDITKPFELFIDENSGFAKGVLVQKLGPWKRPVAYLSKKLDTVASGWPPCLRMVAAIAILVKDAGKLTLGQPLTILTSHPVEALVRQPPNKWLSNARMTHYQAMLLDAERVHFGPTVSLNPATLLPLPSGGNHHDCLQILAETHGTRPDLTDQPLPDADLTWYTDGSSFIRNGEREAGAAVTTESEVIWAAPLPPGTSAQRAELIALTQALKMAEGKKLTVYTDSRYAFATTHVHGEIYRRRGWLTSEGKEIKNKNEILALLEALFLPKRLSIIHCPGHQKGDSPQAKGNRLADDTAKKAATETHSSLTVLPAGKRTADGSEFEKRTADGSEFESPKKKAKVE

SEQ ID NO: 1250 - protein, 2090 aa, synthetic construct
MPAAKRVKLDGGDKKYSIGLDIGTNSVGWAVITDEYKVPSKKFKVLGNTDRHSIKKNLIGALLFDSGETAEATRLKRTARRRYTRRKNRICYLQEIFSNEMAKVDDSFFHRLEESFLVEEDKKHERHPIFGNIVDEVAYHEKYPTIYHLRKKLVDSTDKADLRLIYLALAHMIKFRGHFLIEGDLNPDNSDVDKLFIQLVQTYNQLFEENPINASGVDAKAILSARLSKSRRLENLIAQLPGEKKNGLFGNLIALSLGLTPNFKSNFDLAEDAKLQLSKDTYDDDLDNLLAQIGDQYADLFLAAKNLSDAILLSDILRVNTEITKAPLSASMIKRYDEHHQDLTLLKALVRQQLPEKYKEIFFDQSKNGYAGYIDGGASQEEFYKFIKPILEKMDGTEELLVKLNREDLLRKQRTFDNGSIPHQIHLGELHAILRRQEDFYPFLKDNREKIEKILTFRIPYYVGPLARGNSRFAWMTRKSEETITPWNFEEVVDKGASAQSFIERMTNFDKNLPNEKVLPKHSLLYEYFTVYNELTKVKYVTEGMRKPAFLSGEQKKAIVDLLFKTNRKVTVKQLKEDYFKKIECFDSVEISGVEDRFNASLGTYHDLLKIIKDKDFLDNEENEDILEDIVLTLTLFEDREMIEERLKTYAHLFDDKVMKQLKRRRYTGWGRLSRKLINGIRDKQSGKTILDFLKSDGFANRNFMQLIHDDSLTFKEDIQKAQVSGQGDSLHEHIANLAGSPAIKKGILQTVKVVDELVKVMGRHKPENIVIEMARENQTTQKGQKNSRERMKRIEEGIKELGSQILKEHPVENTQLQNEKLYLYYLQNGRDMYVDQELDINRLSDYDVDHIVPQSFLKDDSIDNKVLTRSDKARGKSDNVPSEEVVKKMKNYWRQLLNAKLITQRKFDNLTKAERGGLSELDKAGFIKRQLVETRQITKHVAQILDSRMNTKYDENDKLIREVKVITLKSKLVSDFRKDFQFYKVREINNYHHAHDAYLNAVVGTALIKKYPKLESEFVYGDYKVYDVRKMIAKSEQEIGKATAKYFFYSNIMNFFKTEITLANGEIRKRPLIETNGETGEIVWDKGRDFATVRKVLSMPQVNIVKKTEVQTGGFSKESILPKRNSDKLIARKKDWDPKKYGGFDSPTVAYSVLVVAKVEKGKSKKLKSVKELLGITIMERSSFEKNPIDFLEAKGYKEVKKDLIIKLPKYSLFELENGRKRMLASAGELQKGNELALPSKYVNFLYLASHYEKLKGSPEDNEQKQLFVEQHKHYLDEIIEQISEFSKRVILADANLDKVLSAYNKHRDKPIREQAENIIHLFTLTNLGAPAAFKYFDTTIDRKRYTSTKEVLDATLIHQSITGLYETRIDLSQLGGDGGGSSGSSGGTLQLEEEYRLFEPESTQKQEMDIWLKNFPQAWAETGGMGTAHCQAPVLIQLKATATPISIRQYPMPHEAYQGIKPHIRRMLDQGILKPCQSPWNTPLLPVKKPGTEDYRPVQDLREVNKRVEDIHPTVPNPYNLLSTLPPSHPWYTVLDLKDAFFCLRLHSESQLLFAFEWRDPEIGLSGQLTWTRLPQGFKNSPTLFNEALHSDLADFRVRYPALVLLQYVDDLLLAAATRTECLEGTKALLETLGNKGYRASAKKAQICLQEVTYLGYSLKDGQRWLTKARKEAILSIPVPKNSRQVREFLGKAGYCRLFIPGFAELAAPLYPLTRPGTLFQWGTEQQLAFEDIKKALLSSPALGLPDITKPFELFIDENSGFAKGVLVQKLGPWKRPVAYLSKKLDTVASGWPPCLRMVAAIAILVKDAGKLTLGQPLTILTSHPVEALVRQPPNKWLSNARMTHYQAMLLDAERVHFGPTVSLNPATLLPLPSGGNHHDCLQILAETHGTRPDLTDQPLPDADLTWYTDGSSFIRNGEREAGAAVTTESEVIWAAPLPPGTSAQRAELIALTQALKMAEGKKLTVYTDSRYAFATTHVHGEIYRRRGWLTSEGKEIKNKNEILALLEALFLPKRLSIIHCPGHQKGDSPQAKGNRLADDTAKKAATETHSSLTVLPAGKRTADGSEFEKRTADGSEFESPKKKAKVE

SEQ ID NO: 1251 - protein, 2088 aa, synthetic construct
MPAAKRVKLDGGDKKYSIGLDIGTNSVGWAVITDEYKVPSKKFKVLGNTDRHSIKKNLIGALLFDSGETAEATRLKRTARRRYTRRKNRICYLQEIFSNEMAKVDDSFFHRLEESFLVEEDKKHERHPIFGNIVDEVAYHEKYPTIYHLRKKLVDSTDKADLRLIYLALAHMIKFRGHFLIEGDLNPDNSDVDKLFIQLVQTYNQLFEENPINASGVDAKAILSARLSKSRRLENLIAQLPGEKKNGLFGNLIALSLGLTPNFKSNFDLAEDAKLQLSKDTYDDDLDNLLAQIGDQYADLFLAAKNLSDAILLSDILRVNTEITKAPLSASMIKRYDEHHQDLTLLKALVRQQLPEKYKEIFFDQSKNGYAGYIDGGASQEEFYKFIKPILEKMDGTEELLVKLNREDLLRKQRTFDNGSIPHQIHLGELHAILRRQEDFYPFLKDNREKIEKILTFRIPYYVGPLARGNSRFAWMTRKSEETITPWNFEEVVDKGASAQSFIERMTNFDKNLPNEKVLPKHSLLYEYFTVYNELTKVKYVTEGMRKPAFLSGEQKKAIVDLLFKTNRKVTVKQLKEDYFKKIECFDSVEISGVEDRFNASLGTYHDLLKIIKDKDFLDNEENEDILEDIVLTLTLFEDREMIEERLKTYAHLFDDKVMKQLKRRRYTGWGRLSRKLINGIRDKQSGKTILDFLKSDGFANRNFMQLIHDDSLTFKEDIQKAQVSGQGDSLHEHIANLAGSPAIKKGILQTVKVVDELVKVMGRHKPENIVIEMARENQTTQKGQKNSRERMKRIEEGIKELGSQILKEHPVENTQLQNEKLYLYYLQNGRDMYVDQELDINRLSDYDVDHIVPQSFLKDDSIDNKVLTRSDKARGKSDNVPSEEVVKKMKNYWRQLLNAKLITQRKFDNLTKAERGGLSELDKAGFIKRQLVETRQITKHVAQILDSRMNTKYDENDKLIREVKVITLKSKLVSDFRKDFQFYKVREINNYHHAHDAYLNAVVGTALIKKYPKLESEFVYGDYKVYDVRKMIAKSEQEIGKATAKYFFYSNIMNFFKTEITLANGEIRKRPLIETNGETGEIVWDKGRDFATVRKVLSMPQVNIVKKTEVQTGGFSKESILPKRNSDKLIARKKDWDPKKYGGFDSPTVAYSVLVVAKVEKGKSKKLKSVKELLGITIMERSSFEKNPIDFLEAKGYKEVKKDLIIKLPKYSLFELENGRKRMLASAGELQKGNELALPSKYVNFLYLASHYEKLKGSPEDNEQKQLFVEQHKHYLDEIIEQISEFSKRVILADANLDKVLSAYNKHRDKPIREQAENIIHLFTLTNLGAPAAFKYFDTTIDRKRYTSTKEVLDATLIHQSITGLYETRIDLSQLGGDGGGGGGGGTLQLEEEYRLFEPESTQKQEMDIWLKNFPQAWAETGGMGTAHCQAPVLIQLKATATPISIRQYPMPHEAYQGIKPHIRRMLDQGILKPCQSPWNTPLLPVKKPGTEDYRPVQDLREVNKRVEDIHPTVPNPYNLLSTLPPSHPWYTVLDLKDAFFCLRLHSESQLLFAFEWRDPEIGLSGQLTWTRLPQGFKNSPTLFNEALHSDLADFRVRYPALVLLQYVDDLLLAAATRTECLEGTKALLETLGNKGYRASAKKAQICLQEVTYLGYSLKDGQRWLTKARKEAILSIPVPKNSRQVREFLGKAGYCRLFIPGFAELAAPLYPLTRPGTLFQWGTEQQLAFEDIKKALLSSPALGLPDITKPFELFIDENSGFAKGVLVQKLGPWKRPVAYLSKKLDTVASGWPPCLRMVAAIAILVKDAGKLTLGQPLTILTSHPVEALVRQPPNKWLSNARMTHYQAMLLDAERVHFGPTVSLNPATLLPLPSGGNHHDCLQILAETHGTRPDLTDQPLPDADLTWYTDGSSFIRNGEREAGAAVTTESEVIWAAPLPPGTSAQRAELIALTQALKMAEGKKLTVYTDSRYAFATTHVHGEIYRRRGWLTSEGKEIKNKNEILALLEALFLPKRLSIIHCPGHQKGDSPQAKGNRLADDTAKKAATETHSSLTVLPAGKRTADGSEFEKRTADGSEFESPKKKAKVE

SEQ ID NO: 1252 - protein, 2090 aa, synthetic construct
MPAAKRVKLDGGDKKYSIGLDIGTNSVGWAVITDEYKVPSKKFKVLGNTDRHSIKKNLIGALLFDSGETAEATRLKRTARRRYTRRKNRICYLQEIFSNEMAKVDDSFFHRLEESFLVEEDKKHERHPIFGNIVDEVAYHEKYPTIYHLRKKLVDSTDKADLRLIYLALAHMIKFRGHFLIEGDLNPDNSDVDKLFIQLVQTYNQLFEENPINASGVDAKAILSARLSKSRRLENLIAQLPGEKKNGLFGNLIALSLGLTPNFKSNFDLAEDAKLQLSKDTYDDDLDNLLAQIGDQYADLFLAAKNLSDAILLSDILRVNTEITKAPLSASMIKRYDEHHQDLTLLKALVRQQLPEKYKEIFFDQSKNGYAGYIDGGASQEEFYKFIKPILEKMDGTEELLVKLNREDLLRKQRTFDNGSIPHQIHLGELHAILRRQEDFYPFLKDNREKIEKILTFRIPYYVGPLARGNSRFAWMTRKSEETITPWNFEEVVDKGASAQSFIERMTNFDKNLPNEKVLPKHSLLYEYFTVYNELTKVKYVTEGMRKPAFLSGEQKKAIVDLLFKTNRKVTVKQLKEDYFKKIECFDSVEISGVEDRFNASLGTYHDLLKIIKDKDFLDNEENEDILEDIVLTLTLFEDREMIEERLKTYAHLFDDKVMKQLKRRRYTGWGRLSRKLINGIRDKQSGKTILDFLKSDGFANRNFMQLIHDDSLTFKEDIQKAQVSGQGDSLHEHIANLAGSPAIKKGILQTVKVVDELVKVMGRHKPENIVIEMARENQTTQKGQKNSRERMKRIEEGIKELGSQILKEHPVENTQLQNEKLYLYYLQNGRDMYVDQELDINRLSDYDVDHIVPQSFLKDDSIDNKVLTRSDKARGKSDNVPSEEVVKKMKNYWRQLLNAKLITQRKFDNLTKAERGGLSELDKAGFIKRQLVETRQITKHVAQILDSRMNTKYDENDKLIREVKVITLKSKLVSDFRKDFQFYKVREINNYHHAHDAYLNAVVGTALIKKYPKLESEFVYGDYKVYDVRKMIAKSEQEIGKATAKYFFYSNIMNFFKTEITLANGEIRKRPLIETNGETGEIVWDKGRDFATVRKVLSMPQVNIVKKTEVQTGGFSKESILPKRNSDKLIARKKDWDPKKYGGFDSPTVAYSVLVVAKVEKGKSKKLKSVKELLGITIMERSSFEKNPIDFLEAKGYKEVKKDLIIKLPKYSLFELENGRKRMLASAGELQKGNELALPSKYVNFLYLASHYEKLKGSPEDNEQKQLFVEQHKHYLDEIIEQISEFSKRVILADANLDKVLSAYNKHRDKPIREQAENIIHLFTLTNLGAPAAFKYFDTTIDRKRYTSTKEVLDATLIHQSITGLYETRIDLSQLGGDGGPAPGSSGGTLQLEEEYRLFEPESTQKQEMDIWLKNFPQAWAETGGMGTAHCQAPVLIQLKATATPISIRQYPMPHEAYQGIKPHIRRMLDQGILKPCQSPWNTPLLPVKKPGTEDYRPVQDLREVNKRVEDIHPTVPNPYNLLSTLPPSHPWYTVLDLKDAFFCLRLHSESQLLFAFEWRDPEIGLSGQLTWTRLPQGFKNSPTLFNEALHSDLADFRVRYPALVLLQYVDDLLLAAATRTECLEGTKALLETLGNKGYRASAKKAQICLQEVTYLGYSLKDGQRWLTKARKEAILSIPVPKNSRQVREFLGKAGYCRLFIPGFAELAAPLYPLTRPGTLFQWGTEQQLAFEDIKKALLSSPALGLPDITKPFELFIDENSGFAKGVLVQKLGPWKRPVAYLSKKLDTVASGWPPCLRMVAAIAILVKDAGKLTLGQPLTILTSHPVEALVRQPPNKWLSNARMTHYQAMLLDAERVHFGPTVSLNPATLLPLPSGGNHHDCLQILAETHGTRPDLTDQPLPDADLTWYTDGSSFIRNGEREAGAAVTTESEVIWAAPLPPGTSAQRAELIALTQALKMAEGKKLTVYTDSRYAFATTHVHGEIYRRRGWLTSEGKEIKNKNEILALLEALFLPKRLSIIHCPGHQKGDSPQAKGNRLADDTAKKAATETHSSLTVLPAGKRTADGSEFEKRTADGSEFESPKKKAKVE

SEQ ID NO: 1253 - protein, 2095 aa, synthetic construct
MPAAKRVKLDGGDKKYSIGLDIGTNSVGWAVITDEYKVPSKKFKVLGNTDRHSIKKNLIGALLFDSGETAEATRLKRTARRRYTRRKNRICYLQEIFSNEMAKVDDSFFHRLEESFLVEEDKKHERHPIFGNIVDEVAYHEKYPTIYHLRKKLVDSTDKADLRLIYLALAHMIKFRGHFLIEGDLNPDNSDVDKLFIQLVQTYNQLFEENPINASGVDAKAILSARLSKSRRLENLIAQLPGEKKNGLFGNLIALSLGLTPNFKSNFDLAEDAKLQLSKDTYDDDLDNLLAQIGDQYADLFLAAKNLSDAILLSDILRVNTEITKAPLSASMIKRYDEHHQDLTLLKALVRQQLPEKYKEIFFDQSKNGYAGYIDGGASQEEFYKFIKPILEKMDGTEELLVKLNREDLLRKQRTFDNGSIPHQIHLGELHAILRRQEDFYPFLKDNREKIEKILTFRIPYYVGPLARGNSRFAWMTRKSEETITPWNFEEVVDKGASAQSFIERMTNFDKNLPNEKVLPKHSLLYEYFTVYNELTKVKYVTEGMRKPAFLSGEQKKAIVDLLFKTNRKVTVKQLKEDYFKKIECFDSVEISGVEDRFNASLGTYHDLLKIIKDKDFLDNEENEDILEDIVLTLTLFEDREMIEERLKTYAHLFDDKVMKQLKRRRYTGWGRLSRKLINGIRDKQSGKTILDFLKSDGFANRNFMQLIHDDSLTFKEDIQKAQVSGQGDSLHEHIANLAGSPAIKKGILQTVKVVDELVKVMGRHKPENIVIEMARENQTTQKGQKNSRERMKRIEEGIKELGSQILKEHPVENTQLQNEKLYLYYLQNGRDMYVDQELDINRLSDYDVDHIVPQSFLKDDSIDNKVLTRSDKARGKSDNVPSEEVVKKMKNYWRQLLNAKLITQRKFDNLTKAERGGLSELDKAGFIKRQLVETRQITKHVAQILDSRMNTKYDENDKLIREVKVITLKSKLVSDFRKDFQFYKVREINNYHHAHDAYLNAVVGTALIKKYPKLESEFVYGDYKVYDVRKMIAKSEQEIGKATAKYFFYSNIMNFFKTEITLANGEIRKRPLIETNGETGEIVWDKGRDFATVRKVLSMPQVNIVKKTEVQTGGFSKESILPKRNSDKLIARKKDWDPKKYGGFDSPTVAYSVLVVAKVEKGKSKKLKSVKELLGITIMERSSFEKNPIDFLEAKGYKEVKKDLIIKLPKYSLFELENGRKRMLASAGELQKGNELALPSKYVNFLYLASHYEKLKGSPEDNEQKQLFVEQHKHYLDEIIEQISEFSKRVILADANLDKVLSAYNKHRDKPIREQAENIIHLFTLTNLGAPAAFKYFDTTIDRKRYTSTKEVLDATLIHQSITGLYETRIDLSQLGGDGGEAAAKGGGPAPGGTLQLEEEYRLFEPESTQKQEMDIWLKNFPQAWAETGGMGTAHCQAPVLIQLKATATPISIRQYPMPHEAYQGIKPHIRRMLDQGILKPCQSPWNTPLLPVKKPGTEDYRPVQDLREVNKRVEDIHPTVPNPYNLLSTLPPSHPWYTVLDLKDAFFCLRLHSESQLLFAFEWRDPEIGLSGQLTWTRLPQGFKNSPTLFNEALHSDLADFRVRYPALVLLQYVDDLLLAAATRTECLEGTKALLETLGNKGYRASAKKAQICLQEVTYLGYSLKDGQRWLTKARKEAILSIPVPKNSRQVREFLGKAGYCRLFIPGFAELAAPLYPLTRPGTLFQWGTEQQLAFEDIKKALLSSPALGLPDITKPFELFIDENSGFAKGVLVQKLGPWKRPVAYLSKKLDTVASGWPPCLRMVAAIAILVKDAGKLTLGQPLTILTSHPVEALVRQPPNKWLSNARMTHYQAMLLDAERVHFGPTVSLNPATLLPLPSGGNHHDCLQILAETHGTRPDLTDQPLPDADLTWYTDGSSFIRNGEREAGAAVTTESEVIWAAPLPPGTSAQRAELIALTQALKMAEGKKLTVYTDSRYAFATTHVHGEIYRRRGWLTSEGKEIKNKNEILALLEALFLPKRLSIIHCPGHQKGDSPQAKGNRLADDTAKKAATETHSSLTVLPAGKRTADGSEFEKRTADGSEFESPKKKAKVE

SEQ ID NO: 1254 - protein, 2095 aa, synthetic construct
MPAAKRVKLDGGDKKYSIGLDIGTNSVGWAVITDEYKVPSKKFKVLGNTDRHSIKKNLIGALLFDSGETAEATRLKRTARRRYTRRKNRICYLQEIFSNEMAKVDDSFFHRLEESFLVEEDKKHERHPIFGNIVDEVAYHEKYPTIYHLRKKLVDSTDKADLRLIYLALAHMIKFRGHFLIEGDLNPDNSDVDKLFIQLVQTYNQLFEENPINASGVDAKAILSARLSKSRRLENLIAQLPGEKKNGLFGNLIALSLGLTPNFKSNFDLAEDAKLQLSKDTYDDDLDNLLAQIGDQYADLFLAAKNLSDAILLSDILRVNTEITKAPLSASMIKRYDEHHQDLTLLKALVRQQLPEKYKEIFFDQSKNGYAGYIDGGASQEEFYKFIKPILEKMDGTEELLVKLNREDLLRKQRTFDNGSIPHQIHLGELHAILRRQEDFYPFLKDNREKIEKILTFRIPYYVGPLARGNSRFAWMTRKSEETITPWNFEEVVDKGASAQSFIERMTNFDKNLPNEKVLPKHSLLYEYFTVYNELTKVKYVTEGMRKPAFLSGEQKKAIVDLLFKTNRKVTVKQLKEDYFKKIECFDSVEISGVEDRFNASLGTYHDLLKIIKDKDFLDNEENEDILEDIVLTLTLFEDREMIEERLKTYAHLFDDKVMKQLKRRRYTGWGRLSRKLINGIRDKQSGKTILDFLKSDGFANRNFMQLIHDDSLTFKEDIQKAQVSGQGDSLHEHIANLAGSPAIKKGILQTVKVVDELVKVMGRHKPENIVIEMARENQTTQKGQKNSRERMKRIEEGIKELGSQILKEHPVENTQLQNEKLYLYYLQNGRDMYVDQELDINRLSDYDVDHIVPQSFLKDDSIDNKVLTRSDKARGKSDNVPSEEVVKKMKNYWRQLLNAKLITQRKFDNLTKAERGGLSELDKAGFIKRQLVETRQITKHVAQILDSRMNTKYDENDKLIREVKVITLKSKLVSDFRKDFQFYKVREINNYHHAHDAYLNAVVGTALIKKYPKLESEFVYGDYKVYDVRKMIAKSEQEIGKATAKYFFYSNIMNFFKTEITLANGEIRKRPLIETNGETGEIVWDKGRDFATVRKVLSMPQVNIVKKTEVQTGGFSKESILPKRNSDKLIARKKDWDPKKYGGFDSPTVAYSVLVVAKVEKGKSKKLKSVKELLGITIMERSSFEKNPIDFLEAKGYKEVKKDLIIKLPKYSLFELENGRKRMLASAGELQKGNELALPSKYVNFLYLASHYEKLKGSPEDNEQKQLFVEQHKHYLDEIIEQISEFSKRVILADANLDKVLSAYNKHRDKPIREQAENIIHLFTLTNLGAPAAFKYFDTTIDRKRYTSTKEVLDATLIHQSITGLYETRIDLSQLGGDGGEAAAKPAPGGSGGTLQLEEEYRLFEPESTQKQEMDIWLKNFPQAWAETGGMGTAHCQAPVLIQLKATATPISIRQYPMPHEAYQGIKPHIRRMLDQGILKPCQSPWNTPLLPVKKPGTEDYRPVQDLREVNKRVEDIHPTVPNPYNLLSTLPPSHPWYTVLDLKDAFFCLRLHSESQLLFAFEWRDPEIGLSGQLTWTRLPQGFKNSPTLFNEALHSDLADFRVRYPALVLLQYVDDLLLAAATRTECLEGTKALLETLGNKGYRASAKKAQICLQEVTYLGYSLKDGQRWLTKARKEAILSIPVPKNSRQVREFLGKAGYCRLFIPGFAELAAPLYPLTRPGTLFQWGTEQQLAFEDIKKALLSSPALGLPDITKPFELFIDENSGFAKGVLVQKLGPWKRPVAYLSKKLDTVASGWPPCLRMVAAIAILVKDAGKLTLGQPLTILTSHPVEALVRQPPNKWLSNARMTHYQAMLLDAERVHFGPTVSLNPATLLPLPSGGNHHDCLQILAETHGTRPDLTDQPLPDADLTWYTDGSSFIRNGEREAGAAVTTESEVIWAAPLPPGTSAQRAELIALTQALKMAEGKKLTVYTDSRYAFATTHVHGEIYRRRGWLTSEGKEIKNKNEILALLEALFLPKRLSIIHCPGHQKGDSPQAKGNRLADDTAKKAATETHSSLTVLPAGKRTADGSEFEKRTADGSEFESPKKKAKVE

SEQ ID NO: 1255 - protein, 2093 aa, synthetic construct
MPAAKRVKLDGGDKKYSIGLDIGTNSVGWAVITDEYKVPSKKFKVLGNTDRHSIKKNLIGALLFDSGETAEATRLKRTARRRYTRRKNRICYLQEIFSNEMAKVDDSFFHRLEESFLVEEDKKHERHPIFGNIVDEVAYHEKYPTIYHLRKKLVDSTDKADLRLIYLALAHMIKFRGHFLIEGDLNPDNSDVDKLFIQLVQTYNQLFEENPINASGVDAKAILSARLSKSRRLENLIAQLPGEKKNGLFGNLIALSLGLTPNFKSNFDLAEDAKLQLSKDTYDDDLDNLLAQIGDQYADLFLAAKNLSDAILLSDILRVNTEITKAPLSASMIKRYDEHHQDLTLLKALVRQQLPEKYKEIFFDQSKNGYAGYIDGGASQEEFYKFIKPILEKMDGTEELLVKLNREDLLRKQRTFDNGSIPHQIHLGELHAILRRQEDFYPFLKDNREKIEKILTFRIPYYVGPLARGNSRFAWMTRKSEETITPWNFEEVVDKGASAQSFIERMTNFDKNLPNEKVLPKHSLLYEYFTVYNELTKVKYVTEGMRKPAFLSGEQKKAIVDLLFKTNRKVTVKQLKEDYFKKIECFDSVEISGVEDRFNASLGTYHDLLKIIKDKDFLDNEENEDILEDIVLTLTLFEDREMIEERLKTYAHLFDDKVMKQLKRRRYTGWGRLSRKLINGIRDKQSGKTILDFLKSDGFANRNFMQLIHDDSLTFKEDIQKAQVSGQGDSLHEHIANLAGSPAIKKGILQTVKVVDELVKVMGRHKPENIVIEMARENQTTQKGQKNSRERMKRIEEGIKELGSQILKEHPVENTQLQNEKLYLYYLQNGRDMYVDQELDINRLSDYDVDHIVPQSFLKDDSIDNKVLTRSDKARGKSDNVPSEEVVKKMKNYWRQLLNAKLITQRKFDNLTKAERGGLSELDKAGFIKRQLVETRQITKHVAQILDSRMNTKYDENDKLIREVKVITLKSKLVSDFRKDFQFYKVREINNYHHAHDAYLNAVVGTALIKKYPKLESEFVYGDYKVYDVRKMIAKSEQEIGKATAKYFFYSNIMNFFKTEITLANGEIRKRPLIETNGETGEIVWDKGRDFATVRKVLSMPQVNIVKKTEVQTGGFSKESILPKRNSDKLIARKKDWDPKKYGGFDSPTVAYSVLVVAKVEKGKSKKLKSVKELLGITIMERSSFEKNPIDFLEAKGYKEVKKDLIIKLPKYSLFELENGRKRMLASAGELQKGNELALPSKYVNFLYLASHYEKLKGSPEDNEQKQLFVEQHKHYLDEIIEQISEFSKRVILADANLDKVLSAYNKHRDKPIREQAENIIHLFTLTNLGAPAAFKYFDTTIDRKRYTSTKEVLDATLIHQSITGLYETRIDLSQLGGDGGGSSGSSGSSGGTLQLEEEYRLFEPESTQKQEMDIWLKNFPQAWAETGGMGTAHCQAPVLIQLKATATPISIRQYPMPHEAYQGIKPHIRRMLDQGILKPCQSPWNTPLLPVKKPGTEDYRPVQDLREVNKRVEDIHPTVPNPYNLLSTLPPSHPWYTVLDLKDAFFCLRLHSESQLLFAFEWRDPEIGLSGQLTWTRLPQGFKNSPTLFNEALHSDLADFRVRYPALVLLQYVDDLLLAAATRTECLEGTKALLETLGNKGYRASAKKAQICLQEVTYLGYSLKDGQRWLTKARKEAILSIPVPKNSRQVREFLGKAGYCRLFIPGFAELAAPLYPLTRPGTLFQWGTEQQLAFEDIKKALLSSPALGLPDITKPFELFIDENSGFAKGVLVQKLGPWKRPVAYLSKKLDTVASGWPPCLRMVAAIAILVKDAGKLTLGQPLTILTSHPVEALVRQPPNKWLSNARMTHYQAMLLDAERVHFGPTVSLNPATLLPLPSGGNHHDCLQILAETHGTRPDLTDQPLPDADLTWYTDGSSFIRNGEREAGAAVTTESEVIWAAPLPPGTSAQRAELIALTQALKMAEGKKLTVYTDSRYAFATTHVHGEIYRRRGWLTSEGKEIKNKNEILALLEALFLPKRLSIIHCPGHQKGDSPQAKGNRLADDTAKKAATETHSSLTVLPAGKRTADGSEFEKRTADGSEFESPKKKAKVE

SEQ ID NO: 1256 - protein, 2093 aa, synthetic construct
MPAAKRVKLDGGDKKYSIGLDIGTNSVGWAVITDEYKVPSKKFKVLGNTDRHSIKKNLIGALLFDSGETAEATRLKRTARRRYTRRKNRICYLQEIFSNEMAKVDDSFFHRLEESFLVEEDKKHERHPIFGNIVDEVAYHEKYPTIYHLRKKLVDSTDKADLRLIYLALAHMIKFRGHFLIEGDLNPDNSDVDKLFIQLVQTYNQLFEENPINASGVDAKAILSARLSKSRRLENLIAQLPGEKKNGLFGNLIALSLGLTPNFKSNFDLAEDAKLQLSKDTYDDDLDNLLAQIGDQYADLFLAAKNLSDAILLSDILRVNTEITKAPLSASMIKRYDEHHQDLTLLKALVRQQLPEKYKEIFFDQSKNGYAGYIDGGASQEEFYKFIKPILEKMDGTEELLVKLNREDLLRKQRTFDNGSIPHQIHLGELHAILRRQEDFYPFLKDNREKIEKILTFRIPYYVGPLARGNSRFAWMTRKSEETITPWNFEEVVDKGASAQSFIERMTNFDKNLPNEKVLPKHSLLYEYFTVYNELTKVKYVTEGMRKPAFLSGEQKKAIVDLLFKTNRKVTVKQLKEDYFKKIECFDSVEISGVEDRFNASLGTYHDLLKIIKDKDFLDNEENEDILEDIVLTLTLFEDREMIEERLKTYAHLFDDKVMKQLKRRRYTGWGRLSRKLINGIRDKQSGKTILDFLKSDGFANRNFMQLIHDDSLTFKEDIQKAQVSGQGDSLHEHIANLAGSPAIKKGILQTVKVVDELVKVMGRHKPENIVIEMARENQTTQKGQKNSRERMKRIEEGIKELGSQILKEHPVENTQLQNEKLYLYYLQNGRDMYVDQELDINRLSDYDVDHIVPQSFLKDDSIDNKVLTRSDKARGKSDNVPSEEVVKKMKNYWRQLLNAKLITQRKFDNLTKAERGGLSELDKAGFIKRQLVETRQITKHVAQILDSRMNTKYDENDKLIREVKVITLKSKLVSDFRKDFQFYKVREINNYHHAHDAYLNAVVGTALIKKYPKLESEFVYGDYKVYDVRKMIAKSEQEIGKATAKYFFYSNIMNFFKTEITLANGEIRKRPLIETNGETGEIVWDKGRDFATVRKVLSMPQVNIVKKTEVQTGGFSKESILPKRNSDKLIARKKDWDPKKYGGFDSPTVAYSVLVVAKVEKGKSKKLKSVKELLGITIMERSSFEKNPIDFLEAKGYKEVKKDLIIKLPKYSLFELENGRKRMLASAGELQKGNELALPSKYVNFLYLASHYEKLKGSPEDNEQKQLFVEQHKHYLDEIIEQISEFSKRVILADANLDKVLSAYNKHRDKPIREQAENIIHLFTLTNLGAPAAFKYFDTTIDRKRYTSTKEVLDATLIHQSITGLYETRIDLSQLGGDGGPAPGGSGGGGGTLQLEEEYRLFEPESTQKQEMDIWLKNFPQAWAETGGMGTAHCQAPVLIQLKATATPISIRQYPMPHEAYQGIKPHIRRMLDQGILKPCQSPWNTPLLPVKKPGTEDYRPVQDLREVNKRVEDIHPTVPNPYNLLSTLPPSHPWYTVLDLKDAFFCLRLHSESQLLFAFEWRDPEIGLSGQLTWTRLPQGFKNSPTLFNEALHSDLADFRVRYPALVLLQYVDDLLLAAATRTECLEGTKALLETLGNKGYRASAKKAQICLQEVTYLGYSLKDGQRWLTKARKEAILSIPVPKNSRQVREFLGKAGYCRLFIPGFAELAAPLYPLTRPGTLFQWGTEQQLAFEDIKKALLSSPALGLPDITKPFELFIDENSGFAKGVLVQKLGPWKRPVAYLSKKLDTVASGWPPCLRMVAAIAILVKDAGKLTLGQPLTILTSHPVEALVRQPPNKWLSNARMTHYQAMLLDAERVHFGPTVSLNPATLLPLPSGGNHHDCLQILAETHGTRPDLTDQPLPDADLTWYTDGSSFIRNGEREAGAAVTTESEVIWAAPLPPGTSAQRAELIALTQALKMAEGKKLTVYTDSRYAFATTHVHGEIYRRRGWLTSEGKEIKNKNEILALLEALFLPKRLSIIHCPGHQKGDSPQAKGNRLADDTAKKAATETHSSLTVLPAGKRTADGSEFEKRTADGSEFESPKKKAKVE

SEQ ID NO: 1257 - protein, 2093 aa, synthetic construct
MPAAKRVKLDGGDKKYSIGLDIGTNSVGWAVITDEYKVPSKKFKVLGNTDRHSIKKNLIGALLFDSGETAEATRLKRTARRRYTRRKNRICYLQEIFSNEMAKVDDSFFHRLEESFLVEEDKKHERHPIFGNIVDEVAYHEKYPTIYHLRKKLVDSTDKADLRLIYLALAHMIKFRGHFLIEGDLNPDNSDVDKLFIQLVQTYNQLFEENPINASGVDAKAILSARLSKSRRLENLIAQLPGEKKNGLFGNLIALSLGLTPNFKSNFDLAEDAKLQLSKDTYDDDLDNLLAQIGDQYADLFLAAKNLSDAILLSDILRVNTEITKAPLSASMIKRYDEHHQDLTLLKALVRQQLPEKYKEIFFDQSKNGYAGYIDGGASQEEFYKFIKPILEKMDGTEELLVKLNREDLLRKQRTFDNGSIPHQIHLGELHAILRRQEDFYPFLKDNREKIEKILTFRIPYYVGPLARGNSRFAWMTRKSEETITPWNFEEVVDKGASAQSFIERMTNFDKNLPNEKVLPKHSLLYEYFTVYNELTKVKYVTEGMRKPAFLSGEQKKAIVDLLFKTNRKVTVKQLKEDYFKKIECFDSVEISGVEDRFNASLGTYHDLLKIIKDKDFLDNEENEDILEDIVLTLTLFEDREMIEERLKTYAHLFDDKVMKQLKRRRYTGWGRLSRKLINGIRDKQSGKTILDFLKSDGFANRNFMQLIHDDSLTFKEDIQKAQVSGQGDSLHEHIANLAGSPAIKKGILQTVKVVDELVKVMGRHKPENIVIEMARENQTTQKGQKNSRERMKRIEEGIKELGSQILKEHPVENTQLQNEKLYLYYLQNGRDMYVDQELDINRLSDYDVDHIVPQSFLKDDSIDNKVLTRSDKARGKSDNVPSEEVVKKMKNYWRQLLNAKLITQRKFDNLTKAERGGLSELDKAGFIKRQLVETRQITKHVAQILDSRMNTKYDENDKLIREVKVITLKSKLVSDFRKDFQFYKVREINNYHHAHDAYLNAVVGTALIKKYPKLESEFVYGDYKVYDVRKMIAKSEQEIGKATAKYFFYSNIMNFFKTEITLANGEIRKRPLIETNGETGEIVWDKGRDFATVRKVLSMPQVNIVKKTEVQTGGFSKESILPKRNSDKLIARKKDWDPKKYGGFDSPTVAYSVLVVAKVEKGKSKKLKSVKELLGITIMERSSFEKNPIDFLEAKGYKEVKKDLIIKLPKYSLFELENGRKRMLASAGELQKGNELALPSKYVNFLYLASHYEKLKGSPEDNEQKQLFVEQHKHYLDEIIEQISEFSKRVILADANLDKVLSAYNKHRDKPIREQAENIIHLFTLTNLGAPAAFKYFDTTIDRKRYTSTKEVLDATLIHQSITGLYETRIDLSQLGGDGGGGSPAPGGGGGTLQLEEEYRLFEPESTQKQEMDIWLKNFPQAWAETGGMGTAHCQAPVLIQLKATATPISIRQYPMPHEAYQGIKPHIRRMLDQGILKPCQSPWNTPLLPVKKPGTEDYRPVQDLREVNKRVEDIHPTVPNPYNLLSTLPPSHPWYTVLDLKDAFFCLRLHSESQLLFAFEWRDPEIGLSGQLTWTRLPQGFKNSPTLFNEALHSDLADFRVRYPALVLLQYVDDLLLAAATRTECLEGTKALLETLGNKGYRASAKKAQICLQEVTYLGYSLKDGQRWLTKARKEAILSIPVPKNSRQVREFLGKAGYCRLFIPGFAELAAPLYPLTRPGTLFQWGTEQQLAFEDIKKALLSSPALGLPDITKPFELFIDENSGFAKGVLVQKLGPWKRPVAYLSKKLDTVASGWPPCLRMVAAIAILVKDAGKLTLGQPLTILTSHPVEALVRQPPNKWLSNARMTHYQAMLLDAERVHFGPTVSLNPATLLPLPSGGNHHDCLQILAETHGTRPDLTDQPLPDADLTWYTDGSSFIRNGEREAGAAVTTESEVIWAAPLPPGTSAQRAELIALTQALKMAEGKKLTVYTDSRYAFATTHVHGEIYRRRGWLTSEGKEIKNKNEILALLEALFLPKRLSIIHCPGHQKGDSPQAKGNRLADDTAKKAATETHSSLTVLPAGKRTADGSEFEKRTADGSEFESPKKKAKVE

SEQ ID NO: 1258 - protein, 2093 aa, synthetic construct
MPAAKRVKLDGGDKKYSIGLDIGTNSVGWAVITDEYKVPSKKFKVLGNTDRHSIKKNLIGALLFDSGETAEATRLKRTARRRYTRRKNRICYLQEIFSNEMAKVDDSFFHRLEESFLVEEDKKHERHPIFGNIVDEVAYHEKYPTIYHLRKKLVDSTDKADLRLIYLALAHMIKFRGHFLIEGDLNPDNSDVDKLFIQLVQTYNQLFEENPINASGVDAKAILSARLSKSRRLENLIAQLPGEKKNGLFGNLIALSLGLTPNFKSNFDLAEDAKLQLSKDTYDDDLDNLLAQIGDQYADLFLAAKNLSDAILLSDILRVNTEITKAPLSASMIKRYDEHHQDLTLLKALVRQQLPEKYKEIFFDQSKNGYAGYIDGGASQEEFYKFIKPILEKMDGTEELLVKLNREDLLRKQRTFDNGSIPHQIHLGELHAILRRQEDFYPFLKDNREKIEKILTFRIPYYVGPLARGNSRFAWMTRKSEETITPWNFEEVVDKGASAQSFIERMTNFDKNLPNEKVLPKHSLLYEYFTVYNELTKVKYVTEGMRKPAFLSGEQKKAIVDLLFKTNRKVTVKQLKEDYFKKIECFDSVEISGVEDRFNASLGTYHDLLKIIKDKDFLDNEENEDILEDIVLTLTLFEDREMIEERLKTYAHLFDDKVMKQLKRRRYTGWGRLSRKLINGIRDKQSGKTILDFLKSDGFANRNFMQLIHDDSLTFKEDIQKAQVSGQGDSLHEHIANLAGSPAIKKGILQTVKVVDELVKVMGRHKPENIVIEMARENQTTQKGQKNSRERMKRIEEGIKELGSQILKEHPVENTQLQNEKLYLYYLQNGRDMYVDQELDINRLSDYDVDHIVPQSFLKDDSIDNKVLTRSDKARGKSDNVPSEEVVKKMKNYWRQLLNAKLITQRKFDNLTKAERGGLSELDKAGFIKRQLVETRQITKHVAQILDSRMNTKYDENDKLIREVKVITLKSKLVSDFRKDFQFYKVREINNYHHAHDAYLNAVVGTALIKKYPKLESEFVYGDYKVYDVRKMIAKSEQEIGKATAKYFFYSNIMNFFKTEITLANGEIRKRPLIETNGETGEIVWDKGRDFATVRKVLSMPQVNIVKKTEVQTGGFSKESILPKRNSDKLIARKKDWDPKKYGGFDSPTVAYSVLVVAKVEKGKSKKLKSVKELLGITIMERSSFEKNPIDFLEAKGYKEVKKDLIIKLPKYSLFELENGRKRMLASAGELQKGNELALPSKYVNFLYLASHYEKLKGSPEDNEQKQLFVEQHKHYLDEIIEQISEFSKRVILADANLDKVLSAYNKHRDKPIREQAENIIHLFTLTNLGAPAAFKYFDTTIDRKRYTSTKEVLDATLIHQSITGLYETRIDLSQLGGDGGGSSGGGGGSGGTLQLEEEYRLFEPESTQKQEMDIWLKNFPQAWAETGGMGTAHCQAPVLIQLKATATPISIRQYPMPHEAYQGIKPHIRRMLDQGILKPCQSPWNTPLLPVKKPGTEDYRPVQDLREVNKRVEDIHPTVPNPYNLLSTLPPSHPWYTVLDLKDAFFCLRLHSESQLLFAFEWRDPEIGLSGQLTWTRLPQGFKNSPTLFNEALHSDLADFRVRYPALVLLQYVDDLLLAAATRTECLEGTKALLETLGNKGYRASAKKAQICLQEVTYLGYSLKDGQRWLTKARKEAILSIPVPKNSRQVREFLGKAGYCRLFIPGFAELAAPLYPLTRPGTLFQWGTEQQLAFEDIKKALLSSPALGLPDITKPFELFIDENSGFAKGVLVQKLGPWKRPVAYLSKKLDTVASGWPPCLRMVAAIAILVKDAGKLTLGQPLTILTSHPVEALVRQPPNKWLSNARMTHYQAMLLDAERVHFGPTVSLNPATLLPLPSGGNHHDCLQILAETHGTRPDLTDQPLPDADLTWYTDGSSFIRNGEREAGAAVTTESEVIWAAPLPPGTSAQRAELIALTQALKMAEGKKLTVYTDSRYAFATTHVHGEIYRRRGWLTSEGKEIKNKNEILALLEALFLPKRLSIIHCPGHQKGDSPQAKGNRLADDTAKKAATETHSSLTVLPAGKRTADGSEFEKRTADGSEFESPKKKAKVE

SEQ ID NO: 1259 - protein, 2095 aa, synthetic construct
MPAAKRVKLDGGDKKYSIGLDIGTNSVGWAVITDEYKVPSKKFKVLGNTDRHSIKKNLIGALLFDSGETAEATRLKRTARRRYTRRKNRICYLQEIFSNEMAKVDDSFFHRLEESFLVEEDKKHERHPIFGNIVDEVAYHEKYPTIYHLRKKLVDSTDKADLRLIYLALAHMIKFRGHFLIEGDLNPDNSDVDKLFIQLVQTYNQLFEENPINASGVDAKAILSARLSKSRRLENLIAQLPGEKKNGLFGNLIALSLGLTPNFKSNFDLAEDAKLQLSKDTYDDDLDNLLAQIGDQYADLFLAAKNLSDAILLSDILRVNTEITKAPLSASMIKRYDEHHQDLTLLKALVRQQLPEKYKEIFFDQSKNGYAGYIDGGASQEEFYKFIKPILEKMDGTEELLVKLNREDLLRKQRTFDNGSIPHQIHLGELHAILRRQEDFYPFLKDNREKIEKILTFRIPYYVGPLARGNSRFAWMTRKSEETITPWNFEEVVDKGASAQSFIERMTNFDKNLPNEKVLPKHSLLYEYFTVYNELTKVKYVTEGMRKPAFLSGEQKKAIVDLLFKTNRKVTVKQLKEDYFKKIECFDSVEISGVEDRFNASLGTYHDLLKIIKDKDFLDNEENEDILEDIVLTLTLFEDREMIEERLKTYAHLFDDKVMKQLKRRRYTGWGRLSRKLINGIRDKQSGKTILDFLKSDGFANRNFMQLIHDDSLTFKEDIQKAQVSGQGDSLHEHIANLAGSPAIKKGILQTVKVVDELVKVMGRHKPENIVIEMARENQTTQKGQKNSRERMKRIEEGIKELGSQILKEHPVENTQLQNEKLYLYYLQNGRDMYVDQELDINRLSDYDVDHIVPQSFLKDDSIDNKVLTRSDKARGKSDNVPSEEVVKKMKNYWRQLLNAKLITQRKFDNLTKAERGGLSELDKAGFIKRQLVETRQITKHVAQILDSRMNTKYDENDKLIREVKVITLKSKLVSDFRKDFQFYKVREINNYHHAHDAYLNAVVGTALIKKYPKLESEFVYGDYKVYDVRKMIAKSEQEIGKATAKYFFYSNIMNFFKTEITLANGEIRKRPLIETNGETGEIVWDKGRDFATVRKVLSMPQVNIVKKTEVQTGGFSKESILPKRNSDKLIARKKDWDPKKYGGFDSPTVAYSVLVVAKVEKGKSKKLKSVKELLGITIMERSSFEKNPIDFLEAKGYKEVKKDLIIKLPKYSLFELENGRKRMLASAGELQKGNELALPSKYVNFLYLASHYEKLKGSPEDNEQKQLFVEQHKHYLDEIIEQISEFSKRVILADANLDKVLSAYNKHRDKPIREQAENIIHLFTLTNLGAPAAFKYFDTTIDRKRYTSTKEVLDATLIHQSITGLYETRIDLSQLGGDGGGGGEAAAKGGSGGTLQLEEEYRLFEPESTQKQEMDIWLKNFPQAWAETGGMGTAHCQAPVLIQLKATATPISIRQYPMPHEAYQGIKPHIRRMLDQGILKPCQSPWNTPLLPVKKPGTEDYRPVQDLREVNKRVEDIHPTVPNPYNLLSTLPPSHPWYTVLDLKDAFFCLRLHSESQLLFAFEWRDPEIGLSGQLTWTRLPQGFKNSPTLFNEALHSDLADFRVRYPALVLLQYVDDLLLAAATRTECLEGTKALLETLGNKGYRASAKKAQICLQEVTYLGYSLKDGQRWLTKARKEAILSIPVPKNSRQVREFLGKAGYCRLFIPGFAELAAPLYPLTRPGTLFQWGTEQQLAFEDIKKALLSSPALGLPDITKPFELFIDENSGFAKGVLVQKLGPWKRPVAYLSKKLDTVASGWPPCLRMVAAIAILVKDAGKLTLGQPLTILTSHPVEALVRQPPNKWLSNARMTHYQAMLLDAERVHFGPTVSLNPATLLPLPSGGNHHDCLQILAETHGTRPDLTDQPLPDADLTWYTDGSSFIRNGEREAGAAVTTESEVIWAAPLPPGTSAQRAELIALTQALKMAEGKKLTVYTDSRYAFATTHVHGEIYRRRGWLTSEGKEIKNKNEILALLEALFLPKRLSIIHCPGHQKGDSPQAKGNRLADDTAKKAATETHSSLTVLPAGKRTADGSEFEKRTADGSEFESPKKKAKVE

SEQ ID NO: 1260 - protein, 2089 aa, synthetic construct
MPAAKRVKLDGGDKKYSIGLDIGTNSVGWAVITDEYKVPSKKFKVLGNTDRHSIKKNLIGALLFDSGETAEATRLKRTARRRYTRRKNRICYLQEIFSNEMAKVDDSFFHRLEESFLVEEDKKHERHPIFGNIVDEVAYHEKYPTIYHLRKKLVDSTDKADLRLIYLALAHMIKFRGHFLIEGDLNPDNSDVDKLFIQLVQTYNQLFEENPINASGVDAKAILSARLSKSRRLENLIAQLPGEKKNGLFGNLIALSLGLTPNFKSNFDLAEDAKLQLSKDTYDDDLDNLLAQIGDQYADLFLAAKNLSDAILLSDILRVNTEITKAPLSASMIKRYDEHHQDLTLLKALVRQQLPEKYKEIFFDQSKNGYAGYIDGGASQEEFYKFIKPILEKMDGTEELLVKLNREDLLRKQRTFDNGSIPHQIHLGELHAILRRQEDFYPFLKDNREKIEKILTFRIPYYVGPLARGNSRFAWMTRKSEETITPWNFEEVVDKGASAQSFIERMTNFDKNLPNEKVLPKHSLLYEYFTVYNELTKVKYVTEGMRKPAFLSGEQKKAIVDLLFKTNRKVTVKQLKEDYFKKIECFDSVEISGVEDRFNASLGTYHDLLKIIKDKDFLDNEENEDILEDIVLTLTLFEDREMIEERLKTYAHLFDDKVMKQLKRRRYTGWGRLSRKLINGIRDKQSGKTILDFLKSDGFANRNFMQLIHDDSLTFKEDIQKAQVSGQGDSLHEHIANLAGSPAIKKGILQTVKVVDELVKVMGRHKPENIVIEMARENQTTQKGQKNSRERMKRIEEGIKELGSQILKEHPVENTQLQNEKLYLYYLQNGRDMYVDQELDINRLSDYDVDHIVPQSFLKDDSIDNKVLTRSDKARGKSDNVPSEEVVKKMKNYWRQLLNAKLITQRKFDNLTKAERGGLSELDKAGFIKRQLVETRQITKHVAQILDSRMNTKYDENDKLIREVKVITLKSKLVSDFRKDFQFYKVREINNYHHAHDAYLNAVVGTALIKKYPKLESEFVYGDYKVYDVRKMIAKSEQEIGKATAKYFFYSNIMNFFKTEITLANGEIRKRPLIETNGETGEIVWDKGRDFATVRKVLSMPQVNIVKKTEVQTGGFSKESILPKRNSDKLIARKKDWDPKKYGGFDSPTVAYSVLVVAKVEKGKSKKLKSVKELLGITIMERSSFEKNPIDFLEAKGYKEVKKDLIIKLPKYSLFELENGRKRMLASAGELQKGNELALPSKYVNFLYLASHYEKLKGSPEDNEQKQLFVEQHKHYLDEIIEQISEFSKRVILADANLDKVLSAYNKHRDKPIREQAENIIHLFTLTNLGAPAAFKYFDTTIDRKRYTSTKEVLDATLIHQSITGLYETRIDLSQLGGDGGEAAAKGGTLQLEEEYRLFEPESTQKQEMDIWLKNFPQAWAETGGMGTAHCQAPVLIQLKATATPISIRQYPMPHEAYQGIKPHIRRMLDQGILKPCQSPWNTPLLPVKKPGTEDYRPVQDLREVNKRVEDIHPTVPNPYNLLSTLPPSHPWYTVLDLKDAFFCLRLHSESQLLFAFEWRDPEIGLSGQLTWTRLPQGFKNSPTLFNEALHSDLADFRVRYPALVLLQYVDDLLLAAATRTECLEGTKALLETLGNKGYRASAKKAQICLQEVTYLGYSLKDGQRWLTKARKEAILSIPVPKNSRQVREFLGKAGYCRLFIPGFAELAAPLYPLTRPGTLFQWGTEQQLAFEDIKKALLSSPALGLPDITKPFELFIDENSGFAKGVLVQKLGPWKRPVAYLSKKLDTVASGWPPCLRMVAAIAILVKDAGKLTLGQPLTILTSHPVEALVRQPPNKWLSNARMTHYQAMLLDAERVHFGPTVSLNPATLLPLPSGGNHHDCLQILAETHGTRPDLTDQPLPDADLTWYTDGSSFIRNGEREAGAAVTTESEVIWAAPLPPGTSAQRAELIALTQALKMAEGKKLTVYTDSRYAFATTHVHGEIYRRRGWLTSEGKEIKNKNEILALLEALFLPKRLSIIHCPGHQKGDSPQAKGNRLADDTAKKAATETHSSLTVLPAGKRTADGSEFEKRTADGSEFESPKKKAKVE

SEQ ID NO: 1261 - protein, 2095 aa, synthetic construct
MPAAKRVKLDGGDKKYSIGLDIGTNSVGWAVITDEYKVPSKKFKVLGNTDRHSIKKNLIGALLFDSGETAEATRLKRTARRRYTRRKNRICYLQEIFSNEMAKVDDSFFHRLEESFLVEEDKKHERHPIFGNIVDEVAYHEKYPTIYHLRKKLVDSTDKADLRLIYLALAHMIKFRGHFLIEGDLNPDNSDVDKLFIQLVQTYNQLFEENPINASGVDAKAILSARLSKSRRLENLIAQLPGEKKNGLFGNLIALSLGLTPNFKSNFDLAEDAKLQLSKDTYDDDLDNLLAQIGDQYADLFLAAKNLSDAILLSDILRVNTEITKAPLSASMIKRYDEHHQDLTLLKALVRQQLPEKYKEIFFDQSKNGYAGYIDGGASQEEFYKFIKPILEKMDGTEELLVKLNREDLLRKQRTFDNGSIPHQIHLGELHAILRRQEDFYPFLKDNREKIEKILTFRIPYYVGPLARGNSRFAWMTRKSEETITPWNFEEVVDKGASAQSFIERMTNFDKNLPNEKVLPKHSLLYEYFTVYNELTKVKYVTEGMRKPAFLSGEQKKAIVDLLFKTNRKVTVKQLKEDYFKKIECFDSVEISGVEDRFNASLGTYHDLLKIIKDKDFLDNEENEDILEDIVLTLTLFEDREMIEERLKTYAHLFDDKVMKQLKRRRYTGWGRLSRKLINGIRDKQSGKTILDFLKSDGFANRNFMQLIHDDSLTFKEDIQKAQVSGQGDSLHEHIANLAGSPAIKKGILQTVKVVDELVKVMGRHKPENIVIEMARENQTTQKGQKNSRERMKRIEEGIKELGSQILKEHPVENTQLQNEKLYLYYLQNGRDMYVDQELDINRLSDYDVDHIVPQSFLKDDSIDNKVLTRSDKARGKSDNVPSEEVVKKMKNYWRQLLNAKLITQRKFDNLTKAERGGLSELDKAGFIKRQLVETRQITKHVAQILDSRMNTKYDENDKLIREVKVITLKSKLVSDFRKDFQFYKVREINNYHHAHDAYLNAVVGTALIKKYPKLESEFVYGDYKVYDVRKMIAKSEQEIGKATAKYFFYSNIMNFFKTEITLANGEIRKRPLIETNGETGEIVWDKGRDFATVRKVLSMPQVNIVKKTEVQTGGFSKESILPKRNSDKLIARKKDWDPKKYGGFDSPTVAYSVLVVAKVEKGKSKKLKSVKELLGITIMERSSFEKNPIDFLEAKGYKEVKKDLIIKLPKYSLFELENGRKRMLASAGELQKGNELALPSKYVNFLYLASHYEKLKGSPEDNEQKQLFVEQHKHYLDEIIEQISEFSKRVILADANLDKVLSAYNKHRDKPIREQAENIIHLFTLTNLGAPAAFKYFDTTIDRKRYTSTKEVLDATLIHQSITGLYETRIDLSQLGGDGGGGGGSSEAAAKGGTLQLEEEYRLFEPESTQKQEMDIWLKNFPQAWAETGGMGTAHCQAPVLIQLKATATPISIRQYPMPHEAYQGIKPHIRRMLDQGILKPCQSPWNTPLLPVKKPGTEDYRPVQDLREVNKRVEDIHPTVPNPYNLLSTLPPSHPWYTVLDLKDAFFCLRLHSESQLLFAFEWRDPEIGLSGQLTWTRLPQGFKNSPTLFNEALHSDLADFRVRYPALVLLQYVDDLLLAAATRTECLEGTKALLETLGNKGYRASAKKAQICLQEVTYLGYSLKDGQRWLTKARKEAILSIPVPKNSRQVREFLGKAGYCRLFIPGFAELAAPLYPLTRPGTLFQWGTEQQLAFEDIKKALLSSPALGLPDITKPFELFIDENSGFAKGVLVQKLGPWKRPVAYLSKKLDTVASGWPPCLRMVAAIAILVKDAGKLTLGQPLTILTSHPVEALVRQPPNKWLSNARMTHYQAMLLDAERVHFGPTVSLNPATLLPLPSGGNHHDCLQILAETHGTRPDLTDQPLPDADLTWYTDGSSFIRNGEREAGAAVTTESEVIWAAPLPPGTSAQRAELIALTQALKMAEGKKLTVYTDSRYAFATTHVHGEIYRRRGWLTSEGKEIKNKNEILALLEALFLPKRLSIIHCPGHQKGDSPQAKGNRLADDTAKKAATETHSSLTVLPAGKRTADGSEFEKRTADGSEFESPKKKAKVE

SEQ ID NO: 1262 - protein, 2095 aa, synthetic construct
MPAAKRVKLDGGDKKYSIGLDIGTNSVGWAVITDEYKVPSKKFKVLGNTDRHSIKKNLIGALLFDSGETAEATRLKRTARRRYTRRKNRICYLQEIFSNEMAKVDDSFFHRLEESFLVEEDKKHERHPIFGNIVDEVAYHEKYPTIYHLRKKLVDSTDKADLRLIYLALAHMIKFRGHFLIEGDLNPDNSDVDKLFIQLVQTYNQLFEENPINASGVDAKAILSARLSKSRRLENLIAQLPGEKKNGLFGNLIALSLGLTPNFKSNFDLAEDAKLQLSKDTYDDDLDNLLAQIGDQYADLFLAAKNLSDAILLSDILRVNTEITKAPLSASMIKRYDEHHQDLTLLKALVRQQLPEKYKEIFFDQSKNGYAGYIDGGASQEEFYKFIKPILEKMDGTEELLVKLNREDLLRKQRTFDNGSIPHQIHLGELHAILRRQEDFYPFLKDNREKIEKILTFRIPYYVGPLARGNSRFAWMTRKSEETITPWNFEEVVDKGASAQSFIERMTNFDKNLPNEKVLPKHSLLYEYFTVYNELTKVKYVTEGMRKPAFLSGEQKKAIVDLLFKTNRKVTVKQLKEDYFKKIECFDSVEISGVEDRFNASLGTYHDLLKIIKDKDFLDNEENEDILEDIVLTLTLFEDREMIEERLKTYAHLFDDKVMKQLKRRRYTGWGRLSRKLINGIRDKQSGKTILDFLKSDGFANRNFMQLIHDDSLTFKEDIQKAQVSGQGDSLHEHIANLAGSPAIKKGILQTVKVVDELVKVMGRHKPENIVIEMARENQTTQKGQKNSRERMKRIEEGIKELGSQILKEHPVENTQLQNEKLYLYYLQNGRDMYVDQELDINRLSDYDVDHIVPQSFLKDDSIDNKVLTRSDKARGKSDNVPSEEVVKKMKNYWRQLLNAKLITQRKFDNLTKAERGGLSELDKAGFIKRQLVETRQITKHVAQILDSRMNTKYDENDKLIREVKVITLKSKLVSDFRKDFQFYKVREINNYHHAHDAYLNAVVGTALIKKYPKLESEFVYGDYKVYDVRKMIAKSEQEIGKATAKYFFYSNIMNFFKTEITLANGEIRKRPLIETNGETGEIVWDKGRDFATVRKVLSMPQVNIVKKTEVQTGGFSKESILPKRNSDKLIARKKDWDPKKYGGFDSPTVAYSVLVVAKVEKGKSKKLKSVKELLGITIMERSSFEKNPIDFLEAKGYKEVKKDLIIKLPKYSLFELENGRKRMLASAGELQKGNELALPSKYVNFLYLASHYEKLKGSPEDNEQKQLFVEQHKHYLDEIIEQISEFSKRVILADANLDKVLSAYNKHRDKPIREQAENIIHLFTLTNLGAPAAFKYFDTTIDRKRYTSTKEVLDATLIHQSITGLYETRIDLSQLGGDGGGGGEAAAKPAPGGTLQLEEEYRLFEPESTQKQEMDIWLKNFPQAWAETGGMGTAHCQAPVLIQLKATATPISIRQYPMPHEAYQGIKPHIRRMLDQGILKPCQSPWNTPLLPVKKPGTEDYRPVQDLREVNKRVEDIHPTVPNPYNLLSTLPPSHPWYTVLDLKDAFFCLRLHSESQLLFAFEWRDPEIGLSGQLTWTRLPQGFKNSPTLFNEALHSDLADFRVRYPALVLLQYVDDLLLAAATRTECLEGTKALLETLGNKGYRASAKKAQICLQEVTYLGYSLKDGQRWLTKARKEAILSIPVPKNSRQVREFLGKAGYCRLFIPGFAELAAPLYPLTRPGTLFQWGTEQQLAFEDIKKALLSSPALGLPDITKPFELFIDENSGFAKGVLVQKLGPWKRPVAYLSKKLDTVASGWPPCLRMVAAIAILVKDAGKLTLGQPLTILTSHPVEALVRQPPNKWLSNARMTHYQAMLLDAERVHFGPTVSLNPATLLPLPSGGNHHDCLQILAETHGTRPDLTDQPLPDADLTWYTDGSSFIRNGEREAGAAVTTESEVIWAAPLPPGTSAQRAELIALTQALKMAEGKKLTVYTDSRYAFATTHVHGEIYRRRGWLTSEGKEIKNKNEILALLEALFLPKRLSIIHCPGHQKGDSPQAKGNRLADDTAKKAATETHSSLTVLPAGKRTADGSEFEKRTADGSEFESPKKKAKVE

SEQ ID NO: 1263 - protein, 2093 aa, synthetic construct
MPAAKRVKLDGGDKKYSIGLDIGTNSVGWAVITDEYKVPSKKFKVLGNTDRHSIKKNLIGALLFDSGETAEATRLKRTARRRYTRRKNRICYLQEIFSNEMAKVDDSFFHRLEESFLVEEDKKHERHPIFGNIVDEVAYHEKYPTIYHLRKKLVDSTDKADLRLIYLALAHMIKFRGHFLIEGDLNPDNSDVDKLFIQLVQTYNQLFEENPINASGVDAKAILSARLSKSRRLENLIAQLPGEKKNGLFGNLIALSLGLTPNFKSNFDLAEDAKLQLSKDTYDDDLDNLLAQIGDQYADLFLAAKNLSDAILLSDILRVNTEITKAPLSASMIKRYDEHHQDLTLLKALVRQQLPEKYKEIFFDQSKNGYAGYIDGGASQEEFYKFIKPILEKMDGTEELLVKLNREDLLRKQRTFDNGSIPHQIHLGELHAILRRQEDFYPFLKDNREKIEKILTFRIPYYVGPLARGNSRFAWMTRKSEETITPWNFEEVVDKGASAQSFIERMTNFDKNLPNEKVLPKHSLLYEYFTVYNELTKVKYVTEGMRKPAFLSGEQKKAIVDLLFKTNRKVTVKQLKEDYFKKIECFDSVEISGVEDRFNASLGTYHDLLKIIKDKDFLDNEENEDILEDIVLTLTLFEDREMIEERLKTYAHLFDDKVMKQLKRRRYTGWGRLSRKLINGIRDKQSGKTILDFLKSDGFANRNFMQLIHDDSLTFKEDIQKAQVSGQGDSLHEHIANLAGSPAIKKGILQTVKVVDELVKVMGRHKPENIVIEMARENQTTQKGQKNSRERMKRIEEGIKELGSQILKEHPVENTQLQNEKLYLYYLQNGRDMYVDQELDINRLSDYDVDHIVPQSFLKDDSIDNKVLTRSDKARGKSDNVPSEEVVKKMKNYWRQLLNAKLITQRKFDNLTKAERGGLSELDKAGFIKRQLVETRQITKHVAQILDSRMNTKYDENDKLIREVKVITLKSKLVSDFRKDFQFYKVREINNYHHAHDAYLNAVVGTALIKKYPKLESEFVYGDYKVYDVRKMIAKSEQEIGKATAKYFFYSNIMNFFKTEITLANGEIRKRPLIETNGETGEIVWDKGRDFATVRKVLSMPQVNIVKKTEVQTGGFSKESILPKRNSDKLIARKKDWDPKKYGGFDSPTVAYSVLVVAKVEKGKSKKLKSVKELLGITIMERSSFEKNPIDFLEAKGYKEVKKDLIIKLPKYSLFELENGRKRMLASAGELQKGNELALPSKYVNFLYLASHYEKLKGSPEDNEQKQLFVEQHKHYLDEIIEQISEFSKRVILADANLDKVLSAYNKHRDKPIREQAENIIHLFTLTNLGAPAAFKYFDTTIDRKRYTSTKEVLDATLIHQSITGLYETRIDLSQLGGDGGGGSPAPGSSGGTLQLEEEYRLFEPESTQKQEMDIWLKNFPQAWAETGGMGTAHCQAPVLIQLKATATPISIRQYPMPHEAYQGIKPHIRRMLDQGILKPCQSPWNTPLLPVKKPGTEDYRPVQDLREVNKRVEDIHPTVPNPYNLLSTLPPSHPWYTVLDLKDAFFCLRLHSESQLLFAFEWRDPEIGLSGQLTWTRLPQGFKNSPTLFNEALHSDLADFRVRYPALVLLQYVDDLLLAAATRTECLEGTKALLETLGNKGYRASAKKAQICLQEVTYLGYSLKDGQRWLTKARKEAILSIPVPKNSRQVREFLGKAGYCRLFIPGFAELAAPLYPLTRPGTLFQWGTEQQLAFEDIKKALLSSPALGLPDITKPFELFIDENSGFAKGVLVQKLGPWKRPVAYLSKKLDTVASGWPPCLRMVAAIAILVKDAGKLTLGQPLTILTSHPVEALVRQPPNKWLSNARMTHYQAMLLDAERVHFGPTVSLNPATLLPLPSGGNHHDCLQILAETHGTRPDLTDQPLPDADLTWYTDGSSFIRNGEREAGAAVTTESEVIWAAPLPPGTSAQRAELIALTQALKMAEGKKLTVYTDSRYAFATTHVHGEIYRRRGWLTSEGKEIKNKNEILALLEALFLPKRLSIIHCPGHQKGDSPQAKGNRLADDTAKKAATETHSSLTVLPAGKRTADGSEFEKRTADGSEFESPKKKAKVE

SEQ ID NO: 1264 - protein, 2095 aa, synthetic construct
MPAAKRVKLDGGDKKYSIGLDIGTNSVGWAVITDEYKVPSKKFKVLGNTDRHSIKKNLIGALLFDSGETAEATRLKRTARRRYTRRKNRICYLQEIFSNEMAKVDDSFFHRLEESFLVEEDKKHERHPIFGNIVDEVAYHEKYPTIYHLRKKLVDSTDKADLRLIYLALAHMIKFRGHFLIEGDLNPDNSDVDKLFIQLVQTYNQLFEENPINASGVDAKAILSARLSKSRRLENLIAQLPGEKKNGLFGNLIALSLGLTPNFKSNFDLAEDAKLQLSKDTYDDDLDNLLAQIGDQYADLFLAAKNLSDAILLSDILRVNTEITKAPLSASMIKRYDEHHQDLTLLKALVRQQLPEKYKEIFFDQSKNGYAGYIDGGASQEEFYKFIKPILEKMDGTEELLVKLNREDLLRKQRTFDNGSIPHQIHLGELHAILRRQEDFYPFLKDNREKIEKILTFRIPYYVGPLARGNSRFAWMTRKSEETITPWNFEEVVDKGASAQSFIERMTNFDKNLPNEKVLPKHSLLYEYFTVYNELTKVKYVTEGMRKPAFLSGEQKKAIVDLLFKTNRKVTVKQLKEDYFKKIECFDSVEISGVEDRFNASLGTYHDLLKIIKDKDFLDNEENEDILEDIVLTLTLFEDREMIEERLKTYAHLFDDKVMKQLKRRRYTGWGRLSRKLINGIRDKQSGKTILDFLKSDGFANRNFMQLIHDDSLTFKEDIQKAQVSGQGDSLHEHIANLAGSPAIKKGILQTVKVVDELVKVMGRHKPENIVIEMARENQTTQKGQKNSRERMKRIEEGIKELGSQILKEHPVENTQLQNEKLYLYYLQNGRDMYVDQELDINRLSDYDVDHIVPQSFLKDDSIDNKVLTRSDKARGKSDNVPSEEVVKKMKNYWRQLLNAKLITQRKFDNLTKAERGGLSELDKAGFIKRQLVETRQITKHVAQILDSRMNTKYDENDKLIREVKVITLKSKLVSDFRKDFQFYKVREINNYHHAHDAYLNAVVGTALIKKYPKLESEFVYGDYKVYDVRKMIAKSEQEIGKATAKYFFYSNIMNFFKTEITLANGEIRKRPLIETNGETGEIVWDKGRDFATVRKVLSMPQVNIVKKTEVQTGGFSKESILPKRNSDKLIARKKDWDPKKYGGFDSPTVAYSVLVVAKVEKGKSKKLKSVKELLGITIMERSSFEKNPIDFLEAKGYKEVKKDLIIKLPKYSLFELENGRKRMLASAGELQKGNELALPSKYVNFLYLASHYEKLKGSPEDNEQKQLFVEQHKHYLDEIIEQISEFSKRVILADANLDKVLSAYNKHRDKPIREQAENIIHLFTLTNLGAPAAFKYFDTTIDRKRYTSTKEVLDATLIHQSITGLYETRIDLSQLGGDGGPAPEAAAKGGSGGTLQLEEEYRLFEPESTQKQEMDIWLKNFPQAWAETGGMGTAHCQAPVLIQLKATATPISIRQYPMPHEAYQGIKPHIRRMLDQGILKPCQSPWNTPLLPVKKPGTEDYRPVQDLREVNKRVEDIHPTVPNPYNLLSTLPPSHPWYTVLDLKDAFFCLRLHSESQLLFAFEWRDPEIGLSGQLTWTRLPQGFKNSPTLFNEALHSDLADFRVRYPALVLLQYVDDLLLAAATRTECLEGTKALLETLGNKGYRASAKKAQICLQEVTYLGYSLKDGQRWLTKARKEAILSIPVPKNSRQVREFLGKAGYCRLFIPGFAELAAPLYPLTRPGTLFQWGTEQQLAFEDIKKALLSSPALGLPDITKPFELFIDENSGFAKGVLVQKLGPWKRPVAYLSKKLDTVASGWPPCLRMVAAIAILVKDAGKLTLGQPLTILTSHPVEALVRQPPNKWLSNARMTHYQAMLLDAERVHFGPTVSLNPATLLPLPSGGNHHDCLQILAETHGTRPDLTDQPLPDADLTWYTDGSSFIRNGEREAGAAVTTESEVIWAAPLPPGTSAQRAELIALTQALKMAEGKKLTVYTDSRYAFATTHVHGEIYRRRGWLTSEGKEIKNKNEILALLEALFLPKRLSIIHCPGHQKGDSPQAKGNRLADDTAKKAATETHSSLTVLPAGKRTADGSEFEKRTADGSEFESPKKKAKVE

SEQ ID NO: 1265 - protein, 2095 aa, synthetic construct
MPAAKRVKLDGGDKKYSIGLDIGTNSVGWAVITDEYKVPSKKFKVLGNTDRHSIKKNLIGALLFDSGETAEATRLKRTARRRYTRRKNRICYLQEIFSNEMAKVDDSFFHRLEESFLVEEDKKHERHPIFGNIVDEVAYHEKYPTIYHLRKKLVDSTDKADLRLIYLALAHMIKFRGHFLIEGDLNPDNSDVDKLFIQLVQTYNQLFEENPINASGVDAKAILSARLSKSRRLENLIAQLPGEKKNGLFGNLIALSLGLTPNFKSNFDLAEDAKLQLSKDTYDDDLDNLLAQIGDQYADLFLAAKNLSDAILLSDILRVNTEITKAPLSASMIKRYDEHHQDLTLLKALVRQQLPEKYKEIFFDQSKNGYAGYIDGGASQEEFYKFIKPILEKMDGTEELLVKLNREDLLRKQRTFDNGSIPHQIHLGELHAILRRQEDFYPFLKDNREKIEKILTFRIPYYVGPLARGNSRFAWMTRKSEETITPWNFEEVVDKGASAQSFIERMTNFDKNLPNEKVLPKHSLLYEYFTVYNELTKVKYVTEGMRKPAFLSGEQKKAIVDLLFKTNRKVTVKQLKEDYFKKIECFDSVEISGVEDRFNASLGTYHDLLKIIKDKDFLDNEENEDILEDIVLTLTLFEDREMIEERLKTYAHLFDDKVMKQLKRRRYTGWGRLSRKLINGIRDKQSGKTILDFLKSDGFANRNFMQLIHDDSLTFKEDIQKAQVSGQGDSLHEHIANLAGSPAIKKGILQTVKVVDELVKVMGRHKPENIVIEMARENQTTQKGQKNSRERMKRIEEGIKELGSQILKEHPVENTQLQNEKLYLYYLQNGRDMYVDQELDINRLSDYDVDHIVPQSFLKDDSIDNKVLTRSDKARGKSDNVPSEEVVKKMKNYWRQLLNAKLITQRKFDNLTKAERGGLSELDKAGFIKRQLVETRQITKHVAQILDSRMNTKYDENDKLIREVKVITLKSKLVSDFRKDFQFYKVREINNYHHAHDAYLNAVVGTALIKKYPKLESEFVYGDYKVYDVRKMIAKSEQEIGKATAKYFFYSNIMNFFKTEITLANGEIRKRPLIETNGETGEIVWDKGRDFATVRKVLSMPQVNIVKKTEVQTGGFSKESILPKRNSDKLIARKKDWDPKKYGGFDSPTVAYSVLVVAKVEKGKSKKLKSVKELLGITIMERSSFEKNPIDFLEAKGYKEVKKDLIIKLPKYSLFELENGRKRMLASAGELQKGNELALPSKYVNFLYLASHYEKLKGSPEDNEQKQLFVEQHKHYLDEIIEQISEFSKRVILADANLDKVLSAYNKHRDKPIREQAENIIHLFTLTNLGAPAAFKYFDTTIDRKRYTSTKEVLDATLIHQSITGLYETRIDLSQLGGDGGGSSEAAAKGGSGGTLQLEEEYRLFEPESTQKQEMDIWLKNFPQAWAETGGMGTAHCQAPVLIQLKATATPISIRQYPMPHEAYQGIKPHIRRMLDQGILKPCQSPWNTPLLPVKKPGTEDYRPVQDLREVNKRVEDIHPTVPNPYNLLSTLPPSHPWYTVLDLKDAFFCLRLHSESQLLFAFEWRDPEIGLSGQLTWTRLPQGFKNSPTLFNEALHSDLADFRVRYPALVLLQYVDDLLLAAATRTECLEGTKALLETLGNKGYRASAKKAQICLQEVTYLGYSLKDGQRWLTKARKEAILSIPVPKNSRQVREFLGKAGYCRLFIPGFAELAAPLYPLTRPGTLFQWGTEQQLAFEDIKKALLSSPALGLPDITKPFELFIDENSGFAKGVLVQKLGPWKRPVAYLSKKLDTVASGWPPCLRMVAAIAILVKDAGKLTLGQPLTILTSHPVEALVRQPPNKWLSNARMTHYQAMLLDAERVHFGPTVSLNPATLLPLPSGGNHHDCLQILAETHGTRPDLTDQPLPDADLTWYTDGSSFIRNGEREAGAAVTTESEVIWAAPLPPGTSAQRAELIALTQALKMAEGKKLTVYTDSRYAFATTHVHGEIYRRRGWLTSEGKEIKNKNEILALLEALFLPKRLSIIHCPGHQKGDSPQAKGNRLADDTAKKAATETHSSLTVLPAGKRTADGSEFEKRTADGSEFESPKKKAKVE

SEQ ID NO: 1266 - protein, 2095 aa, synthetic construct
MPAAKRVKLDGGDKKYSIGLDIGTNSVGWAVITDEYKVPSKKFKVLGNTDRHSIKKNLIGALLFDSGETAEATRLKRTARRRYTRRKNRICYLQEIFSNEMAKVDDSFFHRLEESFLVEEDKKHERHPIFGNIVDEVAYHEKYPTIYHLRKKLVDSTDKADLRLIYLALAHMIKFRGHFLIEGDLNPDNSDVDKLFIQLVQTYNQLFEENPINASGVDAKAILSARLSKSRRLENLIAQLPGEKKNGLFGNLIALSLGLTPNFKSNFDLAEDAKLQLSKDTYDDDLDNLLAQIGDQYADLFLAAKNLSDAILLSDILRVNTEITKAPLSASMIKRYDEHHQDLTLLKALVRQQLPEKYKEIFFDQSKNGYAGYIDGGASQEEFYKFIKPILEKMDGTEELLVKLNREDLLRKQRTFDNGSIPHQIHLGELHAILRRQEDFYPFLKDNREKIEKILTFRIPYYVGPLARGNSRFAWMTRKSEETITPWNFEEVVDKGASAQSFIERMTNFDKNLPNEKVLPKHSLLYEYFTVYNELTKVKYVTEGMRKPAFLSGEQKKAIVDLLFKTNRKVTVKQLKEDYFKKIECFDSVEISGVEDRFNASLGTYHDLLKIIKDKDFLDNEENEDILEDIVLTLTLFEDREMIEERLKTYAHLFDDKVMKQLKRRRYTGWGRLSRKLINGIRDKQSGKTILDFLKSDGFANRNFMQLIHDDSLTFKEDIQKAQVSGQGDSLHEHIANLAGSPAIKKGILQTVKVVDELVKVMGRHKPENIVIEMARENQTTQKGQKNSRERMKRIEEGIKELGSQILKEHPVENTQLQNEKLYLYYLQNGRDMYVDQELDINRLSDYDVDHIVPQSFLKDDSIDNKVLTRSDKARGKSDNVPSEEVVKKMKNYWRQLLNAKLITQRKFDNLTKAERGGLSELDKAGFIKRQLVETRQITKHVAQILDSRMNTKYDENDKLIREVKVITLKSKLVSDFRKDFQFYKVREINNYHHAHDAYLNAVVGTALIKKYPKLESEFVYGDYKVYDVRKMIAKSEQEIGKATAKYFFYSNIMNFFKTEITLANGEIRKRPLIETNGETGEIVWDKGRDFATVRKVLSMPQVNIVKKTEVQTGGFSKESILPKRNSDKLIARKKDWDPKKYGGFDSPTVAYSVLVVAKVEKGKSKKLKSVKELLGITIMERSSFEKNPIDFLEAKGYKEVKKDLIIKLPKYSLFELENGRKRMLASAGELQKGNELALPSKYVNFLYLASHYEKLKGSPEDNEQKQLFVEQHKHYLDEIIEQISEFSKRVILADANLDKVLSAYNKHRDKPIREQAENIIHLFTLTNLGAPAAFKYFDTTIDRKRYTSTKEVLDATLIHQSITGLYETRIDLSQLGGDGGGGSPAPEAAAKGGTLQLEEEYRLFEPESTQKQEMDIWLKNFPQAWAETGGMGTAHCQAPVLIQLKATATPISIRQYPMPHEAYQGIKPHIRRMLDQGILKPCQSPWNTPLLPVKKPGTEDYRPVQDLREVNKRVEDIHPTVPNPYNLLSTLPPSHPWYTVLDLKDAFFCLRLHSESQLLFAFEWRDPEIGLSGQLTWTRLPQGFKNSPTLFNEALHSDLADFRVRYPALVLLQYVDDLLLAAATRTECLEGTKALLETLGNKGYRASAKKAQICLQEVTYLGYSLKDGQRWLTKARKEAILSIPVPKNSRQVREFLGKAGYCRLFIPGFAELAAPLYPLTRPGTLFQWGTEQQLAFEDIKKALLSSPALGLPDITKPFELFIDENSGFAKGVLVQKLGPWKRPVAYLSKKLDTVASGWPPCLRMVAAIAILVKDAGKLTLGQPLTILTSHPVEALVRQPPNKWLSNARMTHYQAMLLDAERVHFGPTVSLNPATLLPLPSGGNHHDCLQILAETHGTRPDLTDQPLPDADLTWYTDGSSFIRNGEREAGAAVTTESEVIWAAPLPPGTSAQRAELIALTQALKMAEGKKLTVYTDSRYAFATTHVHGEIYRRRGWLTSEGKEIKNKNEILALLEALFLPKRLSIIHCPGHQKGDSPQAKGNRLADDTAKKAATETHSSLTVLPAGKRTADGSEFEKRTADGSEFESPKKKAKVE

SEQ ID NO: 1267 - protein, 2092 aa, synthetic construct
MPAAKRVKLDGGDKKYSIGLDIGTNSVGWAVITDEYKVPSKKFKVLGNTDRHSIKKNLIGALLFDSGETAEATRLKRTARRRYTRRKNRICYLQEIFSNEMAKVDDSFFHRLEESFLVEEDKKHERHPIFGNIVDEVAYHEKYPTIYHLRKKLVDSTDKADLRLIYLALAHMIKFRGHFLIEGDLNPDNSDVDKLFIQLVQTYNQLFEENPINASGVDAKAILSARLSKSRRLENLIAQLPGEKKNGLFGNLIALSLGLTPNFKSNFDLAEDAKLQLSKDTYDDDLDNLLAQIGDQYADLFLAAKNLSDAILLSDILRVNTEITKAPLSASMIKRYDEHHQDLTLLKALVRQQLPEKYKEIFFDQSKNGYAGYIDGGASQEEFYKFIKPILEKMDGTEELLVKLNREDLLRKQRTFDNGSIPHQIHLGELHAILRRQEDFYPFLKDNREKIEKILTFRIPYYVGPLARGNSRFAWMTRKSEETITPWNFEEVVDKGASAQSFIERMTNFDKNLPNEKVLPKHSLLYEYFTVYNELTKVKYVTEGMRKPAFLSGEQKKAIVDLLFKTNRKVTVKQLKEDYFKKIECFDSVEISGVEDRFNASLGTYHDLLKIIKDKDFLDNEENEDILEDIVLTLTLFEDREMIEERLKTYAHLFDDKVMKQLKRRRYTGWGRLSRKLINGIRDKQSGKTILDFLKSDGFANRNFMQLIHDDSLTFKEDIQKAQVSGQGDSLHEHIANLAGSPAIKKGILQTVKVVDELVKVMGRHKPENIVIEMARENQTTQKGQKNSRERMKRIEEGIKELGSQILKEHPVENTQLQNEKLYLYYLQNGRDMYVDQELDINRLSDYDVDHIVPQSFLKDDSIDNKVLTRSDKARGKSDNVPSEEVVKKMKNYWRQLLNAKLITQRKFDNLTKAERGGLSELDKAGFIKRQLVETRQITKHVAQILDSRMNTKYDENDKLIREVKVITLKSKLVSDFRKDFQFYKVREINNYHHAHDAYLNAVVGTALIKKYPKLESEFVYGDYKVYDVRKMIAKSEQEIGKATAKYFFYSNIMNFFKTEITLANGEIRKRPLIETNGETGEIVWDKGRDFATVRKVLSMPQVNIVKKTEVQTGGFSKESILPKRNSDKLIARKKDWDPKKYGGFDSPTVAYSVLVVAKVEKGKSKKLKSVKELLGITIMERSSFEKNPIDFLEAKGYKEVKKDLIIKLPKYSLFELENGRKRMLASAGELQKGNELALPSKYVNFLYLASHYEKLKGSPEDNEQKQLFVEQHKHYLDEIIEQISEFSKRVILADANLDKVLSAYNKHRDKPIREQAENIIHLFTLTNLGAPAAFKYFDTTIDRKRYTSTKEVLDATLIHQSITGLYETRIDLSQLGGDGGEAAAKPAPGGTLQLEEEYRLFEPESTQKQEMDIWLKNFPQAWAETGGMGTAHCQAPVLIQLKATATPISIRQYPMPHEAYQGIKPHIRRMLDQGILKPCQSPWNTPLLPVKKPGTEDYRPVQDLREVNKRVEDIHPTVPNPYNLLSTLPPSHPWYTVLDLKDAFFCLRLHSESQLLFAFEWRDPEIGLSGQLTWTRLPQGFKNSPTLFNEALHSDLADFRVRYPALVLLQYVDDLLLAAATRTECLEGTKALLETLGNKGYRASAKKAQICLQEVTYLGYSLKDGQRWLTKARKEAILSIPVPKNSRQVREFLGKAGYCRLFIPGFAELAAPLYPLTRPGTLFQWGTEQQLAFEDIKKALLSSPALGLPDITKPFELFIDENSGFAKGVLVQKLGPWKRPVAYLSKKLDTVASGWPPCLRMVAAIAILVKDAGKLTLGQPLTILTSHPVEALVRQPPNKWLSNARMTHYQAMLLDAERVHFGPTVSLNPATLLPLPSGGNHHDCLQILAETHGTRPDLTDQPLPDADLTWYTDGSSFIRNGEREAGAAVTTESEVIWAAPLPPGTSAQRAELIALTQALKMAEGKKLTVYTDSRYAFATTHVHGEIYRRRGWLTSEGKEIKNKNEILALLEALFLPKRLSIIHCPGHQKGDSPQAKGNRLADDTAKKAATETHSSLTVLPAGKRTADGSEFEKRTADGSEFESPKKKAKVE

SEQ ID NO: 1268 - protein, 2093 aa, synthetic construct
MPAAKRVKLDGGDKKYSIGLDIGTNSVGWAVITDEYKVPSKKFKVLGNTDRHSIKKNLIGALLFDSGETAEATRLKRTARRRYTRRKNRICYLQEIFSNEMAKVDDSFFHRLEESFLVEEDKKHERHPIFGNIVDEVAYHEKYPTIYHLRKKLVDSTDKADLRLIYLALAHMIKFRGHFLIEGDLNPDNSDVDKLFIQLVQTYNQLFEENPINASGVDAKAILSARLSKSRRLENLIAQLPGEKKNGLFGNLIALSLGLTPNFKSNFDLAEDAKLQLSKDTYDDDLDNLLAQIGDQYADLFLAAKNLSDAILLSDILRVNTEITKAPLSASMIKRYDEHHQDLTLLKALVRQQLPEKYKEIFFDQSKNGYAGYIDGGASQEEFYKFIKPILEKMDGTEELLVKLNREDLLRKQRTFDNGSIPHQIHLGELHAILRRQEDFYPFLKDNREKIEKILTFRIPYYVGPLARGNSRFAWMTRKSEETITPWNFEEVVDKGASAQSFIERMTNFDKNLPNEKVLPKHSLLYEYFTVYNELTKVKYVTEGMRKPAFLSGEQKKAIVDLLFKTNRKVTVKQLKEDYFKKIECFDSVEISGVEDRFNASLGTYHDLLKIIKDKDFLDNEENEDILEDIVLTLTLFEDREMIEERLKTYAHLFDDKVMKQLKRRRYTGWGRLSRKLINGIRDKQSGKTILDFLKSDGFANRNFMQLIHDDSLTFKEDIQKAQVSGQGDSLHEHIANLAGSPAIKKGILQTVKVVDELVKVMGRHKPENIVIEMARENQTTQKGQKNSRERMKRIEEGIKELGSQILKEHPVENTQLQNEKLYLYYLQNGRDMYVDQELDINRLSDYDVDHIVPQSFLKDDSIDNKVLTRSDKARGKSDNVPSEEVVKKMKNYWRQLLNAKLITQRKFDNLTKAERGGLSELDKAGFIKRQLVETRQITKHVAQILDSRMNTKYDENDKLIREVKVITLKSKLVSDFRKDFQFYKVREINNYHHAHDAYLNAVVGTALIKKYPKLESEFVYGDYKVYDVRKMIAKSEQEIGKATAKYFFYSNIMNFFKTEITLANGEIRKRPLIETNGETGEIVWDKGRDFATVRKVLSMPQVNIVKKTEVQTGGFSKESILPKRNSDKLIARKKDWDPKKYGGFDSPTVAYSVLVVAKVEKGKSKKLKSVKELLGITIMERSSFEKNPIDFLEAKGYKEVKKDLIIKLPKYSLFELENGRKRMLASAGELQKGNELALPSKYVNFLYLASHYEKLKGSPEDNEQKQLFVEQHKHYLDEIIEQISEFSKRVILADANLDKVLSAYNKHRDKPIREQAENIIHLFTLTNLGAPAAFKYFDTTIDRKRYTSTKEVLDATLIHQSITGLYETRIDLSQLGGDGGGGGPAPGGSGGTLQLEEEYRLFEPESTQKQEMDIWLKNFPQAWAETGGMGTAHCQAPVLIQLKATATPISIRQYPMPHEAYQGIKPHIRRMLDQGILKPCQSPWNTPLLPVKKPGTEDYRPVQDLREVNKRVEDIHPTVPNPYNLLSTLPPSHPWYTVLDLKDAFFCLRLHSESQLLFAFEWRDPEIGLSGQLTWTRLPQGFKNSPTLFNEALHSDLADFRVRYPALVLLQYVDDLLLAAATRTECLEGTKALLETLGNKGYRASAKKAQICLQEVTYLGYSLKDGQRWLTKARKEAILSIPVPKNSRQVREFLGKAGYCRLFIPGFAELAAPLYPLTRPGTLFQWGTEQQLAFEDIKKALLSSPALGLPDITKPFELFIDENSGFAKGVLVQKLGPWKRPVAYLSKKLDTVASGWPPCLRMVAAIAILVKDAGKLTLGQPLTILTSHPVEALVRQPPNKWLSNARMTHYQAMLLDAERVHFGPTVSLNPATLLPLPSGGNHHDCLQILAETHGTRPDLTDQPLPDADLTWYTDGSSFIRNGEREAGAAVTTESEVIWAAPLPPGTSAQRAELIALTQALKMAEGKKLTVYTDSRYAFATTHVHGEIYRRRGWLTSEGKEIKNKNEILALLEALFLPKRLSIIHCPGHQKGDSPQAKGNRLADDTAKKAATETHSSLTVLPAGKRTADGSEFEKRTADGSEFESPKKKAKVE

SEQ ID NO: 1269 - protein, 2095 aa, synthetic construct
MPAAKRVKLDGGDKKYSIGLDIGTNSVGWAVITDEYKVPSKKFKVLGNTDRHSIKKNLIGALLFDSGETAEATRLKRTARRRYTRRKNRICYLQEIFSNEMAKVDDSFFHRLEESFLVEEDKKHERHPIFGNIVDEVAYHEKYPTIYHLRKKLVDSTDKADLRLIYLALAHMIKFRGHFLIEGDLNPDNSDVDKLFIQLVQTYNQLFEENPINASGVDAKAILSARLSKSRRLENLIAQLPGEKKNGLFGNLIALSLGLTPNFKSNFDLAEDAKLQLSKDTYDDDLDNLLAQIGDQYADLFLAAKNLSDAILLSDILRVNTEITKAPLSASMIKRYDEHHQDLTLLKALVRQQLPEKYKEIFFDQSKNGYAGYIDGGASQEEFYKFIKPILEKMDGTEELLVKLNREDLLRKQRTFDNGSIPHQIHLGELHAILRRQEDFYPFLKDNREKIEKILTFRIPYYVGPLARGNSRFAWMTRKSEETITPWNFEEVVDKGASAQSFIERMTNFDKNLPNEKVLPKHSLLYEYFTVYNELTKVKYVTEGMRKPAFLSGEQKKAIVDLLFKTNRKVTVKQLKEDYFKKIECFDSVEISGVEDRFNASLGTYHDLLKIIKDKDFLDNEENEDILEDIVLTLTLFEDREMIEERLKTYAHLFDDKVMKQLKRRRYTGWGRLSRKLINGIRDKQSGKTILDFLKSDGFANRNFMQLIHDDSLTFKEDIQKAQVSGQGDSLHEHIANLAGSPAIKKGILQTVKVVDELVKVMGRHKPENIVIEMARENQTTQKGQKNSRERMKRIEEGIKELGSQILKEHPVENTQLQNEKLYLYYLQNGRDMYVDQELDINRLSDYDVDHIVPQSFLKDDSIDNKVLTRSDKARGKSDNVPSEEVVKKMKNYWRQLLNAKLITQRKFDNLTKAERGGLSELDKAGFIKRQLVETRQITKHVAQILDSRMNTKYDENDKLIREVKVITLKSKLVSDFRKDFQFYKVREINNYHHAHDAYLNAVVGTALIKKYPKLESEFVYGDYKVYDVRKMIAKSEQEIGKATAKYFFYSNIMNFFKTEITLANGEIRKRPLIETNGETGEIVWDKGRDFATVRKVLSMPQVNIVKKTEVQTGGFSKESILPKRNSDKLIARKKDWDPKKYGGFDSPTVAYSVLVVAKVEKGKSKKLKSVKELLGITIMERSSFEKNPIDFLEAKGYKEVKKDLIIKLPKYSLFELENGRKRMLASAGELQKGNELALPSKYVNFLYLASHYEKLKGSPEDNEQKQLFVEQHKHYLDEIIEQISEFSKRVILADANLDKVLSAYNKHRDKPIREQAENIIHLFTLTNLGAPAAFKYFDTTIDRKRYTSTKEVLDATLIHQSITGLYETRIDLSQLGGDGGGGSGGGEAAAKGGTLQLEEEYRLFEPESTQKQEMDIWLKNFPQAWAETGGMGTAHCQAPVLIQLKATATPISIRQYPMPHEAYQGIKPHIRRMLDQGILKPCQSPWNTPLLPVKKPGTEDYRPVQDLREVNKRVEDIHPTVPNPYNLLSTLPPSHPWYTVLDLKDAFFCLRLHSESQLLFAFEWRDPEIGLSGQLTWTRLPQGFKNSPTLFNEALHSDLADFRVRYPALVLLQYVDDLLLAAATRTECLEGTKALLETLGNKGYRASAKKAQICLQEVTYLGYSLKDGQRWLTKARKEAILSIPVPKNSRQVREFLGKAGYCRLFIPGFAELAAPLYPLTRPGTLFQWGTEQQLAFEDIKKALLSSPALGLPDITKPFELFIDENSGFAKGVLVQKLGPWKRPVAYLSKKLDTVASGWPPCLRMVAAIAILVKDAGKLTLGQPLTILTSHPVEALVRQPPNKWLSNARMTHYQAMLLDAERVHFGPTVSLNPATLLPLPSGGNHHDCLQILAETHGTRPDLTDQPLPDADLTWYTDGSSFIRNGEREAGAAVTTESEVIWAAPLPPGTSAQRAELIALTQALKMAEGKKLTVYTDSRYAFATTHVHGEIYRRRGWLTSEGKEIKNKNEILALLEALFLPKRLSIIHCPGHQKGDSPQAKGNRLADDTAKKAATETHSSLTVLPAGKRTADGSEFEKRTADGSEFESPKKKAKVE

SEQ ID NO: 1270 - protein, 2093 aa, synthetic construct
MPAAKRVKLDGGDKKYSIGLDIGTNSVGWAVITDEYKVPSKKFKVLGNTDRHSIKKNLIGALLFDSGETAEATRLKRTARRRYTRRKNRICYLQEIFSNEMAKVDDSFFHRLEESFLVEEDKKHERHPIFGNIVDEVAYHEKYPTIYHLRKKLVDSTDKADLRLIYLALAHMIKFRGHFLIEGDLNPDNSDVDKLFIQLVQTYNQLFEENPINASGVDAKAILSARLSKSRRLENLIAQLPGEKKNGLFGNLIALSLGLTPNFKSNFDLAEDAKLQLSKDTYDDDLDNLLAQIGDQYADLFLAAKNLSDAILLSDILRVNTEITKAPLSASMIKRYDEHHQDLTLLKALVRQQLPEKYKEIFFDQSKNGYAGYIDGGASQEEFYKFIKPILEKMDGTEELLVKLNREDLLRKQRTFDNGSIPHQIHLGELHAILRRQEDFYPFLKDNREKIEKILTFRIPYYVGPLARGNSRFAWMTRKSEETITPWNFEEVVDKGASAQSFIERMTNFDKNLPNEKVLPKHSLLYEYFTVYNELTKVKYVTEGMRKPAFLSGEQKKAIVDLLFKTNRKVTVKQLKEDYFKKIECFDSVEISGVEDRFNASLGTYHDLLKIIKDKDFLDNEENEDILEDIVLTLTLFEDREMIEERLKTYAHLFDDKVMKQLKRRRYTGWGRLSRKLINGIRDKQSGKTILDFLKSDGFANRNFMQLIHDDSLTFKEDIQKAQVSGQGDSLHEHIANLAGSPAIKKGILQTVKVVDELVKVMGRHKPENIVIEMARENQTTQKGQKNSRERMKRIEEGIKELGSQILKEHPVENTQLQNEKLYLYYLQNGRDMYVDQELDINRLSDYDVDHIVPQSFLKDDSIDNKVLTRSDKARGKSDNVPSEEVVKKMKNYWRQLLNAKLITQRKFDNLTKAERGGLSELDKAGFIKRQLVETRQITKHVAQILDSRMNTKYDENDKLIREVKVITLKSKLVSDFRKDFQFYKVREINNYHHAHDAYLNAVVGTALIKKYPKLESEFVYGDYKVYDVRKMIAKSEQEIGKATAKYFFYSNIMNFFKTEITLANGEIRKRPLIETNGETGEIVWDKGRDFATVRKVLSMPQVNIVKKTEVQTGGFSKESILPKRNSDKLIARKKDWDPKKYGGFDSPTVAYSVLVVAKVEKGKSKKLKSVKELLGITIMERSSFEKNPIDFLEAKGYKEVKKDLIIKLPKYSLFELENGRKRMLASAGELQKGNELALPSKYVNFLYLASHYEKLKGSPEDNEQKQLFVEQHKHYLDEIIEQISEFSKRVILADANLDKVLSAYNKHRDKPIREQAENIIHLFTLTNLGAPAAFKYFDTTIDRKRYTSTKEVLDATLIHQSITGLYETRIDLSQLGGDGGGGSGSSGGGGGTLQLEEEYRLFEPESTQKQEMDIWLKNFPQAWAETGGMGTAHCQAPVLIQLKATATPISIRQYPMPHEAYQGIKPHIRRMLDQGILKPCQSPWNTPLLPVKKPGTEDYRPVQDLREVNKRVEDIHPTVPNPYNLLSTLPPSHPWYTVLDLKDAFFCLRLHSESQLLFAFEWRDPEIGLSGQLTWTRLPQGFKNSPTLFNEALHSDLADFRVRYPALVLLQYVDDLLLAAATRTECLEGTKALLETLGNKGYRASAKKAQICLQEVTYLGYSLKDGQRWLTKARKEAILSIPVPKNSRQVREFLGKAGYCRLFIPGFAELAAPLYPLTRPGTLFQWGTEQQLAFEDIKKALLSSPALGLPDITKPFELFIDENSGFAKGVLVQKLGPWKRPVAYLSKKLDTVASGWPPCLRMVAAIAILVKDAGKLTLGQPLTILTSHPVEALVRQPPNKWLSNARMTHYQAMLLDAERVHFGPTVSLNPATLLPLPSGGNHHDCLQILAETHGTRPDLTDQPLPDADLTWYTDGSSFIRNGEREAGAAVTTESEVIWAAPLPPGTSAQRAELIALTQALKMAEGKKLTVYTDSRYAFATTHVHGEIYRRRGWLTSEGKEIKNKNEILALLEALFLPKRLSIIHCPGHQKGDSPQAKGNRLADDTAKKAATETHSSLTVLPAGKRTADGSEFEKRTADGSEFESPKKKAKVE

SEQ ID NO: 1271 - protein, 2092 aa, synthetic construct
MPAAKRVKLDGGDKKYSIGLDIGTNSVGWAVITDEYKVPSKKFKVLGNTDRHSIKKNLIGALLFDSGETAEATRLKRTARRRYTRRKNRICYLQEIFSNEMAKVDDSFFHRLEESFLVEEDKKHERHPIFGNIVDEVAYHEKYPTIYHLRKKLVDSTDKADLRLIYLALAHMIKFRGHFLIEGDLNPDNSDVDKLFIQLVQTYNQLFEENPINASGVDAKAILSARLSKSRRLENLIAQLPGEKKNGLFGNLIALSLGLTPNFKSNFDLAEDAKLQLSKDTYDDDLDNLLAQIGDQYADLFLAAKNLSDAILLSDILRVNTEITKAPLSASMIKRYDEHHQDLTLLKALVRQQLPEKYKEIFFDQSKNGYAGYIDGGASQEEFYKFIKPILEKMDGTEELLVKLNREDLLRKQRTFDNGSIPHQIHLGELHAILRRQEDFYPFLKDNREKIEKILTFRIPYYVGPLARGNSRFAWMTRKSEETITPWNFEEVVDKGASAQSFIERMTNFDKNLPNEKVLPKHSLLYEYFTVYNELTKVKYVTEGMRKPAFLSGEQKKAIVDLLFKTNRKVTVKQLKEDYFKKIECFDSVEISGVEDRFNASLGTYHDLLKIIKDKDFLDNEENEDILEDIVLTLTLFEDREMIEERLKTYAHLFDDKVMKQLKRRRYTGWGRLSRKLINGIRDKQSGKTILDFLKSDGFANRNFMQLIHDDSLTFKEDIQKAQVSGQGDSLHEHIANLAGSPAIKKGILQTVKVVDELVKVMGRHKPENIVIEMARENQTTQKGQKNSRERMKRIEEGIKELGSQILKEHPVENTQLQNEKLYLYYLQNGRDMYVDQELDINRLSDYDVDHIVPQSFLKDDSIDNKVLTRSDKARGKSDNVPSEEVVKKMKNYWRQLLNAKLITQRKFDNLTKAERGGLSELDKAGFIKRQLVETRQITKHVAQILDSRMNTKYDENDKLIREVKVITLKSKLVSDFRKDFQFYKVREINNYHHAHDAYLNAVVGTALIKKYPKLESEFVYGDYKVYDVRKMIAKSEQEIGKATAKYFFYSNIMNFFKTEITLANGEIRKRPLIETNGETGEIVWDKGRDFATVRKVLSMPQVNIVKKTEVQTGGFSKESILPKRNSDKLIARKKDWDPKKYGGFDSPTVAYSVLVVAKVEKGKSKKLKSVKELLGITIMERSSFEKNPIDFLEAKGYKEVKKDLIIKLPKYSLFELENGRKRMLASAGELQKGNELALPSKYVNFLYLASHYEKLKGSPEDNEQKQLFVEQHKHYLDEIIEQISEFSKRVILADANLDKVLSAYNKHRDKPIREQAENIIHLFTLTNLGAPAAFKYFDTTIDRKRYTSTKEVLDATLIHQSITGLYETRIDLSQLGGDGGEAAAKGGGGGTLQLEEEYRLFEPESTQKQEMDIWLKNFPQAWAETGGMGTAHCQAPVLIQLKATATPISIRQYPMPHEAYQGIKPHIRRMLDQGILKPCQSPWNTPLLPVKKPGTEDYRPVQDLREVNKRVEDIHPTVPNPYNLLSTLPPSHPWYTVLDLKDAFFCLRLHSESQLLFAFEWRDPEIGLSGQLTWTRLPQGFKNSPTLFNEALHSDLADFRVRYPALVLLQYVDDLLLAAATRTECLEGTKALLETLGNKGYRASAKKAQICLQEVTYLGYSLKDGQRWLTKARKEAILSIPVPKNSRQVREFLGKAGYCRLFIPGFAELAAPLYPLTRPGTLFQWGTEQQLAFEDIKKALLSSPALGLPDITKPFELFIDENSGFAKGVLVQKLGPWKRPVAYLSKKLDTVASGWPPCLRMVAAIAILVKDAGKLTLGQPLTILTSHPVEALVRQPPNKWLSNARMTHYQAMLLDAERVHFGPTVSLNPATLLPLPSGGNHHDCLQILAETHGTRPDLTDQPLPDADLTWYTDGSSFIRNGEREAGAAVTTESEVIWAAPLPPGTSAQRAELIALTQALKMAEGKKLTVYTDSRYAFATTHVHGEIYRRRGWLTSEGKEIKNKNEILALLEALFLPKRLSIIHCPGHQKGDSPQAKGNRLADDTAKKAATETHSSLTVLPAGKRTADGSEFEKRTADGSEFESPKKKAKVE

SEQ ID NO: 1272 - protein, 2090 aa, synthetic construct
MPAAKRVKLDGGDKKYSIGLDIGTNSVGWAVITDEYKVPSKKFKVLGNTDRHSIKKNLIGALLFDSGETAEATRLKRTARRRYTRRKNRICYLQEIFSNEMAKVDDSFFHRLEESFLVEEDKKHERHPIFGNIVDEVAYHEKYPTIYHLRKKLVDSTDKADLRLIYLALAHMIKFRGHFLIEGDLNPDNSDVDKLFIQLVQTYNQLFEENPINASGVDAKAILSARLSKSRRLENLIAQLPGEKKNGLFGNLIALSLGLTPNFKSNFDLAEDAKLQLSKDTYDDDLDNLLAQIGDQYADLFLAAKNLSDAILLSDILRVNTEITKAPLSASMIKRYDEHHQDLTLLKALVRQQLPEKYKEIFFDQSKNGYAGYIDGGASQEEFYKFIKPILEKMDGTEELLVKLNREDLLRKQRTFDNGSIPHQIHLGELHAILRRQEDFYPFLKDNREKIEKILTFRIPYYVGPLARGNSRFAWMTRKSEETITPWNFEEVVDKGASAQSFIERMTNFDKNLPNEKVLPKHSLLYEYFTVYNELTKVKYVTEGMRKPAFLSGEQKKAIVDLLFKTNRKVTVKQLKEDYFKKIECFDSVEISGVEDRFNASLGTYHDLLKIIKDKDFLDNEENEDILEDIVLTLTLFEDREMIEERLKTYAHLFDDKVMKQLKRRRYTGWGRLSRKLINGIRDKQSGKTILDFLKSDGFANRNFMQLIHDDSLTFKEDIQKAQVSGQGDSLHEHIANLAGSPAIKKGILQTVKVVDELVKVMGRHKPENIVIEMARENQTTQKGQKNSRERMKRIEEGIKELGSQILKEHPVENTQLQNEKLYLYYLQNGRDMYVDQELDINRLSDYDVDHIVPQSFLKDDSIDNKVLTRSDKARGKSDNVPSEEVVKKMKNYWRQLLNAKLITQRKFDNLTKAERGGLSELDKAGFIKRQLVETRQITKHVAQILDSRMNTKYDENDKLIREVKVITLKSKLVSDFRKDFQFYKVREINNYHHAHDAYLNAVVGTALIKKYPKLESEFVYGDYKVYDVRKMIAKSEQEIGKATAKYFFYSNIMNFFKTEITLANGEIRKRPLIETNGETGEIVWDKGRDFATVRKVLSMPQVNIVKKTEVQTGGFSKESILPKRNSDKLIARKKDWDPKKYGGFDSPTVAYSVLVVAKVEKGKSKKLKSVKELLGITIMERSSFEKNPIDFLEAKGYKEVKKDLIIKLPKYSLFELENGRKRMLASAGELQKGNELALPSKYVNFLYLASHYEKLKGSPEDNEQKQLFVEQHKHYLDEIIEQISEFSKRVILADANLDKVLSAYNKHRDKPIREQAENIIHLFTLTNLGAPAAFKYFDTTIDRKRYTSTKEVLDATLIHQSITGLYETRIDLSQLGGDGGGGGGSSGGTLQLEEEYRLFEPESTQKQEMDIWLKNFPQAWAETGGMGTAHCQAPVLIQLKATATPISIRQYPMPHEAYQGIKPHIRRMLDQGILKPCQSPWNTPLLPVKKPGTEDYRPVQDLREVNKRVEDIHPTVPNPYNLLSTLPPSHPWYTVLDLKDAFFCLRLHSESQLLFAFEWRDPEIGLSGQLTWTRLPQGFKNSPTLFNEALHSDLADFRVRYPALVLLQYVDDLLLAAATRTECLEGTKALLETLGNKGYRASAKKAQICLQEVTYLGYSLKDGQRWLTKARKEAILSIPVPKNSRQVREFLGKAGYCRLFIPGFAELAAPLYPLTRPGTLFQWGTEQQLAFEDIKKALLSSPALGLPDITKPFELFIDENSGFAKGVLVQKLGPWKRPVAYLSKKLDTVASGWPPCLRMVAAIAILVKDAGKLTLGQPLTILTSHPVEALVRQPPNKWLSNARMTHYQAMLLDAERVHFGPTVSLNPATLLPLPSGGNHHDCLQILAETHGTRPDLTDQPLPDADLTWYTDGSSFIRNGEREAGAAVTTESEVIWAAPLPPGTSAQRAELIALTQALKMAEGKKLTVYTDSRYAFATTHVHGEIYRRRGWLTSEGKEIKNKNEILALLEALFLPKRLSIIHCPGHQKGDSPQAKGNRLADDTAKKAATETHSSLTVLPAGKRTADGSEFEKRTADGSEFESPKKKAKVE

SEQ ID NO: 1273 - protein, 2089 aa, synthetic construct
MPAAKRVKLDGGDKKYSIGLDIGTNSVGWAVITDEYKVPSKKFKVLGNTDRHSIKKNLIGALLFDSGETAEATRLKRTARRRYTRRKNRICYLQEIFSNEMAKVDDSFFHRLEESFLVEEDKKHERHPIFGNIVDEVAYHEKYPTIYHLRKKLVDSTDKADLRLIYLALAHMIKFRGHFLIEGDLNPDNSDVDKLFIQLVQTYNQLFEENPINASGVDAKAILSARLSKSRRLENLIAQLPGEKKNGLFGNLIALSLGLTPNFKSNFDLAEDAKLQLSKDTYDDDLDNLLAQIGDQYADLFLAAKNLSDAILLSDILRVNTEITKAPLSASMIKRYDEHHQDLTLLKALVRQQLPEKYKEIFFDQSKNGYAGYIDGGASQEEFYKFIKPILEKMDGTEELLVKLNREDLLRKQRTFDNGSIPHQIHLGELHAILRRQEDFYPFLKDNREKIEKILTFRIPYYVGPLARGNSRFAWMTRKSEETITPWNFEEVVDKGASAQSFIERMTNFDKNLPNEKVLPKHSLLYEYFTVYNELTKVKYVTEGMRKPAFLSGEQKKAIVDLLFKTNRKVTVKQLKEDYFKKIECFDSVEISGVEDRFNASLGTYHDLLKIIKDKDFLDNEENEDILEDIVLTLTLFEDREMIEERLKTYAHLFDDKVMKQLKRRRYTGWGRLSRKLINGIRDKQSGKTILDFLKSDGFANRNFMQLIHDDSLTFKEDIQKAQVSGQGDSLHEHIANLAGSPAIKKGILQTVKVVDELVKVMGRHKPENIVIEMARENQTTQKGQKNSRERMKRIEEGIKELGSQILKEHPVENTQLQNEKLYLYYLQNGRDMYVDQELDINRLSDYDVDHIVPQSFLKDDSIDNKVLTRSDKARGKSDNVPSEEVVKKMKNYWRQLLNAKLITQRKFDNLTKAERGGLSELDKAGFIKRQLVETRQITKHVAQILDSRMNTKYDENDKLIREVKVITLKSKLVSDFRKDFQFYKVREINNYHHAHDAYLNAVVGTALIKKYPKLESEFVYGDYKVYDVRKMIAKSEQEIGKATAKYFFYSNIMNFFKTEITLANGEIRKRPLIETNGETGEIVWDKGRDFATVRKVLSMPQVNIVKKTEVQTGGFSKESILPKRNSDKLIARKKDWDPKKYGGFDSPTVAYSVLVVAKVEKGKSKKLKSVKELLGITIMERSSFEKNPIDFLEAKGYKEVKKDLIIKLPKYSLFELENGRKRMLASAGELQKGNELALPSKYVNFLYLASHYEKLKGSPEDNEQKQLFVEQHKHYLDEIIEQISEFSKRVILADANLDKVLSAYNKHRDKPIREQAENIIHLFTLTNLGAPAAFKYFDTTIDRKRYTSTKEVLDATLIHQSITGLYETRIDLSQLGGDGGGGGGSGGTLQLEEEYRLFEPESTQKQEMDIWLKNFPQAWAETGGMGTAHCQAPVLIQLKATATPISIRQYPMPHEAYQGIKPHIRRMLDQGILKPCQSPWNTPLLPVKKPGTEDYRPVQDLREVNKRVEDIHPTVPNPYNLLSTLPPSHPWYTVLDLKDAFFCLRLHSESQLLFAFEWRDPEIGLSGQLTWTRLPQGFKNSPTLFNEALHSDLADFRVRYPALVLLQYVDDLLLAAATRTECLEGTKALLETLGNKGYRASAKKAQICLQEVTYLGYSLKDGQRWLTKARKEAILSIPVPKNSRQVREFLGKAGYCRLFIPGFAELAAPLYPLTRPGTLFQWGTEQQLAFEDIKKALLSSPALGLPDITKPFELFIDENSGFAKGVLVQKLGPWKRPVAYLSKKLDTVASGWPPCLRMVAAIAILVKDAGKLTLGQPLTILTSHPVEALVRQPPNKWLSNARMTHYQAMLLDAERVHFGPTVSLNPATLLPLPSGGNHHDCLQILAETHGTRPDLTDQPLPDADLTWYTDGSSFIRNGEREAGAAVTTESEVIWAAPLPPGTSAQRAELIALTQALKMAEGKKLTVYTDSRYAFATTHVHGEIYRRRGWLTSEGKEIKNKNEILALLEALFLPKRLSIIHCPGHQKGDSPQAKGNRLADDTAKKAATETHSSLTVLPAGKRTADGSEFEKRTADGSEFESPKKKAKVE

SEQ ID NO: 1274 - protein, 2099 aa, synthetic construct
MPAAKRVKLDGGDKKYSIGLDIGTNSVGWAVITDEYKVPSKKFKVLGNTDRHSIKKNLIGALLFDSGETAEATRLKRTARRRYTRRKNRICYLQEIFSNEMAKVDDSFFHRLEESFLVEEDKKHERHPIFGNIVDEVAYHEKYPTIYHLRKKLVDSTDKADLRLIYLALAHMIKFRGHFLIEGDLNPDNSDVDKLFIQLVQTYNQLFEENPINASGVDAKAILSARLSKSRRLENLIAQLPGEKKNGLFGNLIALSLGLTPNFKSNFDLAEDAKLQLSKDTYDDDLDNLLAQIGDQYADLFLAAKNLSDAILLSDILRVNTEITKAPLSASMIKRYDEHHQDLTLLKALVRQQLPEKYKEIFFDQSKNGYAGYIDGGASQEEFYKFIKPILEKMDGTEELLVKLNREDLLRKQRTFDNGSIPHQIHLGELHAILRRQEDFYPFLKDNREKIEKILTFRIPYYVGPLARGNSRFAWMTRKSEETITPWNFEEVVDKGASAQSFIERMTNFDKNLPNEKVLPKHSLLYEYFTVYNELTKVKYVTEGMRKPAFLSGEQKKAIVDLLFKTNRKVTVKQLKEDYFKKIECFDSVEISGVEDRFNASLGTYHDLLKIIKDKDFLDNEENEDILEDIVLTLTLFEDREMIEERLKTYAHLFDDKVMKQLKRRRYTGWGRLSRKLINGIRDKQSGKTILDFLKSDGFANRNFMQLIHDDSLTFKEDIQKAQVSGQGDSLHEHIANLAGSPAIKKGILQTVKVVDELVKVMGRHKPENIVIEMARENQTTQKGQKNSRERMKRIEEGIKELGSQILKEHPVENTQLQNEKLYLYYLQNGRDMYVDQELDINRLSDYDVDHIVPQSFLKDDSIDNKVLTRSDKARGKSDNVPSEEVVKKMKNYWRQLLNAKLITQRKFDNLTKAERGGLSELDKAGFIKRQLVETRQITKHVAQILDSRMNTKYDENDKLIREVKVITLKSKLVSDFRKDFQFYKVREINNYHHAHDAYLNAVVGTALIKKYPKLESEFVYGDYKVYDVRKMIAKSEQEIGKATAKYFFYSNIMNFFKTEITLANGEIRKRPLIETNGETGEIVWDKGRDFATVRKVLSMPQVNIVKKTEVQTGGFSKESILPKRNSDKLIARKKDWDPKKYGGFDSPTVAYSVLVVAKVEKGKSKKLKSVKELLGITIMERSSFEKNPIDFLEAKGYKEVKKDLIIKLPKYSLFELENGRKRMLASAGELQKGNELALPSKYVNFLYLASHYEKLKGSPEDNEQKQLFVEQHKHYLDEIIEQISEFSKRVILADANLDKVLSAYNKHRDKPIREQAENIIHLFTLTNLGAPAAFKYFDTTIDRKRYTSTKEVLDATLIHQSITGLYETRIDLSQLGGDGGGSSGSSGSSGSSGSSGGTLQLEEEYRLFEPESTQKQEMDIWLKNFPQAWAETGGMGTAHCQAPVLIQLKATATPISIRQYPMPHEAYQGIKPHIRRMLDQGILKPCQSPWNTPLLPVKKPGTEDYRPVQDLREVNKRVEDIHPTVPNPYNLLSTLPPSHPWYTVLDLKDAFFCLRLHSESQLLFAFEWRDPEIGLSGQLTWTRLPQGFKNSPTLFNEALHSDLADFRVRYPALVLLQYVDDLLLAAATRTECLEGTKALLETLGNKGYRASAKKAQICLQEVTYLGYSLKDGQRWLTKARKEAILSIPVPKNSRQVREFLGKAGYCRLFIPGFAELAAPLYPLTRPGTLFQWGTEQQLAFEDIKKALLSSPALGLPDITKPFELFIDENSGFAKGVLVQKLGPWKRPVAYLSKKLDTVASGWPPCLRMVAAIAILVKDAGKLTLGQPLTILTSHPVEALVRQPPNKWLSNARMTHYQAMLLDAERVHFGPTVSLNPATLLPLPSGGNHHDCLQILAETHGTRPDLTDQPLPDADLTWYTDGSSFIRNGEREAGAAVTTESEVIWAAPLPPGTSAQRAELIALTQALKMAEGKKLTVYTDSRYAFATTHVHGEIYRRRGWLTSEGKEIKNKNEILALLEALFLPKRLSIIHCPGHQKGDSPQAKGNRLADDTAKKAATETHSSLTVLPAGKRTADGSEFEKRTADGSEFESPKKKAKVE

SEQ ID NO: 1275 - protein, 2093 aa, synthetic construct
MPAAKRVKLDGGDKKYSIGLDIGTNSVGWAVITDEYKVPSKKFKVLGNTDRHSIKKNLIGALLFDSGETAEATRLKRTARRRYTRRKNRICYLQEIFSNEMAKVDDSFFHRLEESFLVEEDKKHERHPIFGNIVDEVAYHEKYPTIYHLRKKLVDSTDKADLRLIYLALAHMIKFRGHFLIEGDLNPDNSDVDKLFIQLVQTYNQLFEENPINASGVDAKAILSARLSKSRRLENLIAQLPGEKKNGLFGNLIALSLGLTPNFKSNFDLAEDAKLQLSKDTYDDDLDNLLAQIGDQYADLFLAAKNLSDAILLSDILRVNTEITKAPLSASMIKRYDEHHQDLTLLKALVRQQLPEKYKEIFFDQSKNGYAGYIDGGASQEEFYKFIKPILEKMDGTEELLVKLNREDLLRKQRTFDNGSIPHQIHLGELHAILRRQEDFYPFLKDNREKIEKILTFRIPYYVGPLARGNSRFAWMTRKSEETITPWNFEEVVDKGASAQSFIERMTNFDKNLPNEKVLPKHSLLYEYFTVYNELTKVKYVTEGMRKPAFLSGEQKKAIVDLLFKTNRKVTVKQLKEDYFKKIECFDSVEISGVEDRFNASLGTYHDLLKIIKDKDFLDNEENEDILEDIVLTLTLFEDREMIEERLKTYAHLFDDKVMKQLKRRRYTGWGRLSRKLINGIRDKQSGKTILDFLKSDGFANRNFMQLIHDDSLTFKEDIQKAQVSGQGDSLHEHIANLAGSPAIKKGILQTVKVVDELVKVMGRHKPENIVIEMARENQTTQKGQKNSRERMKRIEEGIKELGSQILKEHPVENTQLQNEKLYLYYLQNGRDMYVDQELDINRLSDYDVDHIVPQSFLKDDSIDNKVLTRSDKARGKSDNVPSEEVVKKMKNYWRQLLNAKLITQRKFDNLTKAERGGLSELDKAGFIKRQLVETRQITKHVAQILDSRMNTKYDENDKLIREVKVITLKSKLVSDFRKDFQFYKVREINNYHHAHDAYLNAVVGTALIKKYPKLESEFVYGDYKVYDVRKMIAKSEQEIGKATAKYFFYSNIMNFFKTEITLANGEIRKRPLIETNGETGEIVWDKGRDFATVRKVLSMPQVNIVKKTEVQTGGFSKESILPKRNSDKLIARKKDWDPKKYGGFDSPTVAYSVLVVAKVEKGKSKKLKSVKELLGITIMERSSFEKNPIDFLEAKGYKEVKKDLIIKLPKYSLFELENGRKRMLASAGELQKGNELALPSKYVNFLYLASHYEKLKGSPEDNEQKQLFVEQHKHYLDEIIEQISEFSKRVILADANLDKVLSAYNKHRDKPIREQAENIIHLFTLTNLGAPAAFKYFDTTIDRKRYTSTKEVLDATLIHQSITGLYETRIDLSQLGGDGGGGSGGGGSSGGTLQLEEEYRLFEPESTQKQEMDIWLKNFPQAWAETGGMGTAHCQAPVLIQLKATATPISIRQYPMPHEAYQGIKPHIRRMLDQGILKPCQSPWNTPLLPVKKPGTEDYRPVQDLREVNKRVEDIHPTVPNPYNLLSTLPPSHPWYTVLDLKDAFFCLRLHSESQLLFAFEWRDPEIGLSGQLTWTRLPQGFKNSPTLFNEALHSDLADFRVRYPALVLLQYVDDLLLAAATRTECLEGTKALLETLGNKGYRASAKKAQICLQEVTYLGYSLKDGQRWLTKARKEAILSIPVPKNSRQVREFLGKAGYCRLFIPGFAELAAPLYPLTRPGTLFQWGTEQQLAFEDIKKALLSSPALGLPDITKPFELFIDENSGFAKGVLVQKLGPWKRPVAYLSKKLDTVASGWPPCLRMVAAIAILVKDAGKLTLGQPLTILTSHPVEALVRQPPNKWLSNARMTHYQAMLLDAERVHFGPTVSLNPATLLPLPSGGNHHDCLQILAETHGTRPDLTDQPLPDADLTWYTDGSSFIRNGEREAGAAVTTESEVIWAAPLPPGTSAQRAELIALTQALKMAEGKKLTVYTDSRYAFATTHVHGEIYRRRGWLTSEGKEIKNKNEILALLEALFLPKRLSIIHCPGHQKGDSPQAKGNRLADDTAKKAATETHSSLTVLPAGKRTADGSEFEKRTADGSEFESPKKKAKVE

SEQ ID NO: 1276 - protein, 2093 aa, synthetic construct
MPAAKRVKLDGGDKKYSIGLDIGTNSVGWAVITDEYKVPSKKFKVLGNTDRHSIKKNLIGALLFDSGETAEATRLKRTARRRYTRRKNRICYLQEIFSNEMAKVDDSFFHRLEESFLVEEDKKHERHPIFGNIVDEVAYHEKYPTIYHLRKKLVDSTDKADLRLIYLALAHMIKFRGHFLIEGDLNPDNSDVDKLFIQLVQTYNQLFEENPINASGVDAKAILSARLSKSRRLENLIAQLPGEKKNGLFGNLIALSLGLTPNFKSNFDLAEDAKLQLSKDTYDDDLDNLLAQIGDQYADLFLAAKNLSDAILLSDILRVNTEITKAPLSASMIKRYDEHHQDLTLLKALVRQQLPEKYKEIFFDQSKNGYAGYIDGGASQEEFYKFIKPILEKMDGTEELLVKLNREDLLRKQRTFDNGSIPHQIHLGELHAILRRQEDFYPFLKDNREKIEKILTFRIPYYVGPLARGNSRFAWMTRKSEETITPWNFEEVVDKGASAQSFIERMTNFDKNLPNEKVLPKHSLLYEYFTVYNELTKVKYVTEGMRKPAFLSGEQKKAIVDLLFKTNRKVTVKQLKEDYFKKIECFDSVEISGVEDRFNASLGTYHDLLKIIKDKDFLDNEENEDILEDIVLTLTLFEDREMIEERLKTYAHLFDDKVMKQLKRRRYTGWGRLSRKLINGIRDKQSGKTILDFLKSDGFANRNFMQLIHDDSLTFKEDIQKAQVSGQGDSLHEHIANLAGSPAIKKGILQTVKVVDELVKVMGRHKPENIVIEMARENQTTQKGQKNSRERMKRIEEGIKELGSQILKEHPVENTQLQNEKLYLYYLQNGRDMYVDQELDINRLSDYDVDHIVPQSFLKDDSIDNKVLTRSDKARGKSDNVPSEEVVKKMKNYWRQLLNAKLITQRKFDNLTKAERGGLSELDKAGFIKRQLVETRQITKHVAQILDSRMNTKYDENDKLIREVKVITLKSKLVSDFRKDFQFYKVREINNYHHAHDAYLNAVVGTALIKKYPKLESEFVYGDYKVYDVRKMIAKSEQEIGKATAKYFFYSNIMNFFKTEITLANGEIRKRPLIETNGETGEIVWDKGRDFATVRKVLSMPQVNIVKKTEVQTGGFSKESILPKRNSDKLIARKKDWDPKKYGGFDSPTVAYSVLVVAKVEKGKSKKLKSVKELLGITIMERSSFEKNPIDFLEAKGYKEVKKDLIIKLPKYSLFELENGRKRMLASAGELQKGNELALPSKYVNFLYLASHYEKLKGSPEDNEQKQLFVEQHKHYLDEIIEQISEFSKRVILADANLDKVLSAYNKHRDKPIREQAENIIHLFTLTNLGAPAAFKYFDTTIDRKRYTSTKEVLDATLIHQSITGLYETRIDLSQLGGDGGPAPGSSGGSGGTLQLEEEYRLFEPESTQKQEMDIWLKNFPQAWAETGGMGTAHCQAPVLIQLKATATPISIRQYPMPHEAYQGIKPHIRRMLDQGILKPCQSPWNTPLLPVKKPGTEDYRPVQDLREVNKRVEDIHPTVPNPYNLLSTLPPSHPWYTVLDLKDAFFCLRLHSESQLLFAFEWRDPEIGLSGQLTWTRLPQGFKNSPTLFNEALHSDLADFRVRYPALVLLQYVDDLLLAAATRTECLEGTKALLETLGNKGYRASAKKAQICLQEVTYLGYSLKDGQRWLTKARKEAILSIPVPKNSRQVREFLGKAGYCRLFIPGFAELAAPLYPLTRPGTLFQWGTEQQLAFEDIKKALLSSPALGLPDITKPFELFIDENSGFAKGVLVQKLGPWKRPVAYLSKKLDTVASGWPPCLRMVAAIAILVKDAGKLTLGQPLTILTSHPVEALVRQPPNKWLSNARMTHYQAMLLDAERVHFGPTVSLNPATLLPLPSGGNHHDCLQILAETHGTRPDLTDQPLPDADLTWYTDGSSFIRNGEREAGAAVTTESEVIWAAPLPPGTSAQRAELIALTQALKMAEGKKLTVYTDSRYAFATTHVHGEIYRRRGWLTSEGKEIKNKNEILALLEALFLPKRLSIIHCPGHQKGDSPQAKGNRLADDTAKKAATETHSSLTVLPAGKRTADGSEFEKRTADGSEFESPKKKAKVE

SEQ ID NO: 1277 - protein, 2093 aa, synthetic construct
MPAAKRVKLDGGDKKYSIGLDIGTNSVGWAVITDEYKVPSKKFKVLGNTDRHSIKKNLIGALLFDSGETAEATRLKRTARRRYTRRKNRICYLQEIFSNEMAKVDDSFFHRLEESFLVEEDKKHERHPIFGNIVDEVAYHEKYPTIYHLRKKLVDSTDKADLRLIYLALAHMIKFRGHFLIEGDLNPDNSDVDKLFIQLVQTYNQLFEENPINASGVDAKAILSARLSKSRRLENLIAQLPGEKKNGLFGNLIALSLGLTPNFKSNFDLAEDAKLQLSKDTYDDDLDNLLAQIGDQYADLFLAAKNLSDAILLSDILRVNTEITKAPLSASMIKRYDEHHQDLTLLKALVRQQLPEKYKEIFFDQSKNGYAGYIDGGASQEEFYKFIKPILEKMDGTEELLVKLNREDLLRKQRTFDNGSIPHQIHLGELHAILRRQEDFYPFLKDNREKIEKILTFRIPYYVGPLARGNSRFAWMTRKSEETITPWNFEEVVDKGASAQSFIERMTNFDKNLPNEKVLPKHSLLYEYFTVYNELTKVKYVTEGMRKPAFLSGEQKKAIVDLLFKTNRKVTVKQLKEDYFKKIECFDSVEISGVEDRFNASLGTYHDLLKIIKDKDFLDNEENEDILEDIVLTLTLFEDREMIEERLKTYAHLFDDKVMKQLKRRRYTGWGRLSRKLINGIRDKQSGKTILDFLKSDGFANRNFMQLIHDDSLTFKEDIQKAQVSGQGDSLHEHIANLAGSPAIKKGILQTVKVVDELVKVMGRHKPENIVIEMARENQTTQKGQKNSRERMKRIEEGIKELGSQILKEHPVENTQLQNEKLYLYYLQNGRDMYVDQELDINRLSDYDVDHIVPQSFLKDDSIDNKVLTRSDKARGKSDNVPSEEVVKKMKNYWRQLLNAKLITQRKFDNLTKAERGGLSELDKAGFIKRQLVETRQITKHVAQILDSRMNTKYDENDKLIREVKVITLKSKLVSDFRKDFQFYKVREINNYHHAHDAYLNAVVGTALIKKYPKLESEFVYGDYKVYDVRKMIAKSEQEIGKATAKYFFYSNIMNFFKTEITLANGEIRKRPLIETNGETGEIVWDKGRDFATVRKVLSMPQVNIVKKTEVQTGGFSKESILPKRNSDKLIARKKDWDPKKYGGFDSPTVAYSVLVVAKVEKGKSKKLKSVKELLGITIMERSSFEKNPIDFLEAKGYKEVKKDLIIKLPKYSLFELENGRKRMLASAGELQKGNELALPSKYVNFLYLASHYEKLKGSPEDNEQKQLFVEQHKHYLDEIIEQISEFSKRVILADANLDKVLSAYNKHRDKPIREQAENIIHLFTLTNLGAPAAFKYFDTTIDRKRYTSTKEVLDATLIHQSITGLYETRIDLSQLGGDGGPAPGGGGSSGGTLQLEEEYRLFEPESTQKQEMDIWLKNFPQAWAETGGMGTAHCQAPVLIQLKATATPISIRQYPMPHEAYQGIKPHIRRMLDQGILKPCQSPWNTPLLPVKKPGTEDYRPVQDLREVNKRVEDIHPTVPNPYNLLSTLPPSHPWYTVLDLKDAFFCLRLHSESQLLFAFEWRDPEIGLSGQLTWTRLPQGFKNSPTLFNEALHSDLADFRVRYPALVLLQYVDDLLLAAATRTECLEGTKALLETLGNKGYRASAKKAQICLQEVTYLGYSLKDGQRWLTKARKEAILSIPVPKNSRQVREFLGKAGYCRLFIPGFAELAAPLYPLTRPGTLFQWGTEQQLAFEDIKKALLSSPALGLPDITKPFELFIDENSGFAKGVLVQKLGPWKRPVAYLSKKLDTVASGWPPCLRMVAAIAILVKDAGKLTLGQPLTILTSHPVEALVRQPPNKWLSNARMTHYQAMLLDAERVHFGPTVSLNPATLLPLPSGGNHHDCLQILAETHGTRPDLTDQPLPDADLTWYTDGSSFIRNGEREAGAAVTTESEVIWAAPLPPGTSAQRAELIALTQALKMAEGKKLTVYTDSRYAFATTHVHGEIYRRRGWLTSEGKEIKNKNEILALLEALFLPKRLSIIHCPGHQKGDSPQAKGNRLADDTAKKAATETHSSLTVLPAGKRTADGSEFEKRTADGSEFESPKKKAKVE

SEQ ID NO: 1278 - protein, 2095 aa, synthetic construct
MPAAKRVKLDGGDKKYSIGLDIGTNSVGWAVITDEYKVPSKKFKVLGNTDRHSIKKNLIGALLFDSGETAEATRLKRTARRRYTRRKNRICYLQEIFSNEMAKVDDSFFHRLEESFLVEEDKKHERHPIFGNIVDEVAYHEKYPTIYHLRKKLVDSTDKADLRLIYLALAHMIKFRGHFLIEGDLNPDNSDVDKLFIQLVQTYNQLFEENPINASGVDAKAILSARLSKSRRLENLIAQLPGEKKNGLFGNLIALSLGLTPNFKSNFDLAEDAKLQLSKDTYDDDLDNLLAQIGDQYADLFLAAKNLSDAILLSDILRVNTEITKAPLSASMIKRYDEHHQDLTLLKALVRQQLPEKYKEIFFDQSKNGYAGYIDGGASQEEFYKFIKPILEKMDGTEELLVKLNREDLLRKQRTFDNGSIPHQIHLGELHAILRRQEDFYPFLKDNREKIEKILTFRIPYYVGPLARGNSRFAWMTRKSEETITPWNFEEVVDKGASAQSFIERMTNFDKNLPNEKVLPKHSLLYEYFTVYNELTKVKYVTEGMRKPAFLSGEQKKAIVDLLFKTNRKVTVKQLKEDYFKKIECFDSVEISGVEDRFNASLGTYHDLLKIIKDKDFLDNEENEDILEDIVLTLTLFEDREMIEERLKTYAHLFDDKVMKQLKRRRYTGWGRLSRKLINGIRDKQSGKTILDFLKSDGFANRNFMQLIHDDSLTFKEDIQKAQVSGQGDSLHEHIANLAGSPAIKKGILQTVKVVDELVKVMGRHKPENIVIEMARENQTTQKGQKNSRERMKRIEEGIKELGSQILKEHPVENTQLQNEKLYLYYLQNGRDMYVDQELDINRLSDYDVDHIVPQSFLKDDSIDNKVLTRSDKARGKSDNVPSEEVVKKMKNYWRQLLNAKLITQRKFDNLTKAERGGLSELDKAGFIKRQLVETRQITKHVAQILDSRMNTKYDENDKLIREVKVITLKSKLVSDFRKDFQFYKVREINNYHHAHDAYLNAVVGTALIKKYPKLESEFVYGDYKVYDVRKMIAKSEQEIGKATAKYFFYSNIMNFFKTEITLANGEIRKRPLIETNGETGEIVWDKGRDFATVRKVLSMPQVNIVKKTEVQTGGFSKESILPKRNSDKLIARKKDWDPKKYGGFDSPTVAYSVLVVAKVEKGKSKKLKSVKELLGITIMERSSFEKNPIDFLEAKGYKEVKKDLIIKLPKYSLFELENGRKRMLASAGELQKGNELALPSKYVNFLYLASHYEKLKGSPEDNEQKQLFVEQHKHYLDEIIEQISEFSKRVILADANLDKVLSAYNKHRDKPIREQAENIIHLFTLTNLGAPAAFKYFDTTIDRKRYTSTKEVLDATLIHQSITGLYETRIDLSQLGGDGGGGSEAAAKGSSGGTLQLEEEYRLFEPESTQKQEMDIWLKNFPQAWAETGGMGTAHCQAPVLIQLKATATPISIRQYPMPHEAYQGIKPHIRRMLDQGILKPCQSPWNTPLLPVKKPGTEDYRPVQDLREVNKRVEDIHPTVPNPYNLLSTLPPSHPWYTVLDLKDAFFCLRLHSESQLLFAFEWRDPEIGLSGQLTWTRLPQGFKNSPTLFNEALHSDLADFRVRYPALVLLQYVDDLLLAAATRTECLEGTKALLETLGNKGYRASAKKAQICLQEVTYLGYSLKDGQRWLTKARKEAILSIPVPKNSRQVREFLGKAGYCRLFIPGFAELAAPLYPLTRPGTLFQWGTEQQLAFEDIKKALLSSPALGLPDITKPFELFIDENSGFAKGVLVQKLGPWKRPVAYLSKKLDTVASGWPPCLRMVAAIAILVKDAGKLTLGQPLTILTSHPVEALVRQPPNKWLSNARMTHYQAMLLDAERVHFGPTVSLNPATLLPLPSGGNHHDCLQILAETHGTRPDLTDQPLPDADLTWYTDGSSFIRNGEREAGAAVTTESEVIWAAPLPPGTSAQRAELIALTQALKMAEGKKLTVYTDSRYAFATTHVHGEIYRRRGWLTSEGKEIKNKNEILALLEALFLPKRLSIIHCPGHQKGDSPQAKGNRLADDTAKKAATETHSSLTVLPAGKRTADGSEFEKRTADGSEFESPKKKAKVE

SEQ ID NO: 1279 - protein, 2095 aa, synthetic construct
MPAAKRVKLDGGDKKYSIGLDIGTNSVGWAVITDEYKVPSKKFKVLGNTDRHSIKKNLIGALLFDSGETAEATRLKRTARRRYTRRKNRICYLQEIFSNEMAKVDDSFFHRLEESFLVEEDKKHERHPIFGNIVDEVAYHEKYPTIYHLRKKLVDSTDKADLRLIYLALAHMIKFRGHFLIEGDLNPDNSDVDKLFIQLVQTYNQLFEENPINASGVDAKAILSARLSKSRRLENLIAQLPGEKKNGLFGNLIALSLGLTPNFKSNFDLAEDAKLQLSKDTYDDDLDNLLAQIGDQYADLFLAAKNLSDAILLSDILRVNTEITKAPLSASMIKRYDEHHQDLTLLKALVRQQLPEKYKEIFFDQSKNGYAGYIDGGASQEEFYKFIKPILEKMDGTEELLVKLNREDLLRKQRTFDNGSIPHQIHLGELHAILRRQEDFYPFLKDNREKIEKILTFRIPYYVGPLARGNSRFAWMTRKSEETITPWNFEEVVDKGASAQSFIERMTNFDKNLPNEKVLPKHSLLYEYFTVYNELTKVKYVTEGMRKPAFLSGEQKKAIVDLLFKTNRKVTVKQLKEDYFKKIECFDSVEISGVEDRFNASLGTYHDLLKIIKDKDFLDNEENEDILEDIVLTLTLFEDREMIEERLKTYAHLFDDKVMKQLKRRRYTGWGRLSRKLINGIRDKQSGKTILDFLKSDGFANRNFMQLIHDDSLTFKEDIQKAQVSGQGDSLHEHIANLAGSPAIKKGILQTVKVVDELVKVMGRHKPENIVIEMARENQTTQKGQKNSRERMKRIEEGIKELGSQILKEHPVENTQLQNEKLYLYYLQNGRDMYVDQELDINRLSDYDVDHIVPQSFLKDDSIDNKVLTRSDKARGKSDNVPSEEVVKKMKNYWRQLLNAKLITQRKFDNLTKAERGGLSELDKAGFIKRQLVETRQITKHVAQILDSRMNTKYDENDKLIREVKVITLKSKLVSDFRKDFQFYKVREINNYHHAHDAYLNAVVGTALIKKYPKLESEFVYGDYKVYDVRKMIAKSEQEIGKATAKYFFYSNIMNFFKTEITLANGEIRKRPLIETNGETGEIVWDKGRDFATVRKVLSMPQVNIVKKTEVQTGGFSKESILPKRNSDKLIARKKDWDPKKYGGFDSPTVAYSVLVVAKVEKGKSKKLKSVKELLGITIMERSSFEKNPIDFLEAKGYKEVKKDLIIKLPKYSLFELENGRKRMLASAGELQKGNELALPSKYVNFLYLASHYEKLKGSPEDNEQKQLFVEQHKHYLDEIIEQISEFSKRVILADANLDKVLSAYNKHRDKPIREQAENIIHLFTLTNLGAPAAFKYFDTTIDRKRYTSTKEVLDATLIHQSITGLYETRIDLSQLGGDGGEAAAKGGSGGGGGTLQLEEEYRLFEPESTQKQEMDIWLKNFPQAWAETGGMGTAHCQAPVLIQLKATATPISIRQYPMPHEAYQGIKPHIRRMLDQGILKPCQSPWNTPLLPVKKPGTEDYRPVQDLREVNKRVEDIHPTVPNPYNLLSTLPPSHPWYTVLDLKDAFFCLRLHSESQLLFAFEWRDPEIGLSGQLTWTRLPQGFKNSPTLFNEALHSDLADFRVRYPALVLLQYVDDLLLAAATRTECLEGTKALLETLGNKGYRASAKKAQICLQEVTYLGYSLKDGQRWLTKARKEAILSIPVPKNSRQVREFLGKAGYCRLFIPGFAELAAPLYPLTRPGTLFQWGTEQQLAFEDIKKALLSSPALGLPDITKPFELFIDENSGFAKGVLVQKLGPWKRPVAYLSKKLDTVASGWPPCLRMVAAIAILVKDAGKLTLGQPLTILTSHPVEALVRQPPNKWLSNARMTHYQAMLLDAERVHFGPTVSLNPATLLPLPSGGNHHDCLQILAETHGTRPDLTDQPLPDADLTWYTDGSSFIRNGEREAGAAVTTESEVIWAAPLPPGTSAQRAELIALTQALKMAEGKKLTVYTDSRYAFATTHVHGEIYRRRGWLTSEGKEIKNKNEILALLEALFLPKRLSIIHCPGHQKGDSPQAKGNRLADDTAKKAATETHSSLTVLPAGKRTADGSEFEKRTADGSEFESPKKKAKVE

SEQ ID NO: 1280 - protein, 2092 aa, synthetic construct
MPAAKRVKLDGGDKKYSIGLDIGTNSVGWAVITDEYKVPSKKFKVLGNTDRHSIKKNLIGALLFDSGETAEATRLKRTARRRYTRRKNRICYLQEIFSNEMAKVDDSFFHRLEESFLVEEDKKHERHPIFGNIVDEVAYHEKYPTIYHLRKKLVDSTDKADLRLIYLALAHMIKFRGHFLIEGDLNPDNSDVDKLFIQLVQTYNQLFEENPINASGVDAKAILSARLSKSRRLENLIAQLPGEKKNGLFGNLIALSLGLTPNFKSNFDLAEDAKLQLSKDTYDDDLDNLLAQIGDQYADLFLAAKNLSDAILLSDILRVNTEITKAPLSASMIKRYDEHHQDLTLLKALVRQQLPEKYKEIFFDQSKNGYAGYIDGGASQEEFYKFIKPILEKMDGTEELLVKLNREDLLRKQRTFDNGSIPHQIHLGELHAILRRQEDFYPFLKDNREKIEKILTFRIPYYVGPLARGNSRFAWMTRKSEETITPWNFEEVVDKGASAQSFIERMTNFDKNLPNEKVLPKHSLLYEYFTVYNELTKVKYVTEGMRKPAFLSGEQKKAIVDLLFKTNRKVTVKQLKEDYFKKIECFDSVEISGVEDRFNASLGTYHDLLKIIKDKDFLDNEENEDILEDIVLTLTLFEDREMIEERLKTYAHLFDDKVMKQLKRRRYTGWGRLSRKLINGIRDKQSGKTILDFLKSDGFANRNFMQLIHDDSLTFKEDIQKAQVSGQGDSLHEHIANLAGSPAIKKGILQTVKVVDELVKVMGRHKPENIVIEMARENQTTQKGQKNSRERMKRIEEGIKELGSQILKEHPVENTQLQNEKLYLYYLQNGRDMYVDQELDINRLSDYDVDHIVPQSFLKDDSIDNKVLTRSDKARGKSDNVPSEEVVKKMKNYWRQLLNAKLITQRKFDNLTKAERGGLSELDKAGFIKRQLVETRQITKHVAQILDSRMNTKYDENDKLIREVKVITLKSKLVSDFRKDFQFYKVREINNYHHAHDAYLNAVVGTALIKKYPKLESEFVYGDYKVYDVRKMIAKSEQEIGKATAKYFFYSNIMNFFKTEITLANGEIRKRPLIETNGETGEIVWDKGRDFATVRKVLSMPQVNIVKKTEVQTGGFSKESILPKRNSDKLIARKKDWDPKKYGGFDSPTVAYSVLVVAKVEKGKSKKLKSVKELLGITIMERSSFEKNPIDFLEAKGYKEVKKDLIIKLPKYSLFELENGRKRMLASAGELQKGNELALPSKYVNFLYLASHYEKLKGSPEDNEQKQLFVEQHKHYLDEIIEQISEFSKRVILADANLDKVLSAYNKHRDKPIREQAENIIHLFTLTNLGAPAAFKYFDTTIDRKRYTSTKEVLDATLIHQSITGLYETRIDLSQLGGDGGGGGEAAAKGGTLQLEEEYRLFEPESTQKQEMDIWLKNFPQAWAETGGMGTAHCQAPVLIQLKATATPISIRQYPMPHEAYQGIKPHIRRMLDQGILKPCQSPWNTPLLPVKKPGTEDYRPVQDLREVNKRVEDIHPTVPNPYNLLSTLPPSHPWYTVLDLKDAFFCLRLHSESQLLFAFEWRDPEIGLSGQLTWTRLPQGFKNSPTLFNEALHSDLADFRVRYPALVLLQYVDDLLLAAATRTECLEGTKALLETLGNKGYRASAKKAQICLQEVTYLGYSLKDGQRWLTKARKEAILSIPVPKNSRQVREFLGKAGYCRLFIPGFAELAAPLYPLTRPGTLFQWGTEQQLAFEDIKKALLSSPALGLPDITKPFELFIDENSGFAKGVLVQKLGPWKRPVAYLSKKLDTVASGWPPCLRMVAAIAILVKDAGKLTLGQPLTILTSHPVEALVRQPPNKWLSNARMTHYQAMLLDAERVHFGPTVSLNPATLLPLPSGGNHHDCLQILAETHGTRPDLTDQPLPDADLTWYTDGSSFIRNGEREAGAAVTTESEVIWAAPLPPGTSAQRAELIALTQALKMAEGKKLTVYTDSRYAFATTHVHGEIYRRRGWLTSEGKEIKNKNEILALLEALFLPKRLSIIHCPGHQKGDSPQAKGNRLADDTAKKAATETHSSLTVLPAGKRTADGSEFEKRTADGSEFESPKKKAKVE

SEQ ID NO: 1281 - protein, 2090 aa, synthetic construct
MPAAKRVKLDGGDKKYSIGLDIGTNSVGWAVITDEYKVPSKKFKVLGNTDRHSIKKNLIGALLFDSGETAEATRLKRTARRRYTRRKNRICYLQEIFSNEMAKVDDSFFHRLEESFLVEEDKKHERHPIFGNIVDEVAYHEKYPTIYHLRKKLVDSTDKADLRLIYLALAHMIKFRGHFLIEGDLNPDNSDVDKLFIQLVQTYNQLFEENPINASGVDAKAILSARLSKSRRLENLIAQLPGEKKNGLFGNLIALSLGLTPNFKSNFDLAEDAKLQLSKDTYDDDLDNLLAQIGDQYADLFLAAKNLSDAILLSDILRVNTEITKAPLSASMIKRYDEHHQDLTLLKALVRQQLPEKYKEIFFDQSKNGYAGYIDGGASQEEFYKFIKPILEKMDGTEELLVKLNREDLLRKQRTFDNGSIPHQIHLGELHAILRRQEDFYPFLKDNREKIEKILTFRIPYYVGPLARGNSRFAWMTRKSEETITPWNFEEVVDKGASAQSFIERMTNFDKNLPNEKVLPKHSLLYEYFTVYNELTKVKYVTEGMRKPAFLSGEQKKAIVDLLFKTNRKVTVKQLKEDYFKKIECFDSVEISGVEDRFNASLGTYHDLLKIIKDKDFLDNEENEDILEDIVLTLTLFEDREMIEERLKTYAHLFDDKVMKQLKRRRYTGWGRLSRKLINGIRDKQSGKTILDFLKSDGFANRNFMQLIHDDSLTFKEDIQKAQVSGQGDSLHEHIANLAGSPAIKKGILQTVKVVDELVKVMGRHKPENIVIEMARENQTTQKGQKNSRERMKRIEEGIKELGSQILKEHPVENTQLQNEKLYLYYLQNGRDMYVDQELDINRLSDYDVDHIVPQSFLKDDSIDNKVLTRSDKARGKSDNVPSEEVVKKMKNYWRQLLNAKLITQRKFDNLTKAERGGLSELDKAGFIKRQLVETRQITKHVAQILDSRMNTKYDENDKLIREVKVITLKSKLVSDFRKDFQFYKVREINNYHHAHDAYLNAVVGTALIKKYPKLESEFVYGDYKVYDVRKMIAKSEQEIGKATAKYFFYSNIMNFFKTEITLANGEIRKRPLIETNGETGEIVWDKGRDFATVRKVLSMPQVNIVKKTEVQTGGFSKESILPKRNSDKLIARKKDWDPKKYGGFDSPTVAYSVLVVAKVEKGKSKKLKSVKELLGITIMERSSFEKNPIDFLEAKGYKEVKKDLIIKLPKYSLFELENGRKRMLASAGELQKGNELALPSKYVNFLYLASHYEKLKGSPEDNEQKQLFVEQHKHYLDEIIEQISEFSKRVILADANLDKVLSAYNKHRDKPIREQAENIIHLFTLTNLGAPAAFKYFDTTIDRKRYTSTKEVLDATLIHQSITGLYETRIDLSQLGGDGGGGGGGSGGTLQLEEEYRLFEPESTQKQEMDIWLKNFPQAWAETGGMGTAHCQAPVLIQLKATATPISIRQYPMPHEAYQGIKPHIRRMLDQGILKPCQSPWNTPLLPVKKPGTEDYRPVQDLREVNKRVEDIHPTVPNPYNLLSTLPPSHPWYTVLDLKDAFFCLRLHSESQLLFAFEWRDPEIGLSGQLTWTRLPQGFKNSPTLFNEALHSDLADFRVRYPALVLLQYVDDLLLAAATRTECLEGTKALLETLGNKGYRASAKKAQICLQEVTYLGYSLKDGQRWLTKARKEAILSIPVPKNSRQVREFLGKAGYCRLFIPGFAELAAPLYPLTRPGTLFQWGTEQQLAFEDIKKALLSSPALGLPDITKPFELFIDENSGFAKGVLVQKLGPWKRPVAYLSKKLDTVASGWPPCLRMVAAIAILVKDAGKLTLGQPLTILTSHPVEALVRQPPNKWLSNARMTHYQAMLLDAERVHFGPTVSLNPATLLPLPSGGNHHDCLQILAETHGTRPDLTDQPLPDADLTWYTDGSSFIRNGEREAGAAVTTESEVIWAAPLPPGTSAQRAELIALTQALKMAEGKKLTVYTDSRYAFATTHVHGEIYRRRGWLTSEGKEIKNKNEILALLEALFLPKRLSIIHCPGHQKGDSPQAKGNRLADDTAKKAATETHSSLTVLPAGKRTADGSEFEKRTADGSEFESPKKKAKVE

SEQ ID NO: 1282 - protein, 2211 aa, synthetic construct
MPAAKRVKLDGGDKKYSIGLDIGTNSVGWAVITDEYKVPSKKFKVLGNTDRHSIKKNLIGALLFDSGETAEATRLKRTARRRYTRRKNRICYLQEIFSNEMAKVDDSFFHRLEESFLVEEDKKHERHPIFGNIVDEVAYHEKYPTIYHLRKKLVDSTDKADLRLIYLALAHMIKFRGHFLIEGDLNPDNSDVDKLFIQLVQTYNQLFEENPINASGVDAKAILSARLSKSRRLENLIAQLPGEKKNGLFGNLIALSLGLTPNFKSNFDLAEDAKLQLSKDTYDDDLDNLLAQIGDQYADLFLAAKNLSDAILLSDILRVNTEITKAPLSASMIKRYDEHHQDLTLLKALVRQQLPEKYKEIFFDQSKNGYAGYIDGGASQEEFYKFIKPILEKMDGTEELLVKLNREDLLRKQRTFDNGSIPHQIHLGELHAILRRQEDFYPFLKDNREKIEKILTFRIPYYVGPLARGNSRFAWMTRKSEETITPWNFEEVVDKGASAQSFIERMTNFDKNLPNEKVLPKHSLLYEYFTVYNELTKVKYVTEGMRKPAFLSGEQKKAIVDLLFKTNRKVTVKQLKEDYFKKIECFDSVEISGVEDRFNASLGTYHDLLKIIKDKDFLDNEENEDILEDIVLTLTLFEDREMIEERLKTYAHLFDDKVMKQLKRRRYTGWGRLSRKLINGIRDKQSGKTILDFLKSDGFANRNFMQLIHDDSLTFKEDIQKAQVSGQGDSLHEHIANLAGSPAIKKGILQTVKVVDELVKVMGRHKPENIVIEMARENQTTQKGQKNSRERMKRIEEGIKELGSQILKEHPVENTQLQNEKLYLYYLQNGRDMYVDQELDINRLSDYDVDHIVPQSFLKDDSIDNKVLTRSDKARGKSDNVPSEEVVKKMKNYWRQLLNAKLITQRKFDNLTKAERGGLSELDKAGFIKRQLVETRQITKHVAQILDSRMNTKYDENDKLIREVKVITLKSKLVSDFRKDFQFYKVREINNYHHAHDAYLNAVVGTALIKKYPKLESEFVYGDYKVYDVRKMIAKSEQEIGKATAKYFFYSNIMNFFKTEITLANGEIRKRPLIETNGETGEIVWDKGRDFATVRKVLSMPQVNIVKKTEVQTGGFSKESILPKRNSDKLIARKKDWDPKKYGGFDSPTVAYSVLVVAKVEKGKSKKLKSVKELLGITIMERSSFEKNPIDFLEAKGYKEVKKDLIIKLPKYSLFELENGRKRMLASAGELQKGNELALPSKYVNFLYLASHYEKLKGSPEDNEQKQLFVEQHKHYLDEIIEQISEFSKRVILADANLDKVLSAYNKHRDKPIREQAENIIHLFTLTNLGAPAAFKYFDTTIDRKRYTSTKEVLDATLIHQSITGLYETRIDLSQLGGDGGAEAAAKEAAAKEAAAKEAAAKALEAEAAAKEAAAKEAAAKEAAAKAGGMNPLQLLQPLPAEIKGTKLLAHWNSGATITCIPESFLEDEQPIKKTLIKTIHGEKQQNVYYVTFKVKGRKVEAEVIASPYEYILLSPTDVPWLTQQPLQLTILVPLQEYQEKILSKTALPEDQKQQLKTLFVKYDNLWQHWENQVGHRKIRPHNIATGDYPPRPQKQYPINPKAKPSIQIVIDDLLKQGVLTPQNSTMNTPVYPVPKPDGRWRMVLDYREVNKTIPLTAAQNQHSAGILATIVRQKYKTTLDLANGFWAHPITPESYWLTAFTWQGKQYCWTRLPQGFLNSPALFTADVVDLLKEIPNVQVYVDDIYLSHDDPKEHVQQLEKVFQILLQAGYVVSLKKSEIGQKTVEFLGFNITKEGRGLTDTFKTKLLNITPPKDLKQLQSILGLLNFARNFIPNFAELVQPLYNLIASAKGKYIEWSEENTKQLNMVIEALNTASNLEERLPEQRLVIKVNTSPSAGYVRYYNETGKKPIMYLNYVFSKAELKFSMLEKLLTTMHKALIKAMDLAMGQEILVYSPIVSMTKIQKTPLPERKALPIRWITWMTYLEDPRIQFHYDKTLPELKHIPDVYTSSQSPVKHPSQYEGVFYTDGSAIKSPDPTKSNNAGMGIVHATYKPEYQVLNQWSIPLGNHTAQMAEIAAVEFACKKALKIPGPVLVITDSFYVAESANKELPYWKSNGFVNNKKKPLKHISKWKSIAECLSMKPDITIQHEKGISLQIPVFILKGNALADKLATQGSYVVNAGKRTADGSEFEKRTADGSEFESPKKKAKVE

SEQ ID NO: 1283 - protein, 2190 aa, synthetic construct
MPAAKRVKLDGGDKKYSIGLDIGTNSVGWAVITDEYKVPSKKFKVLGNTDRHSIKKNLIGALLFDSGETAEATRLKRTARRRYTRRKNRICYLQEIFSNEMAKVDDSFFHRLEESFLVEEDKKHERHPIFGNIVDEVAYHEKYPTIYHLRKKLVDSTDKADLRLIYLALAHMIKFRGHFLIEGDLNPDNSDVDKLFIQLVQTYNQLFEENPINASGVDAKAILSARLSKSRRLENLIAQLPGEKKNGLFGNLIALSLGLTPNFKSNFDLAEDAKLQLSKDTYDDDLDNLLAQIGDQYADLFLAAKNLSDAILLSDILRVNTEITKAPLSASMIKRYDEHHQDLTLLKALVRQQLPEKYKEIFFDQSKNGYAGYIDGGASQEEFYKFIKPILEKMDGTEELLVKLNREDLLRKQRTFDNGSIPHQIHLGELHAILRRQEDFYPFLKDNREKIEKILTFRIPYYVGPLARGNSRFAWMTRKSEETITPWNFEEVVDKGASAQSFIERMTNFDKNLPNEKVLPKHSLLYEYFTVYNELTKVKYVTEGMRKPAFLSGEQKKAIVDLLFKTNRKVTVKQLKEDYFKKIECFDSVEISGVEDRFNASLGTYHDLLKIIKDKDFLDNEENEDILEDIVLTLTLFEDREMIEERLKTYAHLFDDKVMKQLKRRRYTGWGRLSRKLINGIRDKQSGKTILDFLKSDGFANRNFMQLIHDDSLTFKEDIQKAQVSGQGDSLHEHIANLAGSPAIKKGILQTVKVVDELVKVMGRHKPENIVIEMARENQTTQKGQKNSRERMKRIEEGIKELGSQILKEHPVENTQLQNEKLYLYYLQNGRDMYVDQELDINRLSDYDVDHIVPQSFLKDDSIDNKVLTRSDKARGKSDNVPSEEVVKKMKNYWRQLLNAKLITQRKFDNLTKAERGGLSELDKAGFIKRQLVETRQITKHVAQILDSRMNTKYDENDKLIREVKVITLKSKLVSDFRKDFQFYKVREINNYHHAHDAYLNAVVGTALIKKYPKLESEFVYGDYKVYDVRKMIAKSEQEIGKATAKYFFYSNIMNFFKTEITLANGEIRKRPLIETNGETGEIVWDKGRDFATVRKVLSMPQVNIVKKTEVQTGGFSKESILPKRNSDKLIARKKDWDPKKYGGFDSPTVAYSVLVVAKVEKGKSKKLKSVKELLGITIMERSSFEKNPIDFLEAKGYKEVKKDLIIKLPKYSLFELENGRKRMLASAGELQKGNELALPSKYVNFLYLASHYEKLKGSPEDNEQKQLFVEQHKHYLDEIIEQISEFSKRVILADANLDKVLSAYNKHRDKPIREQAENIIHLFTLTNLGAPAAFKYFDTTIDRKRYTSTKEVLDATLIHQSITGLYETRIDLSQLGGDGGEAAAKEAAAKEAAAKEAAAKEAAAKGGMNPLQLLQPLPAEIKGTKLLAHWNSGATITCIPESFLEDEQPIKKTLIKTIHGEKQQNVYYVTFKVKGRKVEAEVIASPYEYILLSPTDVPWLTQQPLQLTILVPLQEYQEKILSKTALPEDQKQQLKTLFVKYDNLWQHWENQVGHRKIRPHNIATGDYPPRPQKQYPINPKAKPSIQIVIDDLLKQGVLTPQNSTMNTPVYPVPKPDGRWRMVLDYREVNKTIPLTAAQNQHSAGILATIVRQKYKTTLDLANGFWAHPITPESYWLTAFTWQGKQYCWTRLPQGFLNSPALFTADVVDLLKEIPNVQVYVDDIYLSHDDPKEHVQQLEKVFQILLQAGYVVSLKKSEIGQKTVEFLGFNITKEGRGLTDTFKTKLLNITPPKDLKQLQSILGLLNFARNFIPNFAELVQPLYNLIASAKGKYIEWSEENTKQLNMVIEALNTASNLEERLPEQRLVIKVNTSPSAGYVRYYNETGKKPIMYLNYVFSKAELKFSMLEKLLTTMHKALIKAMDLAMGQEILVYSPIVSMTKIQKTPLPERKALPIRWITWMTYLEDPRIQFHYDKTLPELKHIPDVYTSSQSPVKHPSQYEGVFYTDGSAIKSPDPTKSNNAGMGIVHATYKPEYQVLNQWSIPLGNHTAQMAEIAAVEFACKKALKIPGPVLVITDSFYVAESANKELPYWKSNGFVNNKKKPLKHISKWKSIAECLSMKPDITIQHEKGISLQIPVFILKGNALADKLATQGSYVVNAGKRTADGSEFEKRTADGSEFESPKKKAKVE

SEQ ID NO: 1284 - protein, 2183 aa, synthetic construct
MPAAKRVKLDGGDKKYSIGLDIGTNSVGWAVITDEYKVPSKKFKVLGNTDRHSIKKNLIGALLFDSGETAEATRLKRTARRRYTRRKNRICYLQEIFSNEMAKVDDSFFHRLEESFLVEEDKKHERHPIFGNIVDEVAYHEKYPTIYHLRKKLVDSTDKADLRLIYLALAHMIKFRGHFLIEGDLNPDNSDVDKLFIQLVQTYNQLFEENPINASGVDAKAILSARLSKSRRLENLIAQLPGEKKNGLFGNLIALSLGLTPNFKSNFDLAEDAKLQLSKDTYDDDLDNLLAQIGDQYADLFLAAKNLSDAILLSDILRVNTEITKAPLSASMIKRYDEHHQDLTLLKALVRQQLPEKYKEIFFDQSKNGYAGYIDGGASQEEFYKFIKPILEKMDGTEELLVKLNREDLLRKQRTFDNGSIPHQIHLGELHAILRRQEDFYPFLKDNREKIEKILTFRIPYYVGPLARGNSRFAWMTRKSEETITPWNFEEVVDKGASAQSFIERMTNFDKNLPNEKVLPKHSLLYEYFTVYNELTKVKYVTEGMRKPAFLSGEQKKAIVDLLFKTNRKVTVKQLKEDYFKKIECFDSVEISGVEDRFNASLGTYHDLLKIIKDKDFLDNEENEDILEDIVLTLTLFEDREMIEERLKTYAHLFDDKVMKQLKRRRYTGWGRLSRKLINGIRDKQSGKTILDFLKSDGFANRNFMQLIHDDSLTFKEDIQKAQVSGQGDSLHEHIANLAGSPAIKKGILQTVKVVDELVKVMGRHKPENIVIEMARENQTTQKGQKNSRERMKRIEEGIKELGSQILKEHPVENTQLQNEKLYLYYLQNGRDMYVDQELDINRLSDYDVDHIVPQSFLKDDSIDNKVLTRSDKARGKSDNVPSEEVVKKMKNYWRQLLNAKLITQRKFDNLTKAERGGLSELDKAGFIKRQLVETRQITKHVAQILDSRMNTKYDENDKLIREVKVITLKSKLVSDFRKDFQFYKVREINNYHHAHDAYLNAVVGTALIKKYPKLESEFVYGDYKVYDVRKMIAKSEQEIGKATAKYFFYSNIMNFFKTEITLANGEIRKRPLIETNGETGEIVWDKGRDFATVRKVLSMPQVNIVKKTEVQTGGFSKESILPKRNSDKLIARKKDWDPKKYGGFDSPTVAYSVLVVAKVEKGKSKKLKSVKELLGITIMERSSFEKNPIDFLEAKGYKEVKKDLIIKLPKYSLFELENGRKRMLASAGELQKGNELALPSKYVNFLYLASHYEKLKGSPEDNEQKQLFVEQHKHYLDEIIEQISEFSKRVILADANLDKVLSAYNKHRDKPIREQAENIIHLFTLTNLGAPAAFKYFDTTIDRKRYTSTKEVLDATLIHQSITGLYETRIDLSQLGGDGGGSSGSSGSSGSSGSSGSSGGMNPLQLLQPLPAEIKGTKLLAHWNSGATITCIPESFLEDEQPIKKTLIKTIHGEKQQNVYYVTFKVKGRKVEAEVIASPYEYILLSPTDVPWLTQQPLQLTILVPLQEYQEKILSKTALPEDQKQQLKTLFVKYDNLWQHWENQVGHRKIRPHNIATGDYPPRPQKQYPINPKAKPSIQIVIDDLLKQGVLTPQNSTMNTPVYPVPKPDGRWRMVLDYREVNKTIPLTAAQNQHSAGILATIVRQKYKTTLDLANGFWAHPITPESYWLTAFTWQGKQYCWTRLPQGFLNSPALFTADVVDLLKEIPNVQVYVDDIYLSHDDPKEHVQQLEKVFQILLQAGYVVSLKKSEIGQKTVEFLGFNITKEGRGLTDTFKTKLLNITPPKDLKQLQSILGLLNFARNFIPNFAELVQPLYNLIASAKGKYIEWSEENTKQLNMVIEALNTASNLEERLPEQRLVIKVNTSPSAGYVRYYNETGKKPIMYLNYVFSKAELKFSMLEKLLTTMHKALIKAMDLAMGQEILVYSPIVSMTKIQKTPLPERKALPIRWITWMTYLEDPRIQFHYDKTLPELKHIPDVYTSSQSPVKHPSQYEGVFYTDGSAIKSPDPTKSNNAGMGIVHATYKPEYQVLNQWSIPLGNHTAQMAEIAAVEFACKKALKIPGPVLVITDSFYVAESANKELPYWKSNGFVNNKKKPLKHISKWKSIAECLSMKPDITIQHEKGISLQIPVFILKGNALADKLATQGSYVVNAGKRTADGSEFEKRTADGSEFESPKKKAKVE

SEQ ID NO: 1285 - protein, 2176 aa, synthetic construct
MPAAKRVKLDGGDKKYSIGLDIGTNSVGWAVITDEYKVPSKKFKVLGNTDRHSIKKNLIGALLFDSGETAEATRLKRTARRRYTRRKNRICYLQEIFSNEMAKVDDSFFHRLEESFLVEEDKKHERHPIFGNIVDEVAYHEKYPTIYHLRKKLVDSTDKADLRLIYLALAHMIKFRGHFLIEGDLNPDNSDVDKLFIQLVQTYNQLFEENPINASGVDAKAILSARLSKSRRLENLIAQLPGEKKNGLFGNLIALSLGLTPNFKSNFDLAEDAKLQLSKDTYDDDLDNLLAQIGDQYADLFLAAKNLSDAILLSDILRVNTEITKAPLSASMIKRYDEHHQDLTLLKALVRQQLPEKYKEIFFDQSKNGYAGYIDGGASQEEFYKFIKPILEKMDGTEELLVKLNREDLLRKQRTFDNGSIPHQIHLGELHAILRRQEDFYPFLKDNREKIEKILTFRIPYYVGPLARGNSRFAWMTRKSEETITPWNFEEVVDKGASAQSFIERMTNFDKNLPNEKVLPKHSLLYEYFTVYNELTKVKYVTEGMRKPAFLSGEQKKAIVDLLFKTNRKVTVKQLKEDYFKKIECFDSVEISGVEDRFNASLGTYHDLLKIIKDKDFLDNEENEDILEDIVLTLTLFEDREMIEERLKTYAHLFDDKVMKQLKRRRYTGWGRLSRKLINGIRDKQSGKTILDFLKSDGFANRNFMQLIHDDSLTFKEDIQKAQVSGQGDSLHEHIANLAGSPAIKKGILQTVKVVDELVKVMGRHKPENIVIEMARENQTTQKGQKNSRERMKRIEEGIKELGSQILKEHPVENTQLQNEKLYLYYLQNGRDMYVDQELDINRLSDYDVDHIVPQSFLKDDSIDNKVLTRSDKARGKSDNVPSEEVVKKMKNYWRQLLNAKLITQRKFDNLTKAERGGLSELDKAGFIKRQLVETRQITKHVAQILDSRMNTKYDENDKLIREVKVITLKSKLVSDFRKDFQFYKVREINNYHHAHDAYLNAVVGTALIKKYPKLESEFVYGDYKVYDVRKMIAKSEQEIGKATAKYFFYSNIMNFFKTEITLANGEIRKRPLIETNGETGEIVWDKGRDFATVRKVLSMPQVNIVKKTEVQTGGFSKESILPKRNSDKLIARKKDWDPKKYGGFDSPTVAYSVLVVAKVEKGKSKKLKSVKELLGITIMERSSFEKNPIDFLEAKGYKEVKKDLIIKLPKYSLFELENGRKRMLASAGELQKGNELALPSKYVNFLYLASHYEKLKGSPEDNEQKQLFVEQHKHYLDEIIEQISEFSKRVILADANLDKVLSAYNKHRDKPIREQAENIIHLFTLTNLGAPAAFKYFDTTIDRKRYTSTKEVLDATLIHQSITGLYETRIDLSQLGGDGGPAPAPAPAPAPGGMNPLQLLQPLPAEIKGTKLLAHWNSGATITCIPESFLEDEQPIKKTLIKTIHGEKQQNVYYVTFKVKGRKVEAEVIASPYEYILLSPTDVPWLTQQPLQLTILVPLQEYQEKILSKTALPEDQKQQLKTLFVKYDNLWQHWENQVGHRKIRPHNIATGDYPPRPQKQYPINPKAKPSIQIVIDDLLKQGVLTPQNSTMNTPVYPVPKPDGRWRMVLDYREVNKTIPLTAAQNQHSAGILATIVRQKYKTTLDLANGFWAHPITPESYWLTAFTWQGKQYCWTRLPQGFLNSPALFTADVVDLLKEIPNVQVYVDDIYLSHDDPKEHVQQLEKVFQILLQAGYVVSLKKSEIGQKTVEFLGFNITKEGRGLTDTFKTKLLNITPPKDLKQLQSILGLLNFARNFIPNFAELVQPLYNLIASAKGKYIEWSEENTKQLNMVIEALNTASNLEERLPEQRLVIKVNTSPSAGYVRYYNETGKKPIMYLNYVFSKAELKFSMLEKLLTTMHKALIKAMDLAMGQEILVYSPIVSMTKIQKTPLPERKALPIRWITWMTYLEDPRIQFHYDKTLPELKHIPDVYTSSQSPVKHPSQYEGVFYTDGSAIKSPDPTKSNNAGMGIVHATYKPEYQVLNQWSIPLGNHTAQMAEIAAVEFACKKALKIPGPVLVITDSFYVAESANKELPYWKSNGFVNNKKKPLKHISKWKSIAECLSMKPDITIQHEKGISLQIPVFILKGNALADKLATQGSYVVNAGKRTADGSEFEKRTADGSEFESPKKKAKVE

SEQ ID NO: 1286 - protein, 2176 aa, synthetic construct
MPAAKRVKLDGGDKKYSIGLDIGTNSVGWAVITDEYKVPSKKFKVLGNTDRHSIKKNLIGALLFDSGETAEATRLKRTARRRYTRRKNRICYLQEIFSNEMAKVDDSFFHRLEESFLVEEDKKHERHPIFGNIVDEVAYHEKYPTIYHLRKKLVDSTDKADLRLIYLALAHMIKFRGHFLIEGDLNPDNSDVDKLFIQLVQTYNQLFEENPINASGVDAKAILSARLSKSRRLENLIAQLPGEKKNGLFGNLIALSLGLTPNFKSNFDLAEDAKLQLSKDTYDDDLDNLLAQIGDQYADLFLAAKNLSDAILLSDILRVNTEITKAPLSASMIKRYDEHHQDLTLLKALVRQQLPEKYKEIFFDQSKNGYAGYIDGGASQEEFYKFIKPILEKMDGTEELLVKLNREDLLRKQRTFDNGSIPHQIHLGELHAILRRQEDFYPFLKDNREKIEKILTFRIPYYVGPLARGNSRFAWMTRKSEETITPWNFEEVVDKGASAQSFIERMTNFDKNLPNEKVLPKHSLLYEYFTVYNELTKVKYVTEGMRKPAFLSGEQKKAIVDLLFKTNRKVTVKQLKEDYFKKIECFDSVEISGVEDRFNASLGTYHDLLKIIKDKDFLDNEENEDILEDIVLTLTLFEDREMIEERLKTYAHLFDDKVMKQLKRRRYTGWGRLSRKLINGIRDKQSGKTILDFLKSDGFANRNFMQLIHDDSLTFKEDIQKAQVSGQGDSLHEHIANLAGSPAIKKGILQTVKVVDELVKVMGRHKPENIVIEMARENQTTQKGQKNSRERMKRIEEGIKELGSQILKEHPVENTQLQNEKLYLYYLQNGRDMYVDQELDINRLSDYDVDHIVPQSFLKDDSIDNKVLTRSDKARGKSDNVPSEEVVKKMKNYWRQLLNAKLITQRKFDNLTKAERGGLSELDKAGFIKRQLVETRQITKHVAQILDSRMNTKYDENDKLIREVKVITLKSKLVSDFRKDFQFYKVREINNYHHAHDAYLNAVVGTALIKKYPKLESEFVYGDYKVYDVRKMIAKSEQEIGKATAKYFFYSNIMNFFKTEITLANGEIRKRPLIETNGETGEIVWDKGRDFATVRKVLSMPQVNIVKKTEVQTGGFSKESILPKRNSDKLIARKKDWDPKKYGGFDSPTVAYSVLVVAKVEKGKSKKLKSVKELLGITIMERSSFEKNPIDFLEAKGYKEVKKDLIIKLPKYSLFELENGRKRMLASAGELQKGNELALPSKYVNFLYLASHYEKLKGSPEDNEQKQLFVEQHKHYLDEIIEQISEFSKRVILADANLDKVLSAYNKHRDKPIREQAENIIHLFTLTNLGAPAAFKYFDTTIDRKRYTSTKEVLDATLIHQSITGLYETRIDLSQLGGDGGGGSPAPEAAAKGGMNPLQLLQPLPAEIKGTKLLAHWNSGATITCIPESFLEDEQPIKKTLIKTIHGEKQQNVYYVTFKVKGRKVEAEVIASPYEYILLSPTDVPWLTQQPLQLTILVPLQEYQEKILSKTALPEDQKQQLKTLFVKYDNLWQHWENQVGHRKIRPHNIATGDYPPRPQKQYPINPKAKPSIQIVIDDLLKQGVLTPQNSTMNTPVYPVPKPDGRWRMVLDYREVNKTIPLTAAQNQHSAGILATIVRQKYKTTLDLANGFWAHPITPESYWLTAFTWQGKQYCWTRLPQGFLNSPALFTADVVDLLKEIPNVQVYVDDIYLSHDDPKEHVQQLEKVFQILLQAGYVVSLKKSEIGQKTVEFLGFNITKEGRGLTDTFKTKLLNITPPKDLKQLQSILGLLNFARNFIPNFAELVQPLYNLIASAKGKYIEWSEENTKQLNMVIEALNTASNLEERLPEQRLVIKVNTSPSAGYVRYYNETGKKPIMYLNYVFSKAELKFSMLEKLLTTMHKALIKAMDLAMGQEILVYSPIVSMTKIQKTPLPERKALPIRWITWMTYLEDPRIQFHYDKTLPELKHIPDVYTSSQSPVKHPSQYEGVFYTDGSAIKSPDPTKSNNAGMGIVHATYKPEYQVLNQWSIPLGNHTAQMAEIAAVEFACKKALKIPGPVLVITDSFYVAESANKELPYWKSNGFVNNKKKPLKHISKWKSIAECLSMKPDITIQHEKGISLQIPVFILKGNALADKLATQGSYVVNAGKRTADGSEFEKRTADGSEFESPKKKAKVE

SEQ ID NO: 1287 - protein, 2176 aa, synthetic construct
MPAAKRVKLDGGDKKYSIGLDIGTNSVGWAVITDEYKVPSKKFKVLGNTDRHSIKKNLIGALLFDSGETAEATRLKRTARRRYTRRKNRICYLQEIFSNEMAKVDDSFFHRLEESFLVEEDKKHERHPIFGNIVDEVAYHEKYPTIYHLRKKLVDSTDKADLRLIYLALAHMIKFRGHFLIEGDLNPDNSDVDKLFIQLVQTYNQLFEENPINASGVDAKAILSARLSKSRRLENLIAQLPGEKKNGLFGNLIALSLGLTPNFKSNFDLAEDAKLQLSKDTYDDDLDNLLAQIGDQYADLFLAAKNLSDAILLSDILRVNTEITKAPLSASMIKRYDEHHQDLTLLKALVRQQLPEKYKEIFFDQSKNGYAGYIDGGASQEEFYKFIKPILEKMDGTEELLVKLNREDLLRKQRTFDNGSIPHQIHLGELHAILRRQEDFYPFLKDNREKIEKILTFRIPYYVGPLARGNSRFAWMTRKSEETITPWNFEEVVDKGASAQSFIERMTNFDKNLPNEKVLPKHSLLYEYFTVYNELTKVKYVTEGMRKPAFLSGEQKKAIVDLLFKTNRKVTVKQLKEDYFKKIECFDSVEISGVEDRFNASLGTYHDLLKIIKDKDFLDNEENEDILEDIVLTLTLFEDREMIEERLKTYAHLFDDKVMKQLKRRRYTGWGRLSRKLINGIRDKQSGKTILDFLKSDGFANRNFMQLIHDDSLTFKEDIQKAQVSGQGDSLHEHIANLAGSPAIKKGILQTVKVVDELVKVMGRHKPENIVIEMARENQTTQKGQKNSRERMKRIEEGIKELGSQILKEHPVENTQLQNEKLYLYYLQNGRDMYVDQELDINRLSDYDVDHIVPQSFLKDDSIDNKVLTRSDKARGKSDNVPSEEVVKKMKNYWRQLLNAKLITQRKFDNLTKAERGGLSELDKAGFIKRQLVETRQITKHVAQILDSRMNTKYDENDKLIREVKVITLKSKLVSDFRKDFQFYKVREINNYHHAHDAYLNAVVGTALIKKYPKLESEFVYGDYKVYDVRKMIAKSEQEIGKATAKYFFYSNIMNFFKTEITLANGEIRKRPLIETNGETGEIVWDKGRDFATVRKVLSMPQVNIVKKTEVQTGGFSKESILPKRNSDKLIARKKDWDPKKYGGFDSPTVAYSVLVVAKVEKGKSKKLKSVKELLGITIMERSSFEKNPIDFLEAKGYKEVKKDLIIKLPKYSLFELENGRKRMLASAGELQKGNELALPSKYVNFLYLASHYEKLKGSPEDNEQKQLFVEQHKHYLDEIIEQISEFSKRVILADANLDKVLSAYNKHRDKPIREQAENIIHLFTLTNLGAPAAFKYFDTTIDRKRYTSTKEVLDATLIHQSITGLYETRIDLSQLGGDGGEAAAKGGSPAPGGMNPLQLLQPLPAEIKGTKLLAHWNSGATITCIPESFLEDEQPIKKTLIKTIHGEKQQNVYYVTFKVKGRKVEAEVIASPYEYILLSPTDVPWLTQQPLQLTILVPLQEYQEKILSKTALPEDQKQQLKTLFVKYDNLWQHWENQVGHRKIRPHNIATGDYPPRPQKQYPINPKAKPSIQIVIDDLLKQGVLTPQNSTMNTPVYPVPKPDGRWRMVLDYREVNKTIPLTAAQNQHSAGILATIVRQKYKTTLDLANGFWAHPITPESYWLTAFTWQGKQYCWTRLPQGFLNSPALFTADVVDLLKEIPNVQVYVDDIYLSHDDPKEHVQQLEKVFQILLQAGYVVSLKKSEIGQKTVEFLGFNITKEGRGLTDTFKTKLLNITPPKDLKQLQSILGLLNFARNFIPNFAELVQPLYNLIASAKGKYIEWSEENTKQLNMVIEALNTASNLEERLPEQRLVIKVNTSPSAGYVRYYNETGKKPIMYLNYVFSKAELKFSMLEKLLTTMHKALIKAMDLAMGQEILVYSPIVSMTKIQKTPLPERKALPIRWITWMTYLEDPRIQFHYDKTLPELKHIPDVYTSSQSPVKHPSQYEGVFYTDGSAIKSPDPTKSNNAGMGIVHATYKPEYQVLNQWSIPLGNHTAQMAEIAAVEFACKKALKIPGPVLVITDSFYVAESANKELPYWKSNGFVNNKKKPLKHISKWKSIAECLSMKPDITIQHEKGISLQIPVFILKGNALADKLATQGSYVVNAGKRTADGSEFEKRTADGSEFESPKKKAKVE

SEQ ID NO: 1288 - protein, 2180 aa, synthetic construct
MPAAKRVKLDGGDKKYSIGLDIGTNSVGWAVITDEYKVPSKKFKVLGNTDRHSIKKNLIGALLFDSGETAEATRLKRTARRRYTRRKNRICYLQEIFSNEMAKVDDSFFHRLEESFLVEEDKKHERHPIFGNIVDEVAYHEKYPTIYHLRKKLVDSTDKADLRLIYLALAHMIKFRGHFLIEGDLNPDNSDVDKLFIQLVQTYNQLFEENPINASGVDAKAILSARLSKSRRLENLIAQLPGEKKNGLFGNLIALSLGLTPNFKSNFDLAEDAKLQLSKDTYDDDLDNLLAQIGDQYADLFLAAKNLSDAILLSDILRVNTEITKAPLSASMIKRYDEHHQDLTLLKALVRQQLPEKYKEIFFDQSKNGYAGYIDGGASQEEFYKFIKPILEKMDGTEELLVKLNREDLLRKQRTFDNGSIPHQIHLGELHAILRRQEDFYPFLKDNREKIEKILTFRIPYYVGPLARGNSRFAWMTRKSEETITPWNFEEVVDKGASAQSFIERMTNFDKNLPNEKVLPKHSLLYEYFTVYNELTKVKYVTEGMRKPAFLSGEQKKAIVDLLFKTNRKVTVKQLKEDYFKKIECFDSVEISGVEDRFNASLGTYHDLLKIIKDKDFLDNEENEDILEDIVLTLTLFEDREMIEERLKTYAHLFDDKVMKQLKRRRYTGWGRLSRKLINGIRDKQSGKTILDFLKSDGFANRNFMQLIHDDSLTFKEDIQKAQVSGQGDSLHEHIANLAGSPAIKKGILQTVKVVDELVKVMGRHKPENIVIEMARENQTTQKGQKNSRERMKRIEEGIKELGSQILKEHPVENTQLQNEKLYLYYLQNGRDMYVDQELDINRLSDYDVDHIVPQSFLKDDSIDNKVLTRSDKARGKSDNVPSEEVVKKMKNYWRQLLNAKLITQRKFDNLTKAERGGLSELDKAGFIKRQLVETRQITKHVAQILDSRMNTKYDENDKLIREVKVITLKSKLVSDFRKDFQFYKVREINNYHHAHDAYLNAVVGTALIKKYPKLESEFVYGDYKVYDVRKMIAKSEQEIGKATAKYFFYSNIMNFFKTEITLANGEIRKRPLIETNGETGEIVWDKGRDFATVRKVLSMPQVNIVKKTEVQTGGFSKESILPKRNSDKLIARKKDWDPKKYGGFDSPTVAYSVLVVAKVEKGKSKKLKSVKELLGITIMERSSFEKNPIDFLEAKGYKEVKKDLIIKLPKYSLFELENGRKRMLASAGELQKGNELALPSKYVNFLYLASHYEKLKGSPEDNEQKQLFVEQHKHYLDEIIEQISEFSKRVILADANLDKVLSAYNKHRDKPIREQAENIIHLFTLTNLGAPAAFKYFDTTIDRKRYTSTKEVLDATLIHQSITGLYETRIDLSQLGGDGGEAAAKEAAAKEAAAKGGMNPLQLLQPLPAEIKGTKLLAHWNSGATITCIPESFLEDEQPIKKTLIKTIHGEKQQNVYYVTFKVKGRKVEAEVIASPYEYILLSPTDVPWLTQQPLQLTILVPLQEYQEKILSKTALPEDQKQQLKTLFVKYDNLWQHWENQVGHRKIRPHNIATGDYPPRPQKQYPINPKAKPSIQIVIDDLLKQGVLTPQNSTMNTPVYPVPKPDGRWRMVLDYREVNKTIPLTAAQNQHSAGILATIVRQKYKTTLDLANGFWAHPITPESYWLTAFTWQGKQYCWTRLPQGFLNSPALFTADVVDLLKEIPNVQVYVDDIYLSHDDPKEHVQQLEKVFQILLQAGYVVSLKKSEIGQKTVEFLGFNITKEGRGLTDTFKTKLLNITPPKDLKQLQSILGLLNFARNFIPNFAELVQPLYNLIASAKGKYIEWSEENTKQLNMVIEALNTASNLEERLPEQRLVIKVNTSPSAGYVRYYNETGKKPIMYLNYVFSKAELKFSMLEKLLTTMHKALIKAMDLAMGQEILVYSPIVSMTKIQKTPLPERKALPIRWITWMTYLEDPRIQFHYDKTLPELKHIPDVYTSSQSPVKHPSQYEGVFYTDGSAIKSPDPTKSNNAGMGIVHATYKPEYQVLNQWSIPLGNHTAQMAEIAAVEFACKKALKIPGPVLVITDSFYVAESANKELPYWKSNGFVNNKKKPLKHISKWKSIAECLSMKPDITIQHEKGISLQIPVFILKGNALADKLATQGSYVVNAGKRTADGSEFEKRTADGSEFESPKKKAKVE

SEQ ID NO: 1289 - protein, 2177 aa, synthetic construct
MPAAKRVKLDGGDKKYSIGLDIGTNSVGWAVITDEYKVPSKKFKVLGNTDRHSIKKNLIGALLFDSGETAEATRLKRTARRRYTRRKNRICYLQEIFSNEMAKVDDSFFHRLEESFLVEEDKKHERHPIFGNIVDEVAYHEKYPTIYHLRKKLVDSTDKADLRLIYLALAHMIKFRGHFLIEGDLNPDNSDVDKLFIQLVQTYNQLFEENPINASGVDAKAILSARLSKSRRLENLIAQLPGEKKNGLFGNLIALSLGLTPNFKSNFDLAEDAKLQLSKDTYDDDLDNLLAQIGDQYADLFLAAKNLSDAILLSDILRVNTEITKAPLSASMIKRYDEHHQDLTLLKALVRQQLPEKYKEIFFDQSKNGYAGYIDGGASQEEFYKFIKPILEKMDGTEELLVKLNREDLLRKQRTFDNGSIPHQIHLGELHAILRRQEDFYPFLKDNREKIEKILTFRIPYYVGPLARGNSRFAWMTRKSEETITPWNFEEVVDKGASAQSFIERMTNFDKNLPNEKVLPKHSLLYEYFTVYNELTKVKYVTEGMRKPAFLSGEQKKAIVDLLFKTNRKVTVKQLKEDYFKKIECFDSVEISGVEDRFNASLGTYHDLLKIIKDKDFLDNEENEDILEDIVLTLTLFEDREMIEERLKTYAHLFDDKVMKQLKRRRYTGWGRLSRKLINGIRDKQSGKTILDFLKSDGFANRNFMQLIHDDSLTFKEDIQKAQVSGQGDSLHEHIANLAGSPAIKKGILQTVKVVDELVKVMGRHKPENIVIEMARENQTTQKGQKNSRERMKRIEEGIKELGSQILKEHPVENTQLQNEKLYLYYLQNGRDMYVDQELDINRLSDYDVDHIVPQSFLKDDSIDNKVLTRSDKARGKSDNVPSEEVVKKMKNYWRQLLNAKLITQRKFDNLTKAERGGLSELDKAGFIKRQLVETRQITKHVAQILDSRMNTKYDENDKLIREVKVITLKSKLVSDFRKDFQFYKVREINNYHHAHDAYLNAVVGTALIKKYPKLESEFVYGDYKVYDVRKMIAKSEQEIGKATAKYFFYSNIMNFFKTEITLANGEIRKRPLIETNGETGEIVWDKGRDFATVRKVLSMPQVNIVKKTEVQTGGFSKESILPKRNSDKLIARKKDWDPKKYGGFDSPTVAYSVLVVAKVEKGKSKKLKSVKELLGITIMERSSFEKNPIDFLEAKGYKEVKKDLIIKLPKYSLFELENGRKRMLASAGELQKGNELALPSKYVNFLYLASHYEKLKGSPEDNEQKQLFVEQHKHYLDEIIEQISEFSKRVILADANLDKVLSAYNKHRDKPIREQAENIIHLFTLTNLGAPAAFKYFDTTIDRKRYTSTKEVLDATLIHQSITGLYETRIDLSQLGGDGGGGSGGSGGSGGSGGMNPLQLLQPLPAEIKGTKLLAHWNSGATITCIPESFLEDEQPIKKTLIKTIHGEKQQNVYYVTFKVKGRKVEAEVIASPYEYILLSPTDVPWLTQQPLQLTILVPLQEYQEKILSKTALPEDQKQQLKTLFVKYDNLWQHWENQVGHRKIRPHNIATGDYPPRPQKQYPINPKAKPSIQIVIDDLLKQGVLTPQNSTMNTPVYPVPKPDGRWRMVLDYREVNKTIPLTAAQNQHSAGILATIVRQKYKTTLDLANGFWAHPITPESYWLTAFTWQGKQYCWTRLPQGFLNSPALFTADVVDLLKEIPNVQVYVDDIYLSHDDPKEHVQQLEKVFQILLQAGYVVSLKKSEIGQKTVEFLGFNITKEGRGLTDTFKTKLLNITPPKDLKQLQSILGLLNFARNFIPNFAELVQPLYNLIASAKGKYIEWSEENTKQLNMVIEALNTASNLEERLPEQRLVIKVNTSPSAGYVRYYNETGKKPIMYLNYVFSKAELKFSMLEKLLTTMHKALIKAMDLAMGQEILVYSPIVSMTKIQKTPLPERKALPIRWITWMTYLEDPRIQFHYDKTLPELKHIPDVYTSSQSPVKHPSQYEGVFYTDGSAIKSPDPTKSNNAGMGIVHATYKPEYQVLNQWSIPLGNHTAQMAEIAAVEFACKKALKIPGPVLVITDSFYVAESANKELPYWKSNGFVNNKKKPLKHISKWKSIAECLSMKPDITIQHEKGISLQIPVFILKGNALADKLATQGSYVVNAGKRTADGSEFEKRTADGSEFESPKKKAKVE

SEQ ID NO: 1290 - protein, 2174 aa, synthetic construct
MPAAKRVKLDGGDKKYSIGLDIGTNSVGWAVITDEYKVPSKKFKVLGNTDRHSIKKNLIGALLFDSGETAEATRLKRTARRRYTRRKNRICYLQEIFSNEMAKVDDSFFHRLEESFLVEEDKKHERHPIFGNIVDEVAYHEKYPTIYHLRKKLVDSTDKADLRLIYLALAHMIKFRGHFLIEGDLNPDNSDVDKLFIQLVQTYNQLFEENPINASGVDAKAILSARLSKSRRLENLIAQLPGEKKNGLFGNLIALSLGLTPNFKSNFDLAEDAKLQLSKDTYDDDLDNLLAQIGDQYADLFLAAKNLSDAILLSDILRVNTEITKAPLSASMIKRYDEHHQDLTLLKALVRQQLPEKYKEIFFDQSKNGYAGYIDGGASQEEFYKFIKPILEKMDGTEELLVKLNREDLLRKQRTFDNGSIPHQIHLGELHAILRRQEDFYPFLKDNREKIEKILTFRIPYYVGPLARGNSRFAWMTRKSEETITPWNFEEVVDKGASAQSFIERMTNFDKNLPNEKVLPKHSLLYEYFTVYNELTKVKYVTEGMRKPAFLSGEQKKAIVDLLFKTNRKVTVKQLKEDYFKKIECFDSVEISGVEDRFNASLGTYHDLLKIIKDKDFLDNEENEDILEDIVLTLTLFEDREMIEERLKTYAHLFDDKVMKQLKRRRYTGWGRLSRKLINGIRDKQSGKTILDFLKSDGFANRNFMQLIHDDSLTFKEDIQKAQVSGQGDSLHEHIANLAGSPAIKKGILQTVKVVDELVKVMGRHKPENIVIEMARENQTTQKGQKNSRERMKRIEEGIKELGSQILKEHPVENTQLQNEKLYLYYLQNGRDMYVDQELDINRLSDYDVDHIVPQSFLKDDSIDNKVLTRSDKARGKSDNVPSEEVVKKMKNYWRQLLNAKLITQRKFDNLTKAERGGLSELDKAGFIKRQLVETRQITKHVAQILDSRMNTKYDENDKLIREVKVITLKSKLVSDFRKDFQFYKVREINNYHHAHDAYLNAVVGTALIKKYPKLESEFVYGDYKVYDVRKMIAKSEQEIGKATAKYFFYSNIMNFFKTEITLANGEIRKRPLIETNGETGEIVWDKGRDFATVRKVLSMPQVNIVKKTEVQTGGFSKESILPKRNSDKLIARKKDWDPKKYGGFDSPTVAYSVLVVAKVEKGKSKKLKSVKELLGITIMERSSFEKNPIDFLEAKGYKEVKKDLIIKLPKYSLFELENGRKRMLASAGELQKGNELALPSKYVNFLYLASHYEKLKGSPEDNEQKQLFVEQHKHYLDEIIEQISEFSKRVILADANLDKVLSAYNKHRDKPIREQAENIIHLFTLTNLGAPAAFKYFDTTIDRKRYTSTKEVLDATLIHQSITGLYETRIDLSQLGGDGGGGSGGGPAPGGMNPLQLLQPLPAEIKGTKLLAHWNSGATITCIPESFLEDEQPIKKTLIKTIHGEKQQNVYYVTFKVKGRKVEAEVIASPYEYILLSPTDVPWLTQQPLQLTILVPLQEYQEKILSKTALPEDQKQQLKTLFVKYDNLWQHWENQVGHRKIRPHNIATGDYPPRPQKQYPINPKAKPSIQIVIDDLLKQGVLTPQNSTMNTPVYPVPKPDGRWRMVLDYREVNKTIPLTAAQNQHSAGILATIVRQKYKTTLDLANGFWAHPITPESYWLTAFTWQGKQYCWTRLPQGFLNSPALFTADVVDLLKEIPNVQVYVDDIYLSHDDPKEHVQQLEKVFQILLQAGYVVSLKKSEIGQKTVEFLGFNITKEGRGLTDTFKTKLLNITPPKDLKQLQSILGLLNFARNFIPNFAELVQPLYNLIASAKGKYIEWSEENTKQLNMVIEALNTASNLEERLPEQRLVIKVNTSPSAGYVRYYNETGKKPIMYLNYVFSKAELKFSMLEKLLTTMHKALIKAMDLAMGQEILVYSPIVSMTKIQKTPLPERKALPIRWITWMTYLEDPRIQFHYDKTLPELKHIPDVYTSSQSPVKHPSQYEGVFYTDGSAIKSPDPTKSNNAGMGIVHATYKPEYQVLNQWSIPLGNHTAQMAEIAAVEFACKKALKIPGPVLVITDSFYVAESANKELPYWKSNGFVNNKKKPLKHISKWKSIAECLSMKPDITIQHEKGISLQIPVFILKGNALADKLATQGSYVVNAGKRTADGSEFEKRTADGSEFESPKKKAKVE

SEQ ID NO: 1291 - protein, 2176 aa, synthetic construct
MPAAKRVKLDGGDKKYSIGLDIGTNSVGWAVITDEYKVPSKKFKVLGNTDRHSIKKNLIGALLFDSGETAEATRLKRTARRRYTRRKNRICYLQEIFSNEMAKVDDSFFHRLEESFLVEEDKKHERHPIFGNIVDEVAYHEKYPTIYHLRKKLVDSTDKADLRLIYLALAHMIKFRGHFLIEGDLNPDNSDVDKLFIQLVQTYNQLFEENPINASGVDAKAILSARLSKSRRLENLIAQLPGEKKNGLFGNLIALSLGLTPNFKSNFDLAEDAKLQLSKDTYDDDLDNLLAQIGDQYADLFLAAKNLSDAILLSDILRVNTEITKAPLSASMIKRYDEHHQDLTLLKALVRQQLPEKYKEIFFDQSKNGYAGYIDGGASQEEFYKFIKPILEKMDGTEELLVKLNREDLLRKQRTFDNGSIPHQIHLGELHAILRRQEDFYPFLKDNREKIEKILTFRIPYYVGPLARGNSRFAWMTRKSEETITPWNFEEVVDKGASAQSFIERMTNFDKNLPNEKVLPKHSLLYEYFTVYNELTKVKYVTEGMRKPAFLSGEQKKAIVDLLFKTNRKVTVKQLKEDYFKKIECFDSVEISGVEDRFNASLGTYHDLLKIIKDKDFLDNEENEDILEDIVLTLTLFEDREMIEERLKTYAHLFDDKVMKQLKRRRYTGWGRLSRKLINGIRDKQSGKTILDFLKSDGFANRNFMQLIHDDSLTFKEDIQKAQVSGQGDSLHEHIANLAGSPAIKKGILQTVKVVDELVKVMGRHKPENIVIEMARENQTTQKGQKNSRERMKRIEEGIKELGSQILKEHPVENTQLQNEKLYLYYLQNGRDMYVDQELDINRLSDYDVDHIVPQSFLKDDSIDNKVLTRSDKARGKSDNVPSEEVVKKMKNYWRQLLNAKLITQRKFDNLTKAERGGLSELDKAGFIKRQLVETRQITKHVAQILDSRMNTKYDENDKLIREVKVITLKSKLVSDFRKDFQFYKVREINNYHHAHDAYLNAVVGTALIKKYPKLESEFVYGDYKVYDVRKMIAKSEQEIGKATAKYFFYSNIMNFFKTEITLANGEIRKRPLIETNGETGEIVWDKGRDFATVRKVLSMPQVNIVKKTEVQTGGFSKESILPKRNSDKLIARKKDWDPKKYGGFDSPTVAYSVLVVAKVEKGKSKKLKSVKELLGITIMERSSFEKNPIDFLEAKGYKEVKKDLIIKLPKYSLFELENGRKRMLASAGELQKGNELALPSKYVNFLYLASHYEKLKGSPEDNEQKQLFVEQHKHYLDEIIEQISEFSKRVILADANLDKVLSAYNKHRDKPIREQAENIIHLFTLTNLGAPAAFKYFDTTIDRKRYTSTKEVLDATLIHQSITGLYETRIDLSQLGGDGGPAPGGSEAAAKGGMNPLQLLQPLPAEIKGTKLLAHWNSGATITCIPESFLEDEQPIKKTLIKTIHGEKQQNVYYVTFKVKGRKVEAEVIASPYEYILLSPTDVPWLTQQPLQLTILVPLQEYQEKILSKTALPEDQKQQLKTLFVKYDNLWQHWENQVGHRKIRPHNIATGDYPPRPQKQYPINPKAKPSIQIVIDDLLKQGVLTPQNSTMNTPVYPVPKPDGRWRMVLDYREVNKTIPLTAAQNQHSAGILATIVRQKYKTTLDLANGFWAHPITPESYWLTAFTWQGKQYCWTRLPQGFLNSPALFTADVVDLLKEIPNVQVYVDDIYLSHDDPKEHVQQLEKVFQILLQAGYVVSLKKSEIGQKTVEFLGFNITKEGRGLTDTFKTKLLNITPPKDLKQLQSILGLLNFARNFIPNFAELVQPLYNLIASAKGKYIEWSEENTKQLNMVIEALNTASNLEERLPEQRLVIKVNTSPSAGYVRYYNETGKKPIMYLNYVFSKAELKFSMLEKLLTTMHKALIKAMDLAMGQEILVYSPIVSMTKIQKTPLPERKALPIRWITWMTYLEDPRIQFHYDKTLPELKHIPDVYTSSQSPVKHPSQYEGVFYTDGSAIKSPDPTKSNNAGMGIVHATYKPEYQVLNQWSIPLGNHTAQMAEIAAVEFACKKALKIPGPVLVITDSFYVAESANKELPYWKSNGFVNNKKKPLKHISKWKSIAECLSMKPDITIQHEKGISLQIPVFILKGNALADKLATQGSYVVNAGKRTADGSEFEKRTADGSEFESPKKKAKVE

SEQ ID NO: 1292 - protein, 2173 aa, synthetic construct
MPAAKRVKLDGGDKKYSIGLDIGTNSVGWAVITDEYKVPSKKFKVLGNTDRHSIKKNLIGALLFDSGETAEATRLKRTARRRYTRRKNRICYLQEIFSNEMAKVDDSFFHRLEESFLVEEDKKHERHPIFGNIVDEVAYHEKYPTIYHLRKKLVDSTDKADLRLIYLALAHMIKFRGHFLIEGDLNPDNSDVDKLFIQLVQTYNQLFEENPINASGVDAKAILSARLSKSRRLENLIAQLPGEKKNGLFGNLIALSLGLTPNFKSNFDLAEDAKLQLSKDTYDDDLDNLLAQIGDQYADLFLAAKNLSDAILLSDILRVNTEITKAPLSASMIKRYDEHHQDLTLLKALVRQQLPEKYKEIFFDQSKNGYAGYIDGGASQEEFYKFIKPILEKMDGTEELLVKLNREDLLRKQRTFDNGSIPHQIHLGELHAILRRQEDFYPFLKDNREKIEKILTFRIPYYVGPLARGNSRFAWMTRKSEETITPWNFEEVVDKGASAQSFIERMTNFDKNLPNEKVLPKHSLLYEYFTVYNELTKVKYVTEGMRKPAFLSGEQKKAIVDLLFKTNRKVTVKQLKEDYFKKIECFDSVEISGVEDRFNASLGTYHDLLKIIKDKDFLDNEENEDILEDIVLTLTLFEDREMIEERLKTYAHLFDDKVMKQLKRRRYTGWGRLSRKLINGIRDKQSGKTILDFLKSDGFANRNFMQLIHDDSLTFKEDIQKAQVSGQGDSLHEHIANLAGSPAIKKGILQTVKVVDELVKVMGRHKPENIVIEMARENQTTQKGQKNSRERMKRIEEGIKELGSQILKEHPVENTQLQNEKLYLYYLQNGRDMYVDQELDINRLSDYDVDHIVPQSFLKDDSIDNKVLTRSDKARGKSDNVPSEEVVKKMKNYWRQLLNAKLITQRKFDNLTKAERGGLSELDKAGFIKRQLVETRQITKHVAQILDSRMNTKYDENDKLIREVKVITLKSKLVSDFRKDFQFYKVREINNYHHAHDAYLNAVVGTALIKKYPKLESEFVYGDYKVYDVRKMIAKSEQEIGKATAKYFFYSNIMNFFKTEITLANGEIRKRPLIETNGETGEIVWDKGRDFATVRKVLSMPQVNIVKKTEVQTGGFSKESILPKRNSDKLIARKKDWDPKKYGGFDSPTVAYSVLVVAKVEKGKSKKLKSVKELLGITIMERSSFEKNPIDFLEAKGYKEVKKDLIIKLPKYSLFELENGRKRMLASAGELQKGNELALPSKYVNFLYLASHYEKLKGSPEDNEQKQLFVEQHKHYLDEIIEQISEFSKRVILADANLDKVLSAYNKHRDKPIREQAENIIHLFTLTNLGAPAAFKYFDTTIDRKRYTSTKEVLDATLIHQSITGLYETRIDLSQLGGDGGGSSEAAAKGGMNPLQLLQPLPAEIKGTKLLAHWNSGATITCIPESFLEDEQPIKKTLIKTIHGEKQQNVYYVTFKVKGRKVEAEVIASPYEYILLSPTDVPWLTQQPLQLTILVPLQEYQEKILSKTALPEDQKQQLKTLFVKYDNLWQHWENQVGHRKIRPHNIATGDYPPRPQKQYPINPKAKPSIQIVIDDLLKQGVLTPQNSTMNTPVYPVPKPDGRWRMVLDYREVNKTIPLTAAQNQHSAGILATIVRQKYKTTLDLANGFWAHPITPESYWLTAFTWQGKQYCWTRLPQGFLNSPALFTADVVDLLKEIPNVQVYVDDIYLSHDDPKEHVQQLEKVFQILLQAGYVVSLKKSEIGQKTVEFLGFNITKEGRGLTDTFKTKLLNITPPKDLKQLQSILGLLNFARNFIPNFAELVQPLYNLIASAKGKYIEWSEENTKQLNMVIEALNTASNLEERLPEQRLVIKVNTSPSAGYVRYYNETGKKPIMYLNYVFSKAELKFSMLEKLLTTMHKALIKAMDLAMGQEILVYSPIVSMTKIQKTPLPERKALPIRWITWMTYLEDPRIQFHYDKTLPELKHIPDVYTSSQSPVKHPSQYEGVFYTDGSAIKSPDPTKSNNAGMGIVHATYKPEYQVLNQWSIPLGNHTAQMAEIAAVEFACKKALKIPGPVLVITDSFYVAESANKELPYWKSNGFVNNKKKPLKHISKWKSIAECLSMKPDITIQHEKGISLQIPVFILKGNALADKLATQGSYVVNAGKRTADGSEFEKRTADGSEFESPKKKAKVE

SEQ ID NO: 1293 - protein, 2176 aa, synthetic construct
MPAAKRVKLDGGDKKYSIGLDIGTNSVGWAVITDEYKVPSKKFKVLGNTDRHSIKKNLIGALLFDSGETAEATRLKRTARRRYTRRKNRICYLQEIFSNEMAKVDDSFFHRLEESFLVEEDKKHERHPIFGNIVDEVAYHEKYPTIYHLRKKLVDSTDKADLRLIYLALAHMIKFRGHFLIEGDLNPDNSDVDKLFIQLVQTYNQLFEENPINASGVDAKAILSARLSKSRRLENLIAQLPGEKKNGLFGNLIALSLGLTPNFKSNFDLAEDAKLQLSKDTYDDDLDNLLAQIGDQYADLFLAAKNLSDAILLSDILRVNTEITKAPLSASMIKRYDEHHQDLTLLKALVRQQLPEKYKEIFFDQSKNGYAGYIDGGASQEEFYKFIKPILEKMDGTEELLVKLNREDLLRKQRTFDNGSIPHQIHLGELHAILRRQEDFYPFLKDNREKIEKILTFRIPYYVGPLARGNSRFAWMTRKSEETITPWNFEEVVDKGASAQSFIERMTNFDKNLPNEKVLPKHSLLYEYFTVYNELTKVKYVTEGMRKPAFLSGEQKKAIVDLLFKTNRKVTVKQLKEDYFKKIECFDSVEISGVEDRFNASLGTYHDLLKIIKDKDFLDNEENEDILEDIVLTLTLFEDREMIEERLKTYAHLFDDKVMKQLKRRRYTGWGRLSRKLINGIRDKQSGKTILDFLKSDGFANRNFMQLIHDDSLTFKEDIQKAQVSGQGDSLHEHIANLAGSPAIKKGILQTVKVVDELVKVMGRHKPENIVIEMARENQTTQKGQKNSRERMKRIEEGIKELGSQILKEHPVENTQLQNEKLYLYYLQNGRDMYVDQELDINRLSDYDVDHIVPQSFLKDDSIDNKVLTRSDKARGKSDNVPSEEVVKKMKNYWRQLLNAKLITQRKFDNLTKAERGGLSELDKAGFIKRQLVETRQITKHVAQILDSRMNTKYDENDKLIREVKVITLKSKLVSDFRKDFQFYKVREINNYHHAHDAYLNAVVGTALIKKYPKLESEFVYGDYKVYDVRKMIAKSEQEIGKATAKYFFYSNIMNFFKTEITLANGEIRKRPLIETNGETGEIVWDKGRDFATVRKVLSMPQVNIVKKTEVQTGGFSKESILPKRNSDKLIARKKDWDPKKYGGFDSPTVAYSVLVVAKVEKGKSKKLKSVKELLGITIMERSSFEKNPIDFLEAKGYKEVKKDLIIKLPKYSLFELENGRKRMLASAGELQKGNELALPSKYVNFLYLASHYEKLKGSPEDNEQKQLFVEQHKHYLDEIIEQISEFSKRVILADANLDKVLSAYNKHRDKPIREQAENIIHLFTLTNLGAPAAFKYFDTTIDRKRYTSTKEVLDATLIHQSITGLYETRIDLSQLGGDGGGGSGSSEAAAKGGMNPLQLLQPLPAEIKGTKLLAHWNSGATITCIPESFLEDEQPIKKTLIKTIHGEKQQNVYYVTFKVKGRKVEAEVIASPYEYILLSPTDVPWLTQQPLQLTILVPLQEYQEKILSKTALPEDQKQQLKTLFVKYDNLWQHWENQVGHRKIRPHNIATGDYPPRPQKQYPINPKAKPSIQIVIDDLLKQGVLTPQNSTMNTPVYPVPKPDGRWRMVLDYREVNKTIPLTAAQNQHSAGILATIVRQKYKTTLDLANGFWAHPITPESYWLTAFTWQGKQYCWTRLPQGFLNSPALFTADVVDLLKEIPNVQVYVDDIYLSHDDPKEHVQQLEKVFQILLQAGYVVSLKKSEIGQKTVEFLGFNITKEGRGLTDTFKTKLLNITPPKDLKQLQSILGLLNFARNFIPNFAELVQPLYNLIASAKGKYIEWSEENTKQLNMVIEALNTASNLEERLPEQRLVIKVNTSPSAGYVRYYNETGKKPIMYLNYVFSKAELKFSMLEKLLTTMHKALIKAMDLAMGQEILVYSPIVSMTKIQKTPLPERKALPIRWITWMTYLEDPRIQFHYDKTLPELKHIPDVYTSSQSPVKHPSQYEGVFYTDGSAIKSPDPTKSNNAGMGIVHATYKPEYQVLNQWSIPLGNHTAQMAEIAAVEFACKKALKIPGPVLVITDSFYVAESANKELPYWKSNGFVNNKKKPLKHISKWKSIAECLSMKPDITIQHEKGISLQIPVFILKGNALADKLATQGSYVVNAGKRTADGSEFEKRTADGSEFESPKKKAKVE

SEQ ID NO: 1294 - protein, 2171 aa, synthetic construct
MPAAKRVKLDGGDKKYSIGLDIGTNSVGWAVITDEYKVPSKKFKVLGNTDRHSIKKNLIGALLFDSGETAEATRLKRTARRRYTRRKNRICYLQEIFSNEMAKVDDSFFHRLEESFLVEEDKKHERHPIFGNIVDEVAYHEKYPTIYHLRKKLVDSTDKADLRLIYLALAHMIKFRGHFLIEGDLNPDNSDVDKLFIQLVQTYNQLFEENPINASGVDAKAILSARLSKSRRLENLIAQLPGEKKNGLFGNLIALSLGLTPNFKSNFDLAEDAKLQLSKDTYDDDLDNLLAQIGDQYADLFLAAKNLSDAILLSDILRVNTEITKAPLSASMIKRYDEHHQDLTLLKALVRQQLPEKYKEIFFDQSKNGYAGYIDGGASQEEFYKFIKPILEKMDGTEELLVKLNREDLLRKQRTFDNGSIPHQIHLGELHAILRRQEDFYPFLKDNREKIEKILTFRIPYYVGPLARGNSRFAWMTRKSEETITPWNFEEVVDKGASAQSFIERMTNFDKNLPNEKVLPKHSLLYEYFTVYNELTKVKYVTEGMRKPAFLSGEQKKAIVDLLFKTNRKVTVKQLKEDYFKKIECFDSVEISGVEDRFNASLGTYHDLLKIIKDKDFLDNEENEDILEDIVLTLTLFEDREMIEERLKTYAHLFDDKVMKQLKRRRYTGWGRLSRKLINGIRDKQSGKTILDFLKSDGFANRNFMQLIHDDSLTFKEDIQKAQVSGQGDSLHEHIANLAGSPAIKKGILQTVKVVDELVKVMGRHKPENIVIEMARENQTTQKGQKNSRERMKRIEEGIKELGSQILKEHPVENTQLQNEKLYLYYLQNGRDMYVDQELDINRLSDYDVDHIVPQSFLKDDSIDNKVLTRSDKARGKSDNVPSEEVVKKMKNYWRQLLNAKLITQRKFDNLTKAERGGLSELDKAGFIKRQLVETRQITKHVAQILDSRMNTKYDENDKLIREVKVITLKSKLVSDFRKDFQFYKVREINNYHHAHDAYLNAVVGTALIKKYPKLESEFVYGDYKVYDVRKMIAKSEQEIGKATAKYFFYSNIMNFFKTEITLANGEIRKRPLIETNGETGEIVWDKGRDFATVRKVLSMPQVNIVKKTEVQTGGFSKESILPKRNSDKLIARKKDWDPKKYGGFDSPTVAYSVLVVAKVEKGKSKKLKSVKELLGITIMERSSFEKNPIDFLEAKGYKEVKKDLIIKLPKYSLFELENGRKRMLASAGELQKGNELALPSKYVNFLYLASHYEKLKGSPEDNEQKQLFVEQHKHYLDEIIEQISEFSKRVILADANLDKVLSAYNKHRDKPIREQAENIIHLFTLTNLGAPAAFKYFDTTIDRKRYTSTKEVLDATLIHQSITGLYETRIDLSQLGGDGGGGSGGSGGMNPLQLLQPLPAEIKGTKLLAHWNSGATITCIPESFLEDEQPIKKTLIKTIHGEKQQNVYYVTFKVKGRKVEAEVIASPYEYILLSPTDVPWLTQQPLQLTILVPLQEYQEKILSKTALPEDQKQQLKTLFVKYDNLWQHWENQVGHRKIRPHNIATGDYPPRPQKQYPINPKAKPSIQIVIDDLLKQGVLTPQNSTMNTPVYPVPKPDGRWRMVLDYREVNKTIPLTAAQNQHSAGILATIVRQKYKTTLDLANGFWAHPITPESYWLTAFTWQGKQYCWTRLPQGFLNSPALFTADVVDLLKEIPNVQVYVDDIYLSHDDPKEHVQQLEKVFQILLQAGYVVSLKKSEIGQKTVEFLGFNITKEGRGLTDTFKTKLLNITPPKDLKQLQSILGLLNFARNFIPNFAELVQPLYNLIASAKGKYIEWSEENTKQLNMVIEALNTASNLEERLPEQRLVIKVNTSPSAGYVRYYNETGKKPIMYLNYVFSKAELKFSMLEKLLTTMHKALIKAMDLAMGQEILVYSPIVSMTKIQKTPLPERKALPIRWITWMTYLEDPRIQFHYDKTLPELKHIPDVYTSSQSPVKHPSQYEGVFYTDGSAIKSPDPTKSNNAGMGIVHATYKPEYQVLNQWSIPLGNHTAQMAEIAAVEFACKKALKIPGPVLVITDSFYVAESANKELPYWKSNGFVNNKKKPLKHISKWKSIAECLSMKPDITIQHEKGISLQIPVFILKGNALADKLATQGSYVVNAGKRTADGSEFEKRTADGSEFESPKKKAKVE

SEQ ID NO: 1295 - protein, 2084 aa, synthetic construct
MPAAKRVKLDGGDKKYSIGLDIGTNSVGWAVITDEYKVPSKKFKVLGNTDRHSIKKNLIGALLFDSGETAEATRLKRTARRRYTRRKNRICYLQEIFSNEMAKVDDSFFHRLEESFLVEEDKKHERHPIFGNIVDEVAYHEKYPTIYHLRKKLVDSTDKADLRLIYLALAHMIKFRGHFLIEGDLNPDNSDVDKLFIQLVQTYNQLFEENPINASGVDAKAILSARLSKSRRLENLIAQLPGEKKNGLFGNLIALSLGLTPNFKSNFDLAEDAKLQLSKDTYDDDLDNLLAQIGDQYADLFLAAKNLSDAILLSDILRVNTEITKAPLSASMIKRYDEHHQDLTLLKALVRQQLPEKYKEIFFDQSKNGYAGYIDGGASQEEFYKFIKPILEKMDGTEELLVKLNREDLLRKQRTFDNGSIPHQIHLGELHAILRRQEDFYPFLKDNREKIEKILTFRIPYYVGPLARGNSRFAWMTRKSEETITPWNFEEVVDKGASAQSFIERMTNFDKNLPNEKVLPKHSLLYEYFTVYNELTKVKYVTEGMRKPAFLSGEQKKAIVDLLFKTNRKVTVKQLKEDYFKKIECFDSVEISGVEDRFNASLGTYHDLLKIIKDKDFLDNEENEDILEDIVLTLTLFEDREMIEERLKTYAHLFDDKVMKQLKRRRYTGWGRLSRKLINGIRDKQSGKTILDFLKSDGFANRNFMQLIHDDSLTFKEDIQKAQVSGQGDSLHEHIANLAGSPAIKKGILQTVKVVDELVKVMGRHKPENIVIEMARENQTTQKGQKNSRERMKRIEEGIKELGSQILKEHPVENTQLQNEKLYLYYLQNGRDMYVDQELDINRLSDYDVDHIVPQSFLKDDSIDNKVLTRSDKARGKSDNVPSEEVVKKMKNYWRQLLNAKLITQRKFDNLTKAERGGLSELDKAGFIKRQLVETRQITKHVAQILDSRMNTKYDENDKLIREVKVITLKSKLVSDFRKDFQFYKVREINNYHHAHDAYLNAVVGTALIKKYPKLESEFVYGDYKVYDVRKMIAKSEQEIGKATAKYFFYSNIMNFFKTEITLANGEIRKRPLIETNGETGEIVWDKGRDFATVRKVLSMPQVNIVKKTEVQTGGFSKESILPKRNSDKLIARKKDWDPKKYGGFDSPTVAYSVLVVAKVEKGKSKKLKSVKELLGITIMERSSFEKNPIDFLEAKGYKEVKKDLIIKLPKYSLFELENGRKRMLASAGELQKGNELALPSKYVNFLYLASHYEKLKGSPEDNEQKQLFVEQHKHYLDEIIEQISEFSKRVILADANLDKVLSAYNKHRDKPIREQAENIIHLFTLTNLGAPAAFKYFDTTIDRKRYTSTKEVLDATLIHQSITGLYETRIDLSQLGGDGGEAAAKPAPGGVPWLTQQPLQLTILVPLQEYQEKILSKTALPEDQKQQLKTLFVKYDNLWQHWENQVGHRKIRPHNIATGDYPPRPQKQYPINPKAKPSIQIVIDDLLKQGVLTPQNSTMNTPVYPVPKPDGRWRMVLDYREVNKTIPLTAAQNQHSAGILATIVRQKYKTTLDLANGFWAHPITPESYWLTAFTWQGKQYCWTRLPQGFLNSPALFTADVVDLLKEIPNVQVYVDDIYLSHDDPKEHVQQLEKVFQILLQAGYVVSLKKSEIGQKTVEFLGFNITKEGRGLTDTFKTKLLNITPPKDLKQLQSILGLLNFARNFIPNFAELVQPLYNLIASAKGKYIEWSEENTKQLNMVIEALNTASNLEERLPEQRLVIKVNTSPSAGYVRYYNETGKKPIMYLNYVFSKAELKFSMLEKLLTTMHKALIKAMDLAMGQEILVYSPIVSMTKIQKTPLPERKALPIRWITWMTYLEDPRIQFHYDKTLPELKHIPDVYTSSQSPVKHPSQYEGVFYTDGSAIKSPDPTKSNNAGMGIVHATYKPEYQVLNQWSIPLGNHTAQMAEIAAVEFACKKALKIPGPVLVITDSFYVAESANKELPYWKSNGFVNNKKKPLKHISKWKSIAECLSMKPDITIQHEKGISLQIPVFILKGNALADKLATQGSYVVNAGKRTADGSEFEKRTADGSEFESPKKKAKVE

SEQ ID NO: 1296 - protein, 2087 aa, synthetic construct
MPAAKRVKLDGGDKKYSIGLDIGTNSVGWAVITDEYKVPSKKFKVLGNTDRHSIKKNLIGALLFDSGETAEATRLKRTARRRYTRRKNRICYLQEIFSNEMAKVDDSFFHRLEESFLVEEDKKHERHPIFGNIVDEVAYHEKYPTIYHLRKKLVDSTDKADLRLIYLALAHMIKFRGHFLIEGDLNPDNSDVDKLFIQLVQTYNQLFEENPINASGVDAKAILSARLSKSRRLENLIAQLPGEKKNGLFGNLIALSLGLTPNFKSNFDLAEDAKLQLSKDTYDDDLDNLLAQIGDQYADLFLAAKNLSDAILLSDILRVNTEITKAPLSASMIKRYDEHHQDLTLLKALVRQQLPEKYKEIFFDQSKNGYAGYIDGGASQEEFYKFIKPILEKMDGTEELLVKLNREDLLRKQRTFDNGSIPHQIHLGELHAILRRQEDFYPFLKDNREKIEKILTFRIPYYVGPLARGNSRFAWMTRKSEETITPWNFEEVVDKGASAQSFIERMTNFDKNLPNEKVLPKHSLLYEYFTVYNELTKVKYVTEGMRKPAFLSGEQKKAIVDLLFKTNRKVTVKQLKEDYFKKIECFDSVEISGVEDRFNASLGTYHDLLKIIKDKDFLDNEENEDILEDIVLTLTLFEDREMIEERLKTYAHLFDDKVMKQLKRRRYTGWGRLSRKLINGIRDKQSGKTILDFLKSDGFANRNFMQLIHDDSLTFKEDIQKAQVSGQGDSLHEHIANLAGSPAIKKGILQTVKVVDELVKVMGRHKPENIVIEMARENQTTQKGQKNSRERMKRIEEGIKELGSQILKEHPVENTQLQNEKLYLYYLQNGRDMYVDQELDINRLSDYDVDHIVPQSFLKDDSIDNKVLTRSDKARGKSDNVPSEEVVKKMKNYWRQLLNAKLITQRKFDNLTKAERGGLSELDKAGFIKRQLVETRQITKHVAQILDSRMNTKYDENDKLIREVKVITLKSKLVSDFRKDFQFYKVREINNYHHAHDAYLNAVVGTALIKKYPKLESEFVYGDYKVYDVRKMIAKSEQEIGKATAKYFFYSNIMNFFKTEITLANGEIRKRPLIETNGETGEIVWDKGRDFATVRKVLSMPQVNIVKKTEVQTGGFSKESILPKRNSDKLIARKKDWDPKKYGGFDSPTVAYSVLVVAKVEKGKSKKLKSVKELLGITIMERSSFEKNPIDFLEAKGYKEVKKDLIIKLPKYSLFELENGRKRMLASAGELQKGNELALPSKYVNFLYLASHYEKLKGSPEDNEQKQLFVEQHKHYLDEIIEQISEFSKRVILADANLDKVLSAYNKHRDKPIREQAENIIHLFTLTNLGAPAAFKYFDTTIDRKRYTSTKEVLDATLIHQSITGLYETRIDLSQLGGDGGEAAAKGSSGGSGGVPWLTQQPLQLTILVPLQEYQEKILSKTALPEDQKQQLKTLFVKYDNLWQHWENQVGHRKIRPHNIATGDYPPRPQKQYPINPKAKPSIQIVIDDLLKQGVLTPQNSTMNTPVYPVPKPDGRWRMVLDYREVNKTIPLTAAQNQHSAGILATIVRQKYKTTLDLANGFWAHPITPESYWLTAFTWQGKQYCWTRLPQGFLNSPALFTADVVDLLKEIPNVQVYVDDIYLSHDDPKEHVQQLEKVFQILLQAGYVVSLKKSEIGQKTVEFLGFNITKEGRGLTDTFKTKLLNITPPKDLKQLQSILGLLNFARNFIPNFAELVQPLYNLIASAKGKYIEWSEENTKQLNMVIEALNTASNLEERLPEQRLVIKVNTSPSAGYVRYYNETGKKPIMYLNYVFSKAELKFSMLEKLLTTMHKALIKAMDLAMGQEILVYSPIVSMTKIQKTPLPERKALPIRWITWMTYLEDPRIQFHYDKTLPELKHIPDVYTSSQSPVKHPSQYEGVFYTDGSAIKSPDPTKSNNAGMGIVHATYKPEYQVLNQWSIPLGNHTAQMAEIAAVEFACKKALKIPGPVLVITDSFYVAESANKELPYWKSNGFVNNKKKPLKHISKWKSIAECLSMKPDITIQHEKGISLQIPVFILKGNALADKLATQGSYVVNAGKRTADGSEFEKRTADGSEFESPKKKAKVE

SEQ ID NO: 1297 - protein, 2094 aa, synthetic construct
MPAAKRVKLDGGDKKYSIGLDIGTNSVGWAVITDEYKVPSKKFKVLGNTDRHSIKKNLIGALLFDSGETAEATRLKRTARRRYTRRKNRICYLQEIFSNEMAKVDDSFFHRLEESFLVEEDKKHERHPIFGNIVDEVAYHEKYPTIYHLRKKLVDSTDKADLRLIYLALAHMIKFRGHFLIEGDLNPDNSDVDKLFIQLVQTYNQLFEENPINASGVDAKAILSARLSKSRRLENLIAQLPGEKKNGLFGNLIALSLGLTPNFKSNFDLAEDAKLQLSKDTYDDDLDNLLAQIGDQYADLFLAAKNLSDAILLSDILRVNTEITKAPLSASMIKRYDEHHQDLTLLKALVRQQLPEKYKEIFFDQSKNGYAGYIDGGASQEEFYKFIKPILEKMDGTEELLVKLNREDLLRKQRTFDNGSIPHQIHLGELHAILRRQEDFYPFLKDNREKIEKILTFRIPYYVGPLARGNSRFAWMTRKSEETITPWNFEEVVDKGASAQSFIERMTNFDKNLPNEKVLPKHSLLYEYFTVYNELTKVKYVTEGMRKPAFLSGEQKKAIVDLLFKTNRKVTVKQLKEDYFKKIECFDSVEISGVEDRFNASLGTYHDLLKIIKDKDFLDNEENEDILEDIVLTLTLFEDREMIEERLKTYAHLFDDKVMKQLKRRRYTGWGRLSRKLINGIRDKQSGKTILDFLKSDGFANRNFMQLIHDDSLTFKEDIQKAQVSGQGDSLHEHIANLAGSPAIKKGILQTVKVVDELVKVMGRHKPENIVIEMARENQTTQKGQKNSRERMKRIEEGIKELGSQILKEHPVENTQLQNEKLYLYYLQNGRDMYVDQELDINRLSDYDVDHIVPQSFLKDDSIDNKVLTRSDKARGKSDNVPSEEVVKKMKNYWRQLLNAKLITQRKFDNLTKAERGGLSELDKAGFIKRQLVETRQITKHVAQILDSRMNTKYDENDKLIREVKVITLKSKLVSDFRKDFQFYKVREINNYHHAHDAYLNAVVGTALIKKYPKLESEFVYGDYKVYDVRKMIAKSEQEIGKATAKYFFYSNIMNFFKTEITLANGEIRKRPLIETNGETGEIVWDKGRDFATVRKVLSMPQVNIVKKTEVQTGGFSKESILPKRNSDKLIARKKDWDPKKYGGFDSPTVAYSVLVVAKVEKGKSKKLKSVKELLGITIMERSSFEKNPIDFLEAKGYKEVKKDLIIKLPKYSLFELENGRKRMLASAGELQKGNELALPSKYVNFLYLASHYEKLKGSPEDNEQKQLFVEQHKHYLDEIIEQISEFSKRVILADANLDKVLSAYNKHRDKPIREQAENIIHLFTLTNLGAPAAFKYFDTTIDRKRYTSTKEVLDATLIHQSITGLYETRIDLSQLGGDGGGSSGSSGSSGSSGSSGSSGGVPWLTQQPLQLTILVPLQEYQEKILSKTALPEDQKQQLKTLFVKYDNLWQHWENQVGHRKIRPHNIATGDYPPRPQKQYPINPKAKPSIQIVIDDLLKQGVLTPQNSTMNTPVYPVPKPDGRWRMVLDYREVNKTIPLTAAQNQHSAGILATIVRQKYKTTLDLANGFWAHPITPESYWLTAFTWQGKQYCWTRLPQGFLNSPALFTADVVDLLKEIPNVQVYVDDIYLSHDDPKEHVQQLEKVFQILLQAGYVVSLKKSEIGQKTVEFLGFNITKEGRGLTDTFKTKLLNITPPKDLKQLQSILGLLNFARNFIPNFAELVQPLYNLIASAKGKYIEWSEENTKQLNMVIEALNTASNLEERLPEQRLVIKVNTSPSAGYVRYYNETGKKPIMYLNYVFSKAELKFSMLEKLLTTMHKALIKAMDLAMGQEILVYSPIVSMTKIQKTPLPERKALPIRWITWMTYLEDPRIQFHYDKTLPELKHIPDVYTSSQSPVKHPSQYEGVFYTDGSAIKSPDPTKSNNAGMGIVHATYKPEYQVLNQWSIPLGNHTAQMAEIAAVEFACKKALKIPGPVLVITDSFYVAESANKELPYWKSNGFVNNKKKPLKHISKWKSIAECLSMKPDITIQHEKGISLQIPVFILKGNALADKLATQGSYVVNAGKRTADGSEFEKRTADGSEFESPKKKAKVE

SEQ ID NO: 1298 - protein, 2122 aa, synthetic construct
MPAAKRVKLDGGDKKYSIGLDIGTNSVGWAVITDEYKVPSKKFKVLGNTDRHSIKKNLIGALLFDSGETAEATRLKRTARRRYTRRKNRICYLQEIFSNEMAKVDDSFFHRLEESFLVEEDKKHERHPIFGNIVDEVAYHEKYPTIYHLRKKLVDSTDKADLRLIYLALAHMIKFRGHFLIEGDLNPDNSDVDKLFIQLVQTYNQLFEENPINASGVDAKAILSARLSKSRRLENLIAQLPGEKKNGLFGNLIALSLGLTPNFKSNFDLAEDAKLQLSKDTYDDDLDNLLAQIGDQYADLFLAAKNLSDAILLSDILRVNTEITKAPLSASMIKRYDEHHQDLTLLKALVRQQLPEKYKEIFFDQSKNGYAGYIDGGASQEEFYKFIKPILEKMDGTEELLVKLNREDLLRKQRTFDNGSIPHQIHLGELHAILRRQEDFYPFLKDNREKIEKILTFRIPYYVGPLARGNSRFAWMTRKSEETITPWNFEEVVDKGASAQSFIERMTNFDKNLPNEKVLPKHSLLYEYFTVYNELTKVKYVTEGMRKPAFLSGEQKKAIVDLLFKTNRKVTVKQLKEDYFKKIECFDSVEISGVEDRFNASLGTYHDLLKIIKDKDFLDNEENEDILEDIVLTLTLFEDREMIEERLKTYAHLFDDKVMKQLKRRRYTGWGRLSRKLINGIRDKQSGKTILDFLKSDGFANRNFMQLIHDDSLTFKEDIQKAQVSGQGDSLHEHIANLAGSPAIKKGILQTVKVVDELVKVMGRHKPENIVIEMARENQTTQKGQKNSRERMKRIEEGIKELGSQILKEHPVENTQLQNEKLYLYYLQNGRDMYVDQELDINRLSDYDVDHIVPQSFLKDDSIDNKVLTRSDKARGKSDNVPSEEVVKKMKNYWRQLLNAKLITQRKFDNLTKAERGGLSELDKAGFIKRQLVETRQITKHVAQILDSRMNTKYDENDKLIREVKVITLKSKLVSDFRKDFQFYKVREINNYHHAHDAYLNAVVGTALIKKYPKLESEFVYGDYKVYDVRKMIAKSEQEIGKATAKYFFYSNIMNFFKTEITLANGEIRKRPLIETNGETGEIVWDKGRDFATVRKVLSMPQVNIVKKTEVQTGGFSKESILPKRNSDKLIARKKDWDPKKYGGFDSPTVAYSVLVVAKVEKGKSKKLKSVKELLGITIMERSSFEKNPIDFLEAKGYKEVKKDLIIKLPKYSLFELENGRKRMLASAGELQKGNELALPSKYVNFLYLASHYEKLKGSPEDNEQKQLFVEQHKHYLDEIIEQISEFSKRVILADANLDKVLSAYNKHRDKPIREQAENIIHLFTLTNLGAPAAFKYFDTTIDRKRYTSTKEVLDATLIHQSITGLYETRIDLSQLGGDGGAEAAAKEAAAKEAAAKEAAAKALEAEAAAKEAAAKEAAAKEAAAKAGGVPWLTQQPLQLTILVPLQEYQEKILSKTALPEDQKQQLKTLFVKYDNLWQHWENQVGHRKIRPHNIATGDYPPRPQKQYPINPKAKPSIQIVIDDLLKQGVLTPQNSTMNTPVYPVPKPDGRWRMVLDYREVNKTIPLTAAQNQHSAGILATIVRQKYKTTLDLANGFWAHPITPESYWLTAFTWQGKQYCWTRLPQGFLNSPALFNADVVDLLKEIPNVQVYVDDIYLSHDDPKEHVQQLEKVFQILLQAGYVVSLKKSEIGQKTVEFLGFNITKEGRGLTDTFKTKLLNITPPKDLKQLQSILGLLNFARNFIPNFAELVQPLYNLIAPAKGKYIEWSEENTKQLNMVIEALNTASNLEERLPEQRLVIKVNTSPSAGYVRYYNETGKKPIMYLNYVFSKAELKFSMLEKLLTTMHKALIKAMDLAMGQEILVYSPIVSMTKIQKTPLPERKALPIRWITWMTYLEDPRIQFHYDKTLPELKHIPDVYTSSQSPVKHPSQYEGVFYTDGSAIKSPDPTKSNNAGMGIVHATYKPEYQVLNQWSIPLGNHTAQMAEIAAVEFACKKALKIPGPVLVITDSFYVAESANKELPYWKSNGFVNNKKKPLKHISKWKSIAECLSMKPDITIQHEKGISLQIPVFILKGNALADKLATQGSYVVNAGKRTADGSEFEKRTADGSEFESPKKKAKVE

SEQ ID NO: 1299 - protein, 2096 aa, synthetic construct
MPAAKRVKLDGGDKKYSIGLDIGTNSVGWAVITDEYKVPSKKFKVLGNTDRHSIKKNLIGALLFDSGETAEATRLKRTARRRYTRRKNRICYLQEIFSNEMAKVDDSFFHRLEESFLVEEDKKHERHPIFGNIVDEVAYHEKYPTIYHLRKKLVDSTDKADLRLIYLALAHMIKFRGHFLIEGDLNPDNSDVDKLFIQLVQTYNQLFEENPINASGVDAKAILSARLSKSRRLENLIAQLPGEKKNGLFGNLIALSLGLTPNFKSNFDLAEDAKLQLSKDTYDDDLDNLLAQIGDQYADLFLAAKNLSDAILLSDILRVNTEITKAPLSASMIKRYDEHHQDLTLLKALVRQQLPEKYKEIFFDQSKNGYAGYIDGGASQEEFYKFIKPILEKMDGTEELLVKLNREDLLRKQRTFDNGSIPHQIHLGELHAILRRQEDFYPFLKDNREKIEKILTFRIPYYVGPLARGNSRFAWMTRKSEETITPWNFEEVVDKGASAQSFIERMTNFDKNLPNEKVLPKHSLLYEYFTVYNELTKVKYVTEGMRKPAFLSGEQKKAIVDLLFKTNRKVTVKQLKEDYFKKIECFDSVEISGVEDRFNASLGTYHDLLKIIKDKDFLDNEENEDILEDIVLTLTLFEDREMIEERLKTYAHLFDDKVMKQLKRRRYTGWGRLSRKLINGIRDKQSGKTILDFLKSDGFANRNFMQLIHDDSLTFKEDIQKAQVSGQGDSLHEHIANLAGSPAIKKGILQTVKVVDELVKVMGRHKPENIVIEMARENQTTQKGQKNSRERMKRIEEGIKELGSQILKEHPVENTQLQNEKLYLYYLQNGRDMYVDQELDINRLSDYDVDHIVPQSFLKDDSIDNKVLTRSDKARGKSDNVPSEEVVKKMKNYWRQLLNAKLITQRKFDNLTKAERGGLSELDKAGFIKRQLVETRQITKHVAQILDSRMNTKYDENDKLIREVKVITLKSKLVSDFRKDFQFYKVREINNYHHAHDAYLNAVVGTALIKKYPKLESEFVYGDYKVYDVRKMIAKSEQEIGKATAKYFFYSNIMNFFKTEITLANGEIRKRPLIETNGETGEIVWDKGRDFATVRKVLSMPQVNIVKKTEVQTGGFSKESILPKRNSDKLIARKKDWDPKKYGGFDSPTVAYSVLVVAKVEKGKSKKLKSVKELLGITIMERSSFEKNPIDFLEAKGYKEVKKDLIIKLPKYSLFELENGRKRMLASAGELQKGNELALPSKYVNFLYLASHYEKLKGSPEDNEQKQLFVEQHKHYLDEIIEQISEFSKRVILADANLDKVLSAYNKHRDKPIREQAENIIHLFTLTNLGAPAAFKYFDTTIDRKRYTSTKEVLDATLIHQSITGLYETRIDLSQLGGDGGGGGGSGGGGSGGGGSGGGGSGGVPWLTQQPLQLTILVPLQEYQEKILSKTALPEDQKQQLKTLFVKYDNLWQHWENQVGHRKIRPHNIATGDYPPRPQKQYPINPKAKPSIQIVIDDLLKQGVLTPQNSTMNTPVYPVPKPDGRWRMVLDYREVNKTIPLTAAQNQHSAGILATIVRQKYKTTLDLANGFWAHPITPESYWLTAFTWQGKQYCWTRLPQGFLNSPALFNADVVDLLKEIPNVQVYVDDIYLSHDDPKEHVQQLEKVFQILLQAGYVVSLKKSEIGQKTVEFLGFNITKEGRGLTDTFKTKLLNITPPKDLKQLQSILGLLNFARNFIPNFAELVQPLYNLIAPAKGKYIEWSEENTKQLNMVIEALNTASNLEERLPEQRLVIKVNTSPSAGYVRYYNETGKKPIMYLNYVFSKAELKFSMLEKLLTTMHKALIKAMDLAMGQEILVYSPIVSMTKIQKTPLPERKALPIRWITWMTYLEDPRIQFHYDKTLPELKHIPDVYTSSQSPVKHPSQYEGVFYTDGSAIKSPDPTKSNNAGMGIVHATYKPEYQVLNQWSIPLGNHTAQMAEIAAVEFACKKALKIPGPVLVITDSFYVAESANKELPYWKSNGFVNNKKKPLKHISKWKSIAECLSMKPDITIQHEKGISLQIPVFILKGNALADKLATQGSYVVNAGKRTADGSEFEKRTADGSEFESPKKKAKVE

SEQ ID NO: 1300 - protein, 2096 aa, synthetic construct
MPAAKRVKLDGGDKKYSIGLDIGTNSVGWAVITDEYKVPSKKFKVLGNTDRHSIKKNLIGALLFDSGETAEATRLKRTARRRYTRRKNRICYLQEIFSNEMAKVDDSFFHRLEESFLVEEDKKHERHPIFGNIVDEVAYHEKYPTIYHLRKKLVDSTDKADLRLIYLALAHMIKFRGHFLIEGDLNPDNSDVDKLFIQLVQTYNQLFEENPINASGVDAKAILSARLSKSRRLENLIAQLPGEKKNGLFGNLIALSLGLTPNFKSNFDLAEDAKLQLSKDTYDDDLDNLLAQIGDQYADLFLAAKNLSDAILLSDILRVNTEITKAPLSASMIKRYDEHHQDLTLLKALVRQQLPEKYKEIFFDQSKNGYAGYIDGGASQEEFYKFIKPILEKMDGTEELLVKLNREDLLRKQRTFDNGSIPHQIHLGELHAILRRQEDFYPFLKDNREKIEKILTFRIPYYVGPLARGNSRFAWMTRKSEETITPWNFEEVVDKGASAQSFIERMTNFDKNLPNEKVLPKHSLLYEYFTVYNELTKVKYVTEGMRKPAFLSGEQKKAIVDLLFKTNRKVTVKQLKEDYFKKIECFDSVEISGVEDRFNASLGTYHDLLKIIKDKDFLDNEENEDILEDIVLTLTLFEDREMIEERLKTYAHLFDDKVMKQLKRRRYTGWGRLSRKLINGIRDKQSGKTILDFLKSDGFANRNFMQLIHDDSLTFKEDIQKAQVSGQGDSLHEHIANLAGSPAIKKGILQTVKVVDELVKVMGRHKPENIVIEMARENQTTQKGQKNSRERMKRIEEGIKELGSQILKEHPVENTQLQNEKLYLYYLQNGRDMYVDQELDINRLSDYDVDHIVPQSFLKDDSIDNKVLTRSDKARGKSDNVPSEEVVKKMKNYWRQLLNAKLITQRKFDNLTKAERGGLSELDKAGFIKRQLVETRQITKHVAQILDSRMNTKYDENDKLIREVKVITLKSKLVSDFRKDFQFYKVREINNYHHAHDAYLNAVVGTALIKKYPKLESEFVYGDYKVYDVRKMIAKSEQEIGKATAKYFFYSNIMNFFKTEITLANGEIRKRPLIETNGETGEIVWDKGRDFATVRKVLSMPQVNIVKKTEVQTGGFSKESILPKRNSDKLIARKKDWDPKKYGGFDSPTVAYSVLVVAKVEKGKSKKLKSVKELLGITIMERSSFEKNPIDFLEAKGYKEVKKDLIIKLPKYSLFELENGRKRMLASAGELQKGNELALPSKYVNFLYLASHYEKLKGSPEDNEQKQLFVEQHKHYLDEIIEQISEFSKRVILADANLDKVLSAYNKHRDKPIREQAENIIHLFTLTNLGAPAAFKYFDTTIDRKRYTSTKEVLDATLIHQSITGLYETRIDLSQLGGDGGEAAAKEAAAKEAAAKEAAAKGGVPWLTQQPLQLTILVPLQEYQEKILSKTALPEDQKQQLKTLFVKYDNLWQHWENQVGHRKIRPHNIATGDYPPRPQKQYPINPKAKPSIQIVIDDLLKQGVLTPQNSTMNTPVYPVPKPDGRWRMVLDYREVNKTIPLTAAQNQHSAGILATIVRQKYKTTLDLANGFWAHPITPESYWLTAFTWQGKQYCWTRLPQGFLNSPALFNADVVDLLKEIPNVQVYVDDIYLSHDDPKEHVQQLEKVFQILLQAGYVVSLKKSEIGQKTVEFLGFNITKEGRGLTDTFKTKLLNITPPKDLKQLQSILGLLNFARNFIPNFAELVQPLYNLIAPAKGKYIEWSEENTKQLNMVIEALNTASNLEERLPEQRLVIKVNTSPSAGYVRYYNETGKKPIMYLNYVFSKAELKFSMLEKLLTTMHKALIKAMDLAMGQEILVYSPIVSMTKIQKTPLPERKALPIRWITWMTYLEDPRIQFHYDKTLPELKHIPDVYTSSQSPVKHPSQYEGVFYTDGSAIKSPDPTKSNNAGMGIVHATYKPEYQVLNQWSIPLGNHTAQMAEIAAVEFACKKALKIPGPVLVITDSFYVAESANKELPYWKSNGFVNNKKKPLKHISKWKSIAECLSMKPDITIQHEKGISLQIPVFILKGNALADKLATQGSYVVNAGKRTADGSEFEKRTADGSEFESPKKKAKVE

SEQ ID NO: 1301 - protein, 2084 aa, synthetic construct
MPAAKRVKLDGGDKKYSIGLDIGTNSVGWAVITDEYKVPSKKFKVLGNTDRHSIKKNLIGALLFDSGETAEATRLKRTARRRYTRRKNRICYLQEIFSNEMAKVDDSFFHRLEESFLVEEDKKHERHPIFGNIVDEVAYHEKYPTIYHLRKKLVDSTDKADLRLIYLALAHMIKFRGHFLIEGDLNPDNSDVDKLFIQLVQTYNQLFEENPINASGVDAKAILSARLSKSRRLENLIAQLPGEKKNGLFGNLIALSLGLTPNFKSNFDLAEDAKLQLSKDTYDDDLDNLLAQIGDQYADLFLAAKNLSDAILLSDILRVNTEITKAPLSASMIKRYDEHHQDLTLLKALVRQQLPEKYKEIFFDQSKNGYAGYIDGGASQEEFYKFIKPILEKMDGTEELLVKLNREDLLRKQRTFDNGSIPHQIHLGELHAILRRQEDFYPFLKDNREKIEKILTFRIPYYVGPLARGNSRFAWMTRKSEETITPWNFEEVVDKGASAQSFIERMTNFDKNLPNEKVLPKHSLLYEYFTVYNELTKVKYVTEGMRKPAFLSGEQKKAIVDLLFKTNRKVTVKQLKEDYFKKIECFDSVEISGVEDRFNASLGTYHDLLKIIKDKDFLDNEENEDILEDIVLTLTLFEDREMIEERLKTYAHLFDDKVMKQLKRRRYTGWGRLSRKLINGIRDKQSGKTILDFLKSDGFANRNFMQLIHDDSLTFKEDIQKAQVSGQGDSLHEHIANLAGSPAIKKGILQTVKVVDELVKVMGRHKPENIVIEMARENQTTQKGQKNSRERMKRIEEGIKELGSQILKEHPVENTQLQNEKLYLYYLQNGRDMYVDQELDINRLSDYDVDHIVPQSFLKDDSIDNKVLTRSDKARGKSDNVPSEEVVKKMKNYWRQLLNAKLITQRKFDNLTKAERGGLSELDKAGFIKRQLVETRQITKHVAQILDSRMNTKYDENDKLIREVKVITLKSKLVSDFRKDFQFYKVREINNYHHAHDAYLNAVVGTALIKKYPKLESEFVYGDYKVYDVRKMIAKSEQEIGKATAKYFFYSNIMNFFKTEITLANGEIRKRPLIETNGETGEIVWDKGRDFATVRKVLSMPQVNIVKKTEVQTGGFSKESILPKRNSDKLIARKKDWDPKKYGGFDSPTVAYSVLVVAKVEKGKSKKLKSVKELLGITIMERSSFEKNPIDFLEAKGYKEVKKDLIIKLPKYSLFELENGRKRMLASAGELQKGNELALPSKYVNFLYLASHYEKLKGSPEDNEQKQLFVEQHKHYLDEIIEQISEFSKRVILADANLDKVLSAYNKHRDKPIREQAENIIHLFTLTNLGAPAAFKYFDTTIDRKRYTSTKEVLDATLIHQSITGLYETRIDLSQLGGDGGEAAAKPAPGGVPWLTQQPLQLTILVPLQEYQEKILSKTALPEDQKQQLKTLFVKYDNLWQHWENQVGHRKIRPHNIATGDYPPRPQKQYPINPKAKPSIQIVIDDLLKQGVLTPQNSTMNTPVYPVPKPDGRWRMVLDYREVNKTIPLTAAQNQHSAGILATIVRQKYKTTLDLANGFWAHPITPESYWLTAFTWQGKQYCWTRLPQGFLNSPALFNADVVDLLKEIPNVQVYVDDIYLSHDDPKEHVQQLEKVFQILLQAGYVVSLKKSEIGQKTVEFLGFNITKEGRGLTDTFKTKLLNITPPKDLKQLQSILGLLNFARNFIPNFAELVQPLYNLIAPAKGKYIEWSEENTKQLNMVIEALNTASNLEERLPEQRLVIKVNTSPSAGYVRYYNETGKKPIMYLNYVFSKAELKFSMLEKLLTTMHKALIKAMDLAMGQEILVYSPIVSMTKIQKTPLPERKALPIRWITWMTYLEDPRIQFHYDKTLPELKHIPDVYTSSQSPVKHPSQYEGVFYTDGSAIKSPDPTKSNNAGMGIVHATYKPEYQVLNQWSIPLGNHTAQMAEIAAVEFACKKALKIPGPVLVITDSFYVAESANKELPYWKSNGFVNNKKKPLKHISKWKSIAECLSMKPDITIQHEKGISLQIPVFILKGNALADKLATQGSYVVNAGKRTADGSEFEKRTADGSEFESPKKKAKVE

SEQ ID NO: 1302 - protein, 2087 aa, synthetic construct
MPAAKRVKLDGGDKKYSIGLDIGTNSVGWAVITDEYKVPSKKFKVLGNTDRHSIKKNLIGALLFDSGETAEATRLKRTARRRYTRRKNRICYLQEIFSNEMAKVDDSFFHRLEESFLVEEDKKHERHPIFGNIVDEVAYHEKYPTIYHLRKKLVDSTDKADLRLIYLALAHMIKFRGHFLIEGDLNPDNSDVDKLFIQLVQTYNQLFEENPINASGVDAKAILSARLSKSRRLENLIAQLPGEKKNGLFGNLIALSLGLTPNFKSNFDLAEDAKLQLSKDTYDDDLDNLLAQIGDQYADLFLAAKNLSDAILLSDILRVNTEITKAPLSASMIKRYDEHHQDLTLLKALVRQQLPEKYKEIFFDQSKNGYAGYIDGGASQEEFYKFIKPILEKMDGTEELLVKLNREDLLRKQRTFDNGSIPHQIHLGELHAILRRQEDFYPFLKDNREKIEKILTFRIPYYVGPLARGNSRFAWMTRKSEETITPWNFEEVVDKGASAQSFIERMTNFDKNLPNEKVLPKHSLLYEYFTVYNELTKVKYVTEGMRKPAFLSGEQKKAIVDLLFKTNRKVTVKQLKEDYFKKIECFDSVEISGVEDRFNASLGTYHDLLKIIKDKDFLDNEENEDILEDIVLTLTLFEDREMIEERLKTYAHLFDDKVMKQLKRRRYTGWGRLSRKLINGIRDKQSGKTILDFLKSDGFANRNFMQLIHDDSLTFKEDIQKAQVSGQGDSLHEHIANLAGSPAIKKGILQTVKVVDELVKVMGRHKPENIVIEMARENQTTQKGQKNSRERMKRIEEGIKELGSQILKEHPVENTQLQNEKLYLYYLQNGRDMYVDQELDINRLSDYDVDHIVPQSFLKDDSIDNKVLTRSDKARGKSDNVPSEEVVKKMKNYWRQLLNAKLITQRKFDNLTKAERGGLSELDKAGFIKRQLVETRQITKHVAQILDSRMNTKYDENDKLIREVKVITLKSKLVSDFRKDFQFYKVREINNYHHAHDAYLNAVVGTALIKKYPKLESEFVYGDYKVYDVRKMIAKSEQEIGKATAKYFFYSNIMNFFKTEITLANGEIRKRPLIETNGETGEIVWDKGRDFATVRKVLSMPQVNIVKKTEVQTGGFSKESILPKRNSDKLIARKKDWDPKKYGGFDSPTVAYSVLVVAKVEKGKSKKLKSVKELLGITIMERSSFEKNPIDFLEAKGYKEVKKDLIIKLPKYSLFELENGRKRMLASAGELQKGNELALPSKYVNFLYLASHYEKLKGSPEDNEQKQLFVEQHKHYLDEIIEQISEFSKRVILADANLDKVLSAYNKHRDKPIREQAENIIHLFTLTNLGAPAAFKYFDTTIDRKRYTSTKEVLDATLIHQSITGLYETRIDLSQLGGDGGPAPGSSEAAAKGGVPWLTQQPLQLTILVPLQEYQEKILSKTALPEDQKQQLKTLFVKYDNLWQHWENQVGHRKIRPHNIATGDYPPRPQKQYPINPKAKPSIQIVIDDLLKQGVLTPQNSTMNTPVYPVPKPDGRWRMVLDYREVNKTIPLTAAQNQHSAGILATIVRQKYKTTLDLANGFWAHPITPESYWLTAFTWQGKQYCWTRLPQGFLNSPALFNADVVDLLKEIPNVQVYVDDIYLSHDDPKEHVQQLEKVFQILLQAGYVVSLKKSEIGQKTVEFLGFNITKEGRGLTDTFKTKLLNITPPKDLKQLQSILGLLNFARNFIPNFAELVQPLYNLIAPAKGKYIEWSEENTKQLNMVIEALNTASNLEERLPEQRLVIKVNTSPSAGYVRYYNETGKKPIMYLNYVFSKAELKFSMLEKLLTTMHKALIKAMDLAMGQEILVYSPIVSMTKIQKTPLPERKALPIRWITWMTYLEDPRIQFHYDKTLPELKHIPDVYTSSQSPVKHPSQYEGVFYTDGSAIKSPDPTKSNNAGMGIVHATYKPEYQVLNQWSIPLGNHTAQMAEIAAVEFACKKALKIPGPVLVITDSFYVAESANKELPYWKSNGFVNNKKKPLKHISKWKSIAECLSMKPDITIQHEKGISLQIPVFILKGNALADKLATQGSYVVNAGKRTADGSEFEKRTADGSEFESPKKKAKVE

SEQ ID NO: 1303 - protein, 2091 aa, synthetic construct
MPAAKRVKLDGGDKKYSIGLDIGTNSVGWAVITDEYKVPSKKFKVLGNTDRHSIKKNLIGALLFDSGETAEATRLKRTARRRYTRRKNRICYLQEIFSNEMAKVDDSFFHRLEESFLVEEDKKHERHPIFGNIVDEVAYHEKYPTIYHLRKKLVDSTDKADLRLIYLALAHMIKFRGHFLIEGDLNPDNSDVDKLFIQLVQTYNQLFEENPINASGVDAKAILSARLSKSRRLENLIAQLPGEKKNGLFGNLIALSLGLTPNFKSNFDLAEDAKLQLSKDTYDDDLDNLLAQIGDQYADLFLAAKNLSDAILLSDILRVNTEITKAPLSASMIKRYDEHHQDLTLLKALVRQQLPEKYKEIFFDQSKNGYAGYIDGGASQEEFYKFIKPILEKMDGTEELLVKLNREDLLRKQRTFDNGSIPHQIHLGELHAILRRQEDFYPFLKDNREKIEKILTFRIPYYVGPLARGNSRFAWMTRKSEETITPWNFEEVVDKGASAQSFIERMTNFDKNLPNEKVLPKHSLLYEYFTVYNELTKVKYVTEGMRKPAFLSGEQKKAIVDLLFKTNRKVTVKQLKEDYFKKIECFDSVEISGVEDRFNASLGTYHDLLKIIKDKDFLDNEENEDILEDIVLTLTLFEDREMIEERLKTYAHLFDDKVMKQLKRRRYTGWGRLSRKLINGIRDKQSGKTILDFLKSDGFANRNFMQLIHDDSLTFKEDIQKAQVSGQGDSLHEHIANLAGSPAIKKGILQTVKVVDELVKVMGRHKPENIVIEMARENQTTQKGQKNSRERMKRIEEGIKELGSQILKEHPVENTQLQNEKLYLYYLQNGRDMYVDQELDINRLSDYDVDHIVPQSFLKDDSIDNKVLTRSDKARGKSDNVPSEEVVKKMKNYWRQLLNAKLITQRKFDNLTKAERGGLSELDKAGFIKRQLVETRQITKHVAQILDSRMNTKYDENDKLIREVKVITLKSKLVSDFRKDFQFYKVREINNYHHAHDAYLNAVVGTALIKKYPKLESEFVYGDYKVYDVRKMIAKSEQEIGKATAKYFFYSNIMNFFKTEITLANGEIRKRPLIETNGETGEIVWDKGRDFATVRKVLSMPQVNIVKKTEVQTGGFSKESILPKRNSDKLIARKKDWDPKKYGGFDSPTVAYSVLVVAKVEKGKSKKLKSVKELLGITIMERSSFEKNPIDFLEAKGYKEVKKDLIIKLPKYSLFELENGRKRMLASAGELQKGNELALPSKYVNFLYLASHYEKLKGSPEDNEQKQLFVEQHKHYLDEIIEQISEFSKRVILADANLDKVLSAYNKHRDKPIREQAENIIHLFTLTNLGAPAAFKYFDTTIDRKRYTSTKEVLDATLIHQSITGLYETRIDLSQLGGDGGGSSGSSGSSGSSGSSGGVPWLTQQPLQLTILVPLQEYQEKILSKTALPEDQKQQLKTLFVKYDNLWQHWENQVGHRKIRPHNIATGDYPPRPQKQYPINPKAKPSIQIVIDDLLKQGVLTPQNSTMNTPVYPVPKPDGRWRMVLDYREVNKTIPLTAAQNQHSAGILATIVRQKYKTTLDLANGFWAHPITPESYWLTAFTWQGKQYCWTRLPQGFLNSPALFNADVVDLLKEIPNVQVYVDDIYLSHDDPKEHVQQLEKVFQILLQAGYVVSLKKSEIGQKTVEFLGFNITKEGRGLTDTFKTKLLNITPPKDLKQLQSILGLLNFARNFIPNFAELVQPLYNLIAPAKGKYIEWSEENTKQLNMVIEALNTASNLEERLPEQRLVIKVNTSPSAGYVRYYNETGKKPIMYLNYVFSKAELKFSMLEKLLTTMHKALIKAMDLAMGQEILVYSPIVSMTKIQKTPLPERKALPIRWITWMTYLEDPRIQFHYDKTLPELKHIPDVYTSSQSPVKHPSQYEGVFYTDGSAIKSPDPTKSNNAGMGIVHATYKPEYQVLNQWSIPLGNHTAQMAEIAAVEFACKKALKIPGPVLVITDSFYVAESANKELPYWKSNGFVNNKKKPLKHISKWKSIAECLSMKPDITIQHEKGISLQIPVFILKGNALADKLATQGSYVVNAGKRTADGSEFEKRTADGSEFESPKKKAKVE

SEQ ID NO: 1304 - protein, 2085 aa, synthetic construct
MPAAKRVKLDGGDKKYSIGLDIGTNSVGWAVITDEYKVPSKKFKVLGNTDRHSIKKNLIGALLFDSGETAEATRLKRTARRRYTRRKNRICYLQEIFSNEMAKVDDSFFHRLEESFLVEEDKKHERHPIFGNIVDEVAYHEKYPTIYHLRKKLVDSTDKADLRLIYLALAHMIKFRGHFLIEGDLNPDNSDVDKLFIQLVQTYNQLFEENPINASGVDAKAILSARLSKSRRLENLIAQLPGEKKNGLFGNLIALSLGLTPNFKSNFDLAEDAKLQLSKDTYDDDLDNLLAQIGDQYADLFLAAKNLSDAILLSDILRVNTEITKAPLSASMIKRYDEHHQDLTLLKALVRQQLPEKYKEIFFDQSKNGYAGYIDGGASQEEFYKFIKPILEKMDGTEELLVKLNREDLLRKQRTFDNGSIPHQIHLGELHAILRRQEDFYPFLKDNREKIEKILTFRIPYYVGPLARGNSRFAWMTRKSEETITPWNFEEVVDKGASAQSFIERMTNFDKNLPNEKVLPKHSLLYEYFTVYNELTKVKYVTEGMRKPAFLSGEQKKAIVDLLFKTNRKVTVKQLKEDYFKKIECFDSVEISGVEDRFNASLGTYHDLLKIIKDKDFLDNEENEDILEDIVLTLTLFEDREMIEERLKTYAHLFDDKVMKQLKRRRYTGWGRLSRKLINGIRDKQSGKTILDFLKSDGFANRNFMQLIHDDSLTFKEDIQKAQVSGQGDSLHEHIANLAGSPAIKKGILQTVKVVDELVKVMGRHKPENIVIEMARENQTTQKGQKNSRERMKRIEEGIKELGSQILKEHPVENTQLQNEKLYLYYLQNGRDMYVDQELDINRLSDYDVDHIVPQSFLKDDSIDNKVLTRSDKARGKSDNVPSEEVVKKMKNYWRQLLNAKLITQRKFDNLTKAERGGLSELDKAGFIKRQLVETRQITKHVAQILDSRMNTKYDENDKLIREVKVITLKSKLVSDFRKDFQFYKVREINNYHHAHDAYLNAVVGTALIKKYPKLESEFVYGDYKVYDVRKMIAKSEQEIGKATAKYFFYSNIMNFFKTEITLANGEIRKRPLIETNGETGEIVWDKGRDFATVRKVLSMPQVNIVKKTEVQTGGFSKESILPKRNSDKLIARKKDWDPKKYGGFDSPTVAYSVLVVAKVEKGKSKKLKSVKELLGITIMERSSFEKNPIDFLEAKGYKEVKKDLIIKLPKYSLFELENGRKRMLASAGELQKGNELALPSKYVNFLYLASHYEKLKGSPEDNEQKQLFVEQHKHYLDEIIEQISEFSKRVILADANLDKVLSAYNKHRDKPIREQAENIIHLFTLTNLGAPAAFKYFDTTIDRKRYTSTKEVLDATLIHQSITGLYETRIDLSQLGGDGGGGSGGSGGSGGVPWLTQQPLQLTILVPLQEYQEKILSKTALPEDQKQQLKTLFVKYDNLWQHWENQVGHRKIRPHNIATGDYPPRPQKQYPINPKAKPSIQIVIDDLLKQGVLTPQNSTMNTPVYPVPKPDGRWRMVLDYREVNKTIPLTAAQNQHSAGILATIVRQKYKTTLDLANGFWAHPITPESYWLTAFTWQGKQYCWTRLPQGFLNSPALFNADVVDLLKEIPNVQVYVDDIYLSHDDPKEHVQQLEKVFQILLQAGYVVSLKKSEIGQKTVEFLGFNITKEGRGLTDTFKTKLLNITPPKDLKQLQSILGLLNFARNFIPNFAELVQPLYNLIAPAKGKYIEWSEENTKQLNMVIEALNTASNLEERLPEQRLVIKVNTSPSAGYVRYYNETGKKPIMYLNYVFSKAELKFSMLEKLLTTMHKALIKAMDLAMGQEILVYSPIVSMTKIQKTPLPERKALPIRWITWMTYLEDPRIQFHYDKTLPELKHIPDVYTSSQSPVKHPSQYEGVFYTDGSAIKSPDPTKSNNAGMGIVHATYKPEYQVLNQWSIPLGNHTAQMAEIAAVEFACKKALKIPGPVLVITDSFYVAESANKELPYWKSNGFVNNKKKPLKHISKWKSIAECLSMKPDITIQHEKGISLQIPVFILKGNALADKLATQGSYVVNAGKRTADGSEFEKRTADGSEFESPKKKAKVE

SEQ ID NO: 1305 - protein, 2085 aa, synthetic construct
MPAAKRVKLDGGDKKYSIGLDIGTNSVGWAVITDEYKVPSKKFKVLGNTDRHSIKKNLIGALLFDSGETAEATRLKRTARRRYTRRKNRICYLQEIFSNEMAKVDDSFFHRLEESFLVEEDKKHERHPIFGNIVDEVAYHEKYPTIYHLRKKLVDSTDKADLRLIYLALAHMIKFRGHFLIEGDLNPDNSDVDKLFIQLVQTYNQLFEENPINASGVDAKAILSARLSKSRRLENLIAQLPGEKKNGLFGNLIALSLGLTPNFKSNFDLAEDAKLQLSKDTYDDDLDNLLAQIGDQYADLFLAAKNLSDAILLSDILRVNTEITKAPLSASMIKRYDEHHQDLTLLKALVRQQLPEKYKEIFFDQSKNGYAGYIDGGASQEEFYKFIKPILEKMDGTEELLVKLNREDLLRKQRTFDNGSIPHQIHLGELHAILRRQEDFYPFLKDNREKIEKILTFRIPYYVGPLARGNSRFAWMTRKSEETITPWNFEEVVDKGASAQSFIERMTNFDKNLPNEKVLPKHSLLYEYFTVYNELTKVKYVTEGMRKPAFLSGEQKKAIVDLLFKTNRKVTVKQLKEDYFKKIECFDSVEISGVEDRFNASLGTYHDLLKIIKDKDFLDNEENEDILEDIVLTLTLFEDREMIEERLKTYAHLFDDKVMKQLKRRRYTGWGRLSRKLINGIRDKQSGKTILDFLKSDGFANRNFMQLIHDDSLTFKEDIQKAQVSGQGDSLHEHIANLAGSPAIKKGILQTVKVVDELVKVMGRHKPENIVIEMARENQTTQKGQKNSRERMKRIEEGIKELGSQILKEHPVENTQLQNEKLYLYYLQNGRDMYVDQELDINRLSDYDVDHIVPQSFLKDDSIDNKVLTRSDKARGKSDNVPSEEVVKKMKNYWRQLLNAKLITQRKFDNLTKAERGGLSELDKAGFIKRQLVETRQITKHVAQILDSRMNTKYDENDKLIREVKVITLKSKLVSDFRKDFQFYKVREINNYHHAHDAYLNAVVGTALIKKYPKLESEFVYGDYKVYDVRKMIAKSEQEIGKATAKYFFYSNIMNFFKTEITLANGEIRKRPLIETNGETGEIVWDKGRDFATVRKVLSMPQVNIVKKTEVQTGGFSKESILPKRNSDKLIARKKDWDPKKYGGFDSPTVAYSVLVVAKVEKGKSKKLKSVKELLGITIMERSSFEKNPIDFLEAKGYKEVKKDLIIKLPKYSLFELENGRKRMLASAGELQKGNELALPSKYVNFLYLASHYEKLKGSPEDNEQKQLFVEQHKHYLDEIIEQISEFSKRVILADANLDKVLSAYNKHRDKPIREQAENIIHLFTLTNLGAPAAFKYFDTTIDRKRYTSTKEVLDATLIHQSITGLYETRIDLSQLGGDGGGGGGSSPAPGGVPWLTQQPLQLTILVPLQEYQEKILSKTALPEDQKQQLKTLFVKYDNLWQHWENQVGHRKIRPHNIATGDYPPRPQKQYPINPKAKPSIQIVIDDLLKQGVLTPQNSTMNTPVYPVPKPDGRWRMVLDYREVNKTIPLTAAQNQHSAGILATIVRQKYKTTLDLANGFWAHPITPESYWLTAFTWQGKQYCWTRLPQGFLNSPALFNADVVDLLKEIPNVQVYVDDIYLSHDDPKEHVQQLEKVFQILLQAGYVVSLKKSEIGQKTVEFLGFNITKEGRGLTDTFKTKLLNITPPKDLKQLQSILGLLNFARNFIPNFAELVQPLYNLIAPAKGKYIEWSEENTKQLNMVIEALNTASNLEERLPEQRLVIKVNTSPSAGYVRYYNETGKKPIMYLNYVFSKAELKFSMLEKLLTTMHKALIKAMDLAMGQEILVYSPIVSMTKIQKTPLPERKALPIRWITWMTYLEDPRIQFHYDKTLPELKHIPDVYTSSQSPVKHPSQYEGVFYTDGSAIKSPDPTKSNNAGMGIVHATYKPEYQVLNQWSIPLGNHTAQMAEIAAVEFACKKALKIPGPVLVITDSFYVAESANKELPYWKSNGFVNNKKKPLKHISKWKSIAECLSMKPDITIQHEKGISLQIPVFILKGNALADKLATQGSYVVNAGKRTADGSEFEKRTADGSEFESPKKKAKVE

SEQ ID NO: 1306 - protein, 2087 aa, synthetic construct
MPAAKRVKLDGGDKKYSIGLDIGTNSVGWAVITDEYKVPSKKFKVLGNTDRHSIKKNLIGALLFDSGETAEATRLKRTARRRYTRRKNRICYLQEIFSNEMAKVDDSFFHRLEESFLVEEDKKHERHPIFGNIVDEVAYHEKYPTIYHLRKKLVDSTDKADLRLIYLALAHMIKFRGHFLIEGDLNPDNSDVDKLFIQLVQTYNQLFEENPINASGVDAKAILSARLSKSRRLENLIAQLPGEKKNGLFGNLIALSLGLTPNFKSNFDLAEDAKLQLSKDTYDDDLDNLLAQIGDQYADLFLAAKNLSDAILLSDILRVNTEITKAPLSASMIKRYDEHHQDLTLLKALVRQQLPEKYKEIFFDQSKNGYAGYIDGGASQEEFYKFIKPILEKMDGTEELLVKLNREDLLRKQRTFDNGSIPHQIHLGELHAILRRQEDFYPFLKDNREKIEKILTFRIPYYVGPLARGNSRFAWMTRKSEETITPWNFEEVVDKGASAQSFIERMTNFDKNLPNEKVLPKHSLLYEYFTVYNELTKVKYVTEGMRKPAFLSGEQKKAIVDLLFKTNRKVTVKQLKEDYFKKIECFDSVEISGVEDRFNASLGTYHDLLKIIKDKDFLDNEENEDILEDIVLTLTLFEDREMIEERLKTYAHLFDDKVMKQLKRRRYTGWGRLSRKLINGIRDKQSGKTILDFLKSDGFANRNFMQLIHDDSLTFKEDIQKAQVSGQGDSLHEHIANLAGSPAIKKGILQTVKVVDELVKVMGRHKPENIVIEMARENQTTQKGQKNSRERMKRIEEGIKELGSQILKEHPVENTQLQNEKLYLYYLQNGRDMYVDQELDINRLSDYDVDHIVPQSFLKDDSIDNKVLTRSDKARGKSDNVPSEEVVKKMKNYWRQLLNAKLITQRKFDNLTKAERGGLSELDKAGFIKRQLVETRQITKHVAQILDSRMNTKYDENDKLIREVKVITLKSKLVSDFRKDFQFYKVREINNYHHAHDAYLNAVVGTALIKKYPKLESEFVYGDYKVYDVRKMIAKSEQEIGKATAKYFFYSNIMNFFKTEITLANGEIRKRPLIETNGETGEIVWDKGRDFATVRKVLSMPQVNIVKKTEVQTGGFSKESILPKRNSDKLIARKKDWDPKKYGGFDSPTVAYSVLVVAKVEKGKSKKLKSVKELLGITIMERSSFEKNPIDFLEAKGYKEVKKDLIIKLPKYSLFELENGRKRMLASAGELQKGNELALPSKYVNFLYLASHYEKLKGSPEDNEQKQLFVEQHKHYLDEIIEQISEFSKRVILADANLDKVLSAYNKHRDKPIREQAENIIHLFTLTNLGAPAAFKYFDTTIDRKRYTSTKEVLDATLIHQSITGLYETRIDLSQLGGDGGGSSGGSEAAAKGGVPWLTQQPLQLTILVPLQEYQEKILSKTALPEDQKQQLKTLFVKYDNLWQHWENQVGHRKIRPHNIATGDYPPRPQKQYPINPKAKPSIQIVIDDLLKQGVLTPQNSTMNTPVYPVPKPDGRWRMVLDYREVNKTIPLTAAQNQHSAGILATIVRQKYKTTLDLANGFWAHPITPESYWLTAFTWQGKQYCWTRLPQGFLNSPALFNADVVDLLKEIPNVQVYVDDIYLSHDDPKEHVQQLEKVFQILLQAGYVVSLKKSEIGQKTVEFLGFNITKEGRGLTDTFKTKLLNITPPKDLKQLQSILGLLNFARNFIPNFAELVQPLYNLIAPAKGKYIEWSEENTKQLNMVIEALNTASNLEERLPEQRLVIKVNTSPSAGYVRYYNETGKKPIMYLNYVFSKAELKFSMLEKLLTTMHKALIKAMDLAMGQEILVYSPIVSMTKIQKTPLPERKALPIRWITWMTYLEDPRIQFHYDKTLPELKHIPDVYTSSQSPVKHPSQYEGVFYTDGSAIKSPDPTKSNNAGMGIVHATYKPEYQVLNQWSIPLGNHTAQMAEIAAVEFACKKALKIPGPVLVITDSFYVAESANKELPYWKSNGFVNNKKKPLKHISKWKSIAECLSMKPDITIQHEKGISLQIPVFILKGNALADKLATQGSYVVNAGKRTADGSEFEKRTADGSEFESPKKKAKVE

SEQ ID NO: 1307 - protein, 2085 aa, synthetic construct
MPAAKRVKLDGGDKKYSIGLDIGTNSVGWAVITDEYKVPSKKFKVLGNTDRHSIKKNLIGALLFDSGETAEATRLKRTARRRYTRRKNRICYLQEIFSNEMAKVDDSFFHRLEESFLVEEDKKHERHPIFGNIVDEVAYHEKYPTIYHLRKKLVDSTDKADLRLIYLALAHMIKFRGHFLIEGDLNPDNSDVDKLFIQLVQTYNQLFEENPINASGVDAKAILSARLSKSRRLENLIAQLPGEKKNGLFGNLIALSLGLTPNFKSNFDLAEDAKLQLSKDTYDDDLDNLLAQIGDQYADLFLAAKNLSDAILLSDILRVNTEITKAPLSASMIKRYDEHHQDLTLLKALVRQQLPEKYKEIFFDQSKNGYAGYIDGGASQEEFYKFIKPILEKMDGTEELLVKLNREDLLRKQRTFDNGSIPHQIHLGELHAILRRQEDFYPFLKDNREKIEKILTFRIPYYVGPLARGNSRFAWMTRKSEETITPWNFEEVVDKGASAQSFIERMTNFDKNLPNEKVLPKHSLLYEYFTVYNELTKVKYVTEGMRKPAFLSGEQKKAIVDLLFKTNRKVTVKQLKEDYFKKIECFDSVEISGVEDRFNASLGTYHDLLKIIKDKDFLDNEENEDILEDIVLTLTLFEDREMIEERLKTYAHLFDDKVMKQLKRRRYTGWGRLSRKLINGIRDKQSGKTILDFLKSDGFANRNFMQLIHDDSLTFKEDIQKAQVSGQGDSLHEHIANLAGSPAIKKGILQTVKVVDELVKVMGRHKPENIVIEMARENQTTQKGQKNSRERMKRIEEGIKELGSQILKEHPVENTQLQNEKLYLYYLQNGRDMYVDQELDINRLSDYDVDHIVPQSFLKDDSIDNKVLTRSDKARGKSDNVPSEEVVKKMKNYWRQLLNAKLITQRKFDNLTKAERGGLSELDKAGFIKRQLVETRQITKHVAQILDSRMNTKYDENDKLIREVKVITLKSKLVSDFRKDFQFYKVREINNYHHAHDAYLNAVVGTALIKKYPKLESEFVYGDYKVYDVRKMIAKSEQEIGKATAKYFFYSNIMNFFKTEITLANGEIRKRPLIETNGETGEIVWDKGRDFATVRKVLSMPQVNIVKKTEVQTGGFSKESILPKRNSDKLIARKKDWDPKKYGGFDSPTVAYSVLVVAKVEKGKSKKLKSVKELLGITIMERSSFEKNPIDFLEAKGYKEVKKDLIIKLPKYSLFELENGRKRMLASAGELQKGNELALPSKYVNFLYLASHYEKLKGSPEDNEQKQLFVEQHKHYLDEIIEQISEFSKRVILADANLDKVLSAYNKHRDKPIREQAENIIHLFTLTNLGAPAAFKYFDTTIDRKRYTSTKEVLDATLIHQSITGLYETRIDLSQLGGDGGGSSPAPGGSGGVPWLTQQPLQLTILVPLQEYQEKILSKTALPEDQKQQLKTLFVKYDNLWQHWENQVGHRKIRPHNIATGDYPPRPQKQYPINPKAKPSIQIVIDDLLKQGVLTPQNSTMNTPVYPVPKPDGRWRMVLDYREVNKTIPLTAAQNQHSAGILATIVRQKYKTTLDLANGFWAHPITPESYWLTAFTWQGKQYCWTRLPQGFLNSPALFNADVVDLLKEIPNVQVYVDDIYLSHDDPKEHVQQLEKVFQILLQAGYVVSLKKSEIGQKTVEFLGFNITKEGRGLTDTFKTKLLNITPPKDLKQLQSILGLLNFARNFIPNFAELVQPLYNLIAPAKGKYIEWSEENTKQLNMVIEALNTASNLEERLPEQRLVIKVNTSPSAGYVRYYNETGKKPIMYLNYVFSKAELKFSMLEKLLTTMHKALIKAMDLAMGQEILVYSPIVSMTKIQKTPLPERKALPIRWITWMTYLEDPRIQFHYDKTLPELKHIPDVYTSSQSPVKHPSQYEGVFYTDGSAIKSPDPTKSNNAGMGIVHATYKPEYQVLNQWSIPLGNHTAQMAEIAAVEFACKKALKIPGPVLVITDSFYVAESANKELPYWKSNGFVNNKKKPLKHISKWKSIAECLSMKPDITIQHEKGISLQIPVFILKGNALADKLATQGSYVVNAGKRTADGSEFEKRTADGSEFESPKKKAKVE

SEQ ID NO: 1308 - protein, 2086 aa, synthetic construct
MPAAKRVKLDGGDKKYSIGLDIGTNSVGWAVITDEYKVPSKKFKVLGNTDRHSIKKNLIGALLFDSGETAEATRLKRTARRRYTRRKNRICYLQEIFSNEMAKVDDSFFHRLEESFLVEEDKKHERHPIFGNIVDEVAYHEKYPTIYHLRKKLVDSTDKADLRLIYLALAHMIKFRGHFLIEGDLNPDNSDVDKLFIQLVQTYNQLFEENPINASGVDAKAILSARLSKSRRLENLIAQLPGEKKNGLFGNLIALSLGLTPNFKSNFDLAEDAKLQLSKDTYDDDLDNLLAQIGDQYADLFLAAKNLSDAILLSDILRVNTEITKAPLSASMIKRYDEHHQDLTLLKALVRQQLPEKYKEIFFDQSKNGYAGYIDGGASQEEFYKFIKPILEKMDGTEELLVKLNREDLLRKQRTFDNGSIPHQIHLGELHAILRRQEDFYPFLKDNREKIEKILTFRIPYYVGPLARGNSRFAWMTRKSEETITPWNFEEVVDKGASAQSFIERMTNFDKNLPNEKVLPKHSLLYEYFTVYNELTKVKYVTEGMRKPAFLSGEQKKAIVDLLFKTNRKVTVKQLKEDYFKKIECFDSVEISGVEDRFNASLGTYHDLLKIIKDKDFLDNEENEDILEDIVLTLTLFEDREMIEERLKTYAHLFDDKVMKQLKRRRYTGWGRLSRKLINGIRDKQSGKTILDFLKSDGFANRNFMQLIHDDSLTFKEDIQKAQVSGQGDSLHEHIANLAGSPAIKKGILQTVKVVDELVKVMGRHKPENIVIEMARENQTTQKGQKNSRERMKRIEEGIKELGSQILKEHPVENTQLQNEKLYLYYLQNGRDMYVDQELDINRLSDYDVDHIVPQSFLKDDSIDNKVLTRSDKARGKSDNVPSEEVVKKMKNYWRQLLNAKLITQRKFDNLTKAERGGLSELDKAGFIKRQLVETRQITKHVAQILDSRMNTKYDENDKLIREVKVITLKSKLVSDFRKDFQFYKVREINNYHHAHDAYLNAVVGTALIKKYPKLESEFVYGDYKVYDVRKMIAKSEQEIGKATAKYFFYSNIMNFFKTEITLANGEIRKRPLIETNGETGEIVWDKGRDFATVRKVLSMPQVNIVKKTEVQTGGFSKESILPKRNSDKLIARKKDWDPKKYGGFDSPTVAYSVLVVAKVEKGKSKKLKSVKELLGITIMERSSFEKNPIDFLEAKGYKEVKKDLIIKLPKYSLFELENGRKRMLASAGELQKGNELALPSKYVNFLYLASHYEKLKGSPEDNEQKQLFVEQHKHYLDEIIEQISEFSKRVILADANLDKVLSAYNKHRDKPIREQAENIIHLFTLTNLGAPAAFKYFDTTIDRKRYTSTKEVLDATLIHQSITGLYETRIDLSQLGGDGGEAAAKEAAAKGGVPWLTQQPLQLTILVPLQEYQEKILSKTALPEDQKQQLKTLFVKYDNLWQHWENQVGHRKIRPHNIATGDYPPRPQKQYPINPKAKPSIQIVIDDLLKQGVLTPQNSTMNTPVYPVPKPDGRWRMVLDYREVNKTIPLTAAQNQHSAGILATIVRQKYKTTLDLANGFWAHPITPESYWLTAFTWQGKQYCWTRLPQGFLNSPALFNADVVDLLKEIPNVQVYVDDIYLSHDDPKEHVQQLEKVFQILLQAGYVVSLKKSEIGQKTVEFLGFNITKEGRGLTDTFKTKLLNITPPKDLKQLQSILGLLNFARNFIPNFAELVQPLYNLIAPAKGKYIEWSEENTKQLNMVIEALNTASNLEERLPEQRLVIKVNTSPSAGYVRYYNETGKKPIMYLNYVFSKAELKFSMLEKLLTTMHKALIKAMDLAMGQEILVYSPIVSMTKIQKTPLPERKALPIRWITWMTYLEDPRIQFHYDKTLPELKHIPDVYTSSQSPVKHPSQYEGVFYTDGSAIKSPDPTKSNNAGMGIVHATYKPEYQVLNQWSIPLGNHTAQMAEIAAVEFACKKALKIPGPVLVITDSFYVAESANKELPYWKSNGFVNNKKKPLKHISKWKSIAECLSMKPDITIQHEKGISLQIPVFILKGNALADKLATQGSYVVNAGKRTADGSEFEKRTADGSEFESPKKKAKVE

SEQ ID NO: 1309 - protein, 2087 aa, synthetic construct
MPAAKRVKLDGGDKKYSIGLDIGTNSVGWAVITDEYKVPSKKFKVLGNTDRHSIKKNLIGALLFDSGETAEATRLKRTARRRYTRRKNRICYLQEIFSNEMAKVDDSFFHRLEESFLVEEDKKHERHPIFGNIVDEVAYHEKYPTIYHLRKKLVDSTDKADLRLIYLALAHMIKFRGHFLIEGDLNPDNSDVDKLFIQLVQTYNQLFEENPINASGVDAKAILSARLSKSRRLENLIAQLPGEKKNGLFGNLIALSLGLTPNFKSNFDLAEDAKLQLSKDTYDDDLDNLLAQIGDQYADLFLAAKNLSDAILLSDILRVNTEITKAPLSASMIKRYDEHHQDLTLLKALVRQQLPEKYKEIFFDQSKNGYAGYIDGGASQEEFYKFIKPILEKMDGTEELLVKLNREDLLRKQRTFDNGSIPHQIHLGELHAILRRQEDFYPFLKDNREKIEKILTFRIPYYVGPLARGNSRFAWMTRKSEETITPWNFEEVVDKGASAQSFIERMTNFDKNLPNEKVLPKHSLLYEYFTVYNELTKVKYVTEGMRKPAFLSGEQKKAIVDLLFKTNRKVTVKQLKEDYFKKIECFDSVEISGVEDRFNASLGTYHDLLKIIKDKDFLDNEENEDILEDIVLTLTLFEDREMIEERLKTYAHLFDDKVMKQLKRRRYTGWGRLSRKLINGIRDKQSGKTILDFLKSDGFANRNFMQLIHDDSLTFKEDIQKAQVSGQGDSLHEHIANLAGSPAIKKGILQTVKVVDELVKVMGRHKPENIVIEMARENQTTQKGQKNSRERMKRIEEGIKELGSQILKEHPVENTQLQNEKLYLYYLQNGRDMYVDQELDINRLSDYDVDHIVPQSFLKDDSIDNKVLTRSDKARGKSDNVPSEEVVKKMKNYWRQLLNAKLITQRKFDNLTKAERGGLSELDKAGFIKRQLVETRQITKHVAQILDSRMNTKYDENDKLIREVKVITLKSKLVSDFRKDFQFYKVREINNYHHAHDAYLNAVVGTALIKKYPKLESEFVYGDYKVYDVRKMIAKSEQEIGKATAKYFFYSNIMNFFKTEITLANGEIRKRPLIETNGETGEIVWDKGRDFATVRKVLSMPQVNIVKKTEVQTGGFSKESILPKRNSDKLIARKKDWDPKKYGGFDSPTVAYSVLVVAKVEKGKSKKLKSVKELLGITIMERSSFEKNPIDFLEAKGYKEVKKDLIIKLPKYSLFELENGRKRMLASAGELQKGNELALPSKYVNFLYLASHYEKLKGSPEDNEQKQLFVEQHKHYLDEIIEQISEFSKRVILADANLDKVLSAYNKHRDKPIREQAENIIHLFTLTNLGAPAAFKYFDTTIDRKRYTSTKEVLDATLIHQSITGLYETRIDLSQLGGDGGGGGEAAAKPAPGGVPWLTQQPLQLTILVPLQEYQEKILSKTALPEDQKQQLKTLFVKYDNLWQHWENQVGHRKIRPHNIATGDYPPRPQKQYPINPKAKPSIQIVIDDLLKQGVLTPQNSTMNTPVYPVPKPDGRWRMVLDYREVNKTIPLTAAQNQHSAGILATIVRQKYKTTLDLANGFWAHPITPESYWLTAFTWQGKQYCWTRLPQGFLNSPALFNADVVDLLKEIPNVQVYVDDIYLSHDDPKEHVQQLEKVFQILLQAGYVVSLKKSEIGQKTVEFLGFNITKEGRGLTDTFKTKLLNITPPKDLKQLQSILGLLNFARNFIPNFAELVQPLYNLIAPAKGKYIEWSEENTKQLNMVIEALNTASNLEERLPEQRLVIKVNTSPSAGYVRYYNETGKKPIMYLNYVFSKAELKFSMLEKLLTTMHKALIKAMDLAMGQEILVYSPIVSMTKIQKTPLPERKALPIRWITWMTYLEDPRIQFHYDKTLPELKHIPDVYTSSQSPVKHPSQYEGVFYTDGSAIKSPDPTKSNNAGMGIVHATYKPEYQVLNQWSIPLGNHTAQMAEIAAVEFACKKALKIPGPVLVITDSFYVAESANKELPYWKSNGFVNNKKKPLKHISKWKSIAECLSMKPDITIQHEKGISLQIPVFILKGNALADKLATQGSYVVNAGKRTADGSEFEKRTADGSEFESPKKKAKVE

SEQ ID NO: 1310 - protein, 2085 aa, synthetic construct
MPAAKRVKLDGGDKKYSIGLDIGTNSVGWAVITDEYKVPSKKFKVLGNTDRHSIKKNLIGALLFDSGETAEATRLKRTARRRYTRRKNRICYLQEIFSNEMAKVDDSFFHRLEESFLVEEDKKHERHPIFGNIVDEVAYHEKYPTIYHLRKKLVDSTDKADLRLIYLALAHMIKFRGHFLIEGDLNPDNSDVDKLFIQLVQTYNQLFEENPINASGVDAKAILSARLSKSRRLENLIAQLPGEKKNGLFGNLIALSLGLTPNFKSNFDLAEDAKLQLSKDTYDDDLDNLLAQIGDQYADLFLAAKNLSDAILLSDILRVNTEITKAPLSASMIKRYDEHHQDLTLLKALVRQQLPEKYKEIFFDQSKNGYAGYIDGGASQEEFYKFIKPILEKMDGTEELLVKLNREDLLRKQRTFDNGSIPHQIHLGELHAILRRQEDFYPFLKDNREKIEKILTFRIPYYVGPLARGNSRFAWMTRKSEETITPWNFEEVVDKGASAQSFIERMTNFDKNLPNEKVLPKHSLLYEYFTVYNELTKVKYVTEGMRKPAFLSGEQKKAIVDLLFKTNRKVTVKQLKEDYFKKIECFDSVEISGVEDRFNASLGTYHDLLKIIKDKDFLDNEENEDILEDIVLTLTLFEDREMIEERLKTYAHLFDDKVMKQLKRRRYTGWGRLSRKLINGIRDKQSGKTILDFLKSDGFANRNFMQLIHDDSLTFKEDIQKAQVSGQGDSLHEHIANLAGSPAIKKGILQTVKVVDELVKVMGRHKPENIVIEMARENQTTQKGQKNSRERMKRIEEGIKELGSQILKEHPVENTQLQNEKLYLYYLQNGRDMYVDQELDINRLSDYDVDHIVPQSFLKDDSIDNKVLTRSDKARGKSDNVPSEEVVKKMKNYWRQLLNAKLITQRKFDNLTKAERGGLSELDKAGFIKRQLVETRQITKHVAQILDSRMNTKYDENDKLIREVKVITLKSKLVSDFRKDFQFYKVREINNYHHAHDAYLNAVVGTALIKKYPKLESEFVYGDYKVYDVRKMIAKSEQEIGKATAKYFFYSNIMNFFKTEITLANGEIRKRPLIETNGETGEIVWDKGRDFATVRKVLSMPQVNIVKKTEVQTGGFSKESILPKRNSDKLIARKKDWDPKKYGGFDSPTVAYSVLVVAKVEKGKSKKLKSVKELLGITIMERSSFEKNPIDFLEAKGYKEVKKDLIIKLPKYSLFELENGRKRMLASAGELQKGNELALPSKYVNFLYLASHYEKLKGSPEDNEQKQLFVEQHKHYLDEIIEQISEFSKRVILADANLDKVLSAYNKHRDKPIREQAENIIHLFTLTNLGAPAAFKYFDTTIDRKRYTSTKEVLDATLIHQSITGLYETRIDLSQLGGDGGGGSGGGPAPGGVPWLTQQPLQLTILVPLQEYQEKILSKTALPEDQKQQLKTLFVKYDNLWQHWENQVGHRKIRPHNIATGDYPPRPQKQYPINPKAKPSIQIVIDDLLKQGVLTPQNSTMNTPVYPVPKPDGRWRMVLDYREVNKTIPLTAAQNQHSAGILATIVRQKYKTTLDLANGFWAHPITPESYWLTAFTWQGKQYCWTRLPQGFLNSPALFNADVVDLLKEIPNVQVYVDDIYLSHDDPKEHVQQLEKVFQILLQAGYVVSLKKSEIGQKTVEFLGFNITKEGRGLTDTFKTKLLNITPPKDLKQLQSILGLLNFARNFIPNFAELVQPLYNLIAPAKGKYIEWSEENTKQLNMVIEALNTASNLEERLPEQRLVIKVNTSPSAGYVRYYNETGKKPIMYLNYVFSKAELKFSMLEKLLTTMHKALIKAMDLAMGQEILVYSPIVSMTKIQKTPLPERKALPIRWITWMTYLEDPRIQFHYDKTLPELKHIPDVYTSSQSPVKHPSQYEGVFYTDGSAIKSPDPTKSNNAGMGIVHATYKPEYQVLNQWSIPLGNHTAQMAEIAAVEFACKKALKIPGPVLVITDSFYVAESANKELPYWKSNGFVNNKKKPLKHISKWKSIAECLSMKPDITIQHEKGISLQIPVFILKGNALADKLATQGSYVVNAGKRTADGSEFEKRTADGSEFESPKKKAKVE

SEQ ID NO: 1311 - protein, 2122 aa, synthetic construct
MPAAKRVKLDGGDKKYSIGLDIGTNSVGWAVITDEYKVPSKKFKVLGNTDRHSIKKNLIGALLFDSGETAEATRLKRTARRRYTRRKNRICYLQEIFSNEMAKVDDSFFHRLEESFLVEEDKKHERHPIFGNIVDEVAYHEKYPTIYHLRKKLVDSTDKADLRLIYLALAHMIKFRGHFLIEGDLNPDNSDVDKLFIQLVQTYNQLFEENPINASGVDAKAILSARLSKSRRLENLIAQLPGEKKNGLFGNLIALSLGLTPNFKSNFDLAEDAKLQLSKDTYDDDLDNLLAQIGDQYADLFLAAKNLSDAILLSDILRVNTEITKAPLSASMIKRYDEHHQDLTLLKALVRQQLPEKYKEIFFDQSKNGYAGYIDGGASQEEFYKFIKPILEKMDGTEELLVKLNREDLLRKQRTFDNGSIPHQIHLGELHAILRRQEDFYPFLKDNREKIEKILTFRIPYYVGPLARGNSRFAWMTRKSEETITPWNFEEVVDKGASAQSFIERMTNFDKNLPNEKVLPKHSLLYEYFTVYNELTKVKYVTEGMRKPAFLSGEQKKAIVDLLFKTNRKVTVKQLKEDYFKKIECFDSVEISGVEDRFNASLGTYHDLLKIIKDKDFLDNEENEDILEDIVLTLTLFEDREMIEERLKTYAHLFDDKVMKQLKRRRYTGWGRLSRKLINGIRDKQSGKTILDFLKSDGFANRNFMQLIHDDSLTFKEDIQKAQVSGQGDSLHEHIANLAGSPAIKKGILQTVKVVDELVKVMGRHKPENIVIEMARENQTTQKGQKNSRERMKRIEEGIKELGSQILKEHPVENTQLQNEKLYLYYLQNGRDMYVDQELDINRLSDYDVDHIVPQSFLKDDSIDNKVLTRSDKARGKSDNVPSEEVVKKMKNYWRQLLNAKLITQRKFDNLTKAERGGLSELDKAGFIKRQLVETRQITKHVAQILDSRMNTKYDENDKLIREVKVITLKSKLVSDFRKDFQFYKVREINNYHHAHDAYLNAVVGTALIKKYPKLESEFVYGDYKVYDVRKMIAKSEQEIGKATAKYFFYSNIMNFFKTEITLANGEIRKRPLIETNGETGEIVWDKGRDFATVRKVLSMPQVNIVKKTEVQTGGFSKESILPKRNSDKLIARKKDWDPKKYGGFDSPTVAYSVLVVAKVEKGKSKKLKSVKELLGITIMERSSFEKNPIDFLEAKGYKEVKKDLIIKLPKYSLFELENGRKRMLASAGELQKGNELALPSKYVNFLYLASHYEKLKGSPEDNEQKQLFVEQHKHYLDEIIEQISEFSKRVILADANLDKVLSAYNKHRDKPIREQAENIIHLFTLTNLGAPAAFKYFDTTIDRKRYTSTKEVLDATLIHQSITGLYETRIDLSQLGGDGGAEAAAKEAAAKEAAAKEAAAKALEAEAAAKEAAAKEAAAKEAAAKAGGVPWLTQQPLQLTILVPLQEYQEKILSKTALPEDQKQQLKTLFVKYDNLWQHWENQVGHRKIRPHNIATGDYPPRPQKQYPINPKAKPSIQIVIDDLLKQGVLTPQNSTMNTPVYPVPKPDGRWRMVLDYREVNKTIPLTAAQNQHSAGILATIVRQKYKTTLDLANGFWAHPITPESYWLTAFTWQGKQYCWTRLPQGFLNSPALFNADVVDLLKEIPNVQVYVDDIYLSHDDPKEHVQQLEKVFQILLQAGYVVSLKKSEIGQKTVEFLGFNITKEGRGLTDTFKTKLLNITPPKDLKQLQSILGKLNFARNFIPNFAELVQPLYNLIAPAKGKYIEWSEENTKQLNMVIEALNTASNLEERLPEQRLVIKVNTSPSAGYVRYYNETGKKPIMYLNYVFSKAELKFSMLEKLLTTMHKALIKAMDLAMGQEILVYSPIVSMTKIQKTPLPERKALPIRWITWMTYLEDPRIQFHYDKTLPELKHIPDVYTSSQSPVKHPSQYEGVFYTDGSAIKSPDPTKSNNAGMGIVHATYKPEYQVLNQWSIPLGNHTAQMAEIAAVEFACKKALKIPGPVLVITDSFYVAESANKELPYWKSNGFVNNKKKPLKHISKWKSIAECLSMKPDITIQHEKGISLQIPVFILKGNALADKLATQGSYVVNAGKRTADGSEFEKRTADGSEFESPKKKAKVE

SEQ ID NO: 1312 - protein, 2092 aa, synthetic construct
MPAAKRVKLDGGDKKYSIGLDIGTNSVGWAVITDEYKVPSKKFKVLGNTDRHSIKKNLIGALLFDSGETAEATRLKRTARRRYTRRKNRICYLQEIFSNEMAKVDDSFFHRLEESFLVEEDKKHERHPIFGNIVDEVAYHEKYPTIYHLRKKLVDSTDKADLRLIYLALAHMIKFRGHFLIEGDLNPDNSDVDKLFIQLVQTYNQLFEENPINASGVDAKAILSARLSKSRRLENLIAQLPGEKKNGLFGNLIALSLGLTPNFKSNFDLAEDAKLQLSKDTYDDDLDNLLAQIGDQYADLFLAAKNLSDAILLSDILRVNTEITKAPLSASMIKRYDEHHQDLTLLKALVRQQLPEKYKEIFFDQSKNGYAGYIDGGASQEEFYKFIKPILEKMDGTEELLVKLNREDLLRKQRTFDNGSIPHQIHLGELHAILRRQEDFYPFLKDNREKIEKILTFRIPYYVGPLARGNSRFAWMTRKSEETITPWNFEEVVDKGASAQSFIERMTNFDKNLPNEKVLPKHSLLYEYFTVYNELTKVKYVTEGMRKPAFLSGEQKKAIVDLLFKTNRKVTVKQLKEDYFKKIECFDSVEISGVEDRFNASLGTYHDLLKIIKDKDFLDNEENEDILEDIVLTLTLFEDREMIEERLKTYAHLFDDKVMKQLKRRRYTGWGRLSRKLINGIRDKQSGKTILDFLKSDGFANRNFMQLIHDDSLTFKEDIQKAQVSGQGDSLHEHIANLAGSPAIKKGILQTVKVVDELVKVMGRHKPENIVIEMARENQTTQKGQKNSRERMKRIEEGIKELGSQILKEHPVENTQLQNEKLYLYYLQNGRDMYVDQELDINRLSDYDVDHIVPQSFLKDDSIDNKVLTRSDKARGKSDNVPSEEVVKKMKNYWRQLLNAKLITQRKFDNLTKAERGGLSELDKAGFIKRQLVETRQITKHVAQILDSRMNTKYDENDKLIREVKVITLKSKLVSDFRKDFQFYKVREINNYHHAHDAYLNAVVGTALIKKYPKLESEFVYGDYKVYDVRKMIAKSEQEIGKATAKYFFYSNIMNFFKTEITLANGEIRKRPLIETNGETGEIVWDKGRDFATVRKVLSMPQVNIVKKTEVQTGGFSKESILPKRNSDKLIARKKDWDPKKYGGFDSPTVAYSVLVVAKVEKGKSKKLKSVKELLGITIMERSSFEKNPIDFLEAKGYKEVKKDLIIKLPKYSLFELENGRKRMLASAGELQKGNELALPSKYVNFLYLASHYEKLKGSPEDNEQKQLFVEQHKHYLDEIIEQISEFSKRVILADANLDKVLSAYNKHRDKPIREQAENIIHLFTLTNLGAPAAFKYFDTTIDRKRYTSTKEVLDATLIHQSITGLYETRIDLSQLGGDGGSGSETPGTSESATPESGGVPWLTQQPLQLTILVPLQEYQEKILSKTALPEDQKQQLKTLFVKYDNLWQHWENQVGHRKIRPHNIATGDYPPRPQKQYPINPKAKPSIQIVIDDLLKQGVLTPQNSTMNTPVYPVPKPDGRWRMVLDYREVNKTIPLTAAQNQHSAGILATIVRQKYKTTLDLANGFWAHPITPESYWLTAFTWQGKQYCWTRLPQGFLNSPALFNADVVDLLKEIPNVQVYVDDIYLSHDDPKEHVQQLEKVFQILLQAGYVVSLKKSEIGQKTVEFLGFNITKEGRGLTDTFKTKLLNITPPKDLKQLQSILGKLNFARNFIPNFAELVQPLYNLIAPAKGKYIEWSEENTKQLNMVIEALNTASNLEERLPEQRLVIKVNTSPSAGYVRYYNETGKKPIMYLNYVFSKAELKFSMLEKLLTTMHKALIKAMDLAMGQEILVYSPIVSMTKIQKTPLPERKALPIRWITWMTYLEDPRIQFHYDKTLPELKHIPDVYTSSQSPVKHPSQYEGVFYTDGSAIKSPDPTKSNNAGMGIVHATYKPEYQVLNQWSIPLGNHTAQMAEIAAVEFACKKALKIPGPVLVITDSFYVAESANKELPYWKSNGFVNNKKKPLKHISKWKSIAECLSMKPDITIQHEKGISLQIPVFILKGNALADKLATQGSYVVNAGKRTADGSEFEKRTADGSEFESPKKKAKVE

SEQ ID NO: 1313 - protein, 2096 aa, synthetic construct
MPAAKRVKLDGGDKKYSIGLDIGTNSVGWAVITDEYKVPSKKFKVLGNTDRHSIKKNLIGALLFDSGETAEATRLKRTARRRYTRRKNRICYLQEIFSNEMAKVDDSFFHRLEESFLVEEDKKHERHPIFGNIVDEVAYHEKYPTIYHLRKKLVDSTDKADLRLIYLALAHMIKFRGHFLIEGDLNPDNSDVDKLFIQLVQTYNQLFEENPINASGVDAKAILSARLSKSRRLENLIAQLPGEKKNGLFGNLIALSLGLTPNFKSNFDLAEDAKLQLSKDTYDDDLDNLLAQIGDQYADLFLAAKNLSDAILLSDILRVNTEITKAPLSASMIKRYDEHHQDLTLLKALVRQQLPEKYKEIFFDQSKNGYAGYIDGGASQEEFYKFIKPILEKMDGTEELLVKLNREDLLRKQRTFDNGSIPHQIHLGELHAILRRQEDFYPFLKDNREKIEKILTFRIPYYVGPLARGNSRFAWMTRKSEETITPWNFEEVVDKGASAQSFIERMTNFDKNLPNEKVLPKHSLLYEYFTVYNELTKVKYVTEGMRKPAFLSGEQKKAIVDLLFKTNRKVTVKQLKEDYFKKIECFDSVEISGVEDRFNASLGTYHDLLKIIKDKDFLDNEENEDILEDIVLTLTLFEDREMIEERLKTYAHLFDDKVMKQLKRRRYTGWGRLSRKLINGIRDKQSGKTILDFLKSDGFANRNFMQLIHDDSLTFKEDIQKAQVSGQGDSLHEHIANLAGSPAIKKGILQTVKVVDELVKVMGRHKPENIVIEMARENQTTQKGQKNSRERMKRIEEGIKELGSQILKEHPVENTQLQNEKLYLYYLQNGRDMYVDQELDINRLSDYDVDHIVPQSFLKDDSIDNKVLTRSDKARGKSDNVPSEEVVKKMKNYWRQLLNAKLITQRKFDNLTKAERGGLSELDKAGFIKRQLVETRQITKHVAQILDSRMNTKYDENDKLIREVKVITLKSKLVSDFRKDFQFYKVREINNYHHAHDAYLNAVVGTALIKKYPKLESEFVYGDYKVYDVRKMIAKSEQEIGKATAKYFFYSNIMNFFKTEITLANGEIRKRPLIETNGETGEIVWDKGRDFATVRKVLSMPQVNIVKKTEVQTGGFSKESILPKRNSDKLIARKKDWDPKKYGGFDSPTVAYSVLVVAKVEKGKSKKLKSVKELLGITIMERSSFEKNPIDFLEAKGYKEVKKDLIIKLPKYSLFELENGRKRMLASAGELQKGNELALPSKYVNFLYLASHYEKLKGSPEDNEQKQLFVEQHKHYLDEIIEQISEFSKRVILADANLDKVLSAYNKHRDKPIREQAENIIHLFTLTNLGAPAAFKYFDTTIDRKRYTSTKEVLDATLIHQSITGLYETRIDLSQLGGDGGEAAAKEAAAKEAAAKEAAAKGGVPWLTQQPLQLTILVPLQEYQEKILSKTALPEDQKQQLKTLFVKYDNLWQHWENQVGHRKIRPHNIATGDYPPRPQKQYPINPKAKPSIQIVIDDLLKQGVLTPQNSTMNTPVYPVPKPDGRWRMVLDYREVNKTIPLTAAQNQHSAGILATIVRQKYKTTLDLANGFWAHPITPESYWLTAFTWQGKQYCWTRLPQGFLNSPALFNADVVDLLKEIPNVQVYVDDIYLSHDDPKEHVQQLEKVFQILLQAGYVVSLKKSEIGQKTVEFLGFNITKEGRGLTDTFKTKLLNITPPKDLKQLQSILGKLNFARNFIPNFAELVQPLYNLIAPAKGKYIEWSEENTKQLNMVIEALNTASNLEERLPEQRLVIKVNTSPSAGYVRYYNETGKKPIMYLNYVFSKAELKFSMLEKLLTTMHKALIKAMDLAMGQEILVYSPIVSMTKIQKTPLPERKALPIRWITWMTYLEDPRIQFHYDKTLPELKHIPDVYTSSQSPVKHPSQYEGVFYTDGSAIKSPDPTKSNNAGMGIVHATYKPEYQVLNQWSIPLGNHTAQMAEIAAVEFACKKALKIPGPVLVITDSFYVAESANKELPYWKSNGFVNNKKKPLKHISKWKSIAECLSMKPDITIQHEKGISLQIPVFILKGNALADKLATQGSYVVNAGKRTADGSEFEKRTADGSEFESPKKKAKVE

SEQ ID NO: 1314 - protein, 2096 aa, synthetic construct
MPAAKRVKLDGGDKKYSIGLDIGTNSVGWAVITDEYKVPSKKFKVLGNTDRHSIKKNLIGALLFDSGETAEATRLKRTARRRYTRRKNRICYLQEIFSNEMAKVDDSFFHRLEESFLVEEDKKHERHPIFGNIVDEVAYHEKYPTIYHLRKKLVDSTDKADLRLIYLALAHMIKFRGHFLIEGDLNPDNSDVDKLFIQLVQTYNQLFEENPINASGVDAKAILSARLSKSRRLENLIAQLPGEKKNGLFGNLIALSLGLTPNFKSNFDLAEDAKLQLSKDTYDDDLDNLLAQIGDQYADLFLAAKNLSDAILLSDILRVNTEITKAPLSASMIKRYDEHHQDLTLLKALVRQQLPEKYKEIFFDQSKNGYAGYIDGGASQEEFYKFIKPILEKMDGTEELLVKLNREDLLRKQRTFDNGSIPHQIHLGELHAILRRQEDFYPFLKDNREKIEKILTFRIPYYVGPLARGNSRFAWMTRKSEETITPWNFEEVVDKGASAQSFIERMTNFDKNLPNEKVLPKHSLLYEYFTVYNELTKVKYVTEGMRKPAFLSGEQKKAIVDLLFKTNRKVTVKQLKEDYFKKIECFDSVEISGVEDRFNASLGTYHDLLKIIKDKDFLDNEENEDILEDIVLTLTLFEDREMIEERLKTYAHLFDDKVMKQLKRRRYTGWGRLSRKLINGIRDKQSGKTILDFLKSDGFANRNFMQLIHDDSLTFKEDIQKAQVSGQGDSLHEHIANLAGSPAIKKGILQTVKVVDELVKVMGRHKPENIVIEMARENQTTQKGQKNSRERMKRIEEGIKELGSQILKEHPVENTQLQNEKLYLYYLQNGRDMYVDQELDINRLSDYDVDHIVPQSFLKDDSIDNKVLTRSDKARGKSDNVPSEEVVKKMKNYWRQLLNAKLITQRKFDNLTKAERGGLSELDKAGFIKRQLVETRQITKHVAQILDSRMNTKYDENDKLIREVKVITLKSKLVSDFRKDFQFYKVREINNYHHAHDAYLNAVVGTALIKKYPKLESEFVYGDYKVYDVRKMIAKSEQEIGKATAKYFFYSNIMNFFKTEITLANGEIRKRPLIETNGETGEIVWDKGRDFATVRKVLSMPQVNIVKKTEVQTGGFSKESILPKRNSDKLIARKKDWDPKKYGGFDSPTVAYSVLVVAKVEKGKSKKLKSVKELLGITIMERSSFEKNPIDFLEAKGYKEVKKDLIIKLPKYSLFELENGRKRMLASAGELQKGNELALPSKYVNFLYLASHYEKLKGSPEDNEQKQLFVEQHKHYLDEIIEQISEFSKRVILADANLDKVLSAYNKHRDKPIREQAENIIHLFTLTNLGAPAAFKYFDTTIDRKRYTSTKEVLDATLIHQSITGLYETRIDLSQLGGDGGGGGGSGGGGSGGGGSGGGGSGGVPWLTQQPLQLTILVPLQEYQEKILSKTALPEDQKQQLKTLFVKYDNLWQHWENQVGHRKIRPHNIATGDYPPRPQKQYPINPKAKPSIQIVIDDLLKQGVLTPQNSTMNTPVYPVPKPDGRWRMVLDYREVNKTIPLTAAQNQHSAGILATIVRQKYKTTLDLANGFWAHPITPESYWLTAFTWQGKQYCWTRLPQGFLNSPALFNADVVDLLKEIPNVQVYVDDIYLSHDDPKEHVQQLEKVFQILLQAGYVVSLKKSEIGQKTVEFLGFNITKEGRGLTDTFKTKLLNITPPKDLKQLQSILGKLNFARNFIPNFAELVQPLYNLIAPAKGKYIEWSEENTKQLNMVIEALNTASNLEERLPEQRLVIKVNTSPSAGYVRYYNETGKKPIMYLNYVFSKAELKFSMLEKLLTTMHKALIKAMDLAMGQEILVYSPIVSMTKIQKTPLPERKALPIRWITWMTYLEDPRIQFHYDKTLPELKHIPDVYTSSQSPVKHPSQYEGVFYTDGSAIKSPDPTKSNNAGMGIVHATYKPEYQVLNQWSIPLGNHTAQMAEIAAVEFACKKALKIPGPVLVITDSFYVAESANKELPYWKSNGFVNNKKKPLKHISKWKSIAECLSMKPDITIQHEKGISLQIPVFILKGNALADKLATQGSYVVNAGKRTADGSEFEKRTADGSEFESPKKKAKVE

SEQ ID NO: 1315 - protein, 2087 aa, synthetic construct
MPAAKRVKLDGGDKKYSIGLDIGTNSVGWAVITDEYKVPSKKFKVLGNTDRHSIKKNLIGALLFDSGETAEATRLKRTARRRYTRRKNRICYLQEIFSNEMAKVDDSFFHRLEESFLVEEDKKHERHPIFGNIVDEVAYHEKYPTIYHLRKKLVDSTDKADLRLIYLALAHMIKFRGHFLIEGDLNPDNSDVDKLFIQLVQTYNQLFEENPINASGVDAKAILSARLSKSRRLENLIAQLPGEKKNGLFGNLIALSLGLTPNFKSNFDLAEDAKLQLSKDTYDDDLDNLLAQIGDQYADLFLAAKNLSDAILLSDILRVNTEITKAPLSASMIKRYDEHHQDLTLLKALVRQQLPEKYKEIFFDQSKNGYAGYIDGGASQEEFYKFIKPILEKMDGTEELLVKLNREDLLRKQRTFDNGSIPHQIHLGELHAILRRQEDFYPFLKDNREKIEKILTFRIPYYVGPLARGNSRFAWMTRKSEETITPWNFEEVVDKGASAQSFIERMTNFDKNLPNEKVLPKHSLLYEYFTVYNELTKVKYVTEGMRKPAFLSGEQKKAIVDLLFKTNRKVTVKQLKEDYFKKIECFDSVEISGVEDRFNASLGTYHDLLKIIKDKDFLDNEENEDILEDIVLTLTLFEDREMIEERLKTYAHLFDDKVMKQLKRRRYTGWGRLSRKLINGIRDKQSGKTILDFLKSDGFANRNFMQLIHDDSLTFKEDIQKAQVSGQGDSLHEHIANLAGSPAIKKGILQTVKVVDELVKVMGRHKPENIVIEMARENQTTQKGQKNSRERMKRIEEGIKELGSQILKEHPVENTQLQNEKLYLYYLQNGRDMYVDQELDINRLSDYDVDHIVPQSFLKDDSIDNKVLTRSDKARGKSDNVPSEEVVKKMKNYWRQLLNAKLITQRKFDNLTKAERGGLSELDKAGFIKRQLVETRQITKHVAQILDSRMNTKYDENDKLIREVKVITLKSKLVSDFRKDFQFYKVREINNYHHAHDAYLNAVVGTALIKKYPKLESEFVYGDYKVYDVRKMIAKSEQEIGKATAKYFFYSNIMNFFKTEITLANGEIRKRPLIETNGETGEIVWDKGRDFATVRKVLSMPQVNIVKKTEVQTGGFSKESILPKRNSDKLIARKKDWDPKKYGGFDSPTVAYSVLVVAKVEKGKSKKLKSVKELLGITIMERSSFEKNPIDFLEAKGYKEVKKDLIIKLPKYSLFELENGRKRMLASAGELQKGNELALPSKYVNFLYLASHYEKLKGSPEDNEQKQLFVEQHKHYLDEIIEQISEFSKRVILADANLDKVLSAYNKHRDKPIREQAENIIHLFTLTNLGAPAAFKYFDTTIDRKRYTSTKEVLDATLIHQSITGLYETRIDLSQLGGDGGGSSPAPEAAAKGGVPWLTQQPLQLTILVPLQEYQEKILSKTALPEDQKQQLKTLFVKYDNLWQHWENQVGHRKIRPHNIATGDYPPRPQKQYPINPKAKPSIQIVIDDLLKQGVLTPQNSTMNTPVYPVPKPDGRWRMVLDYREVNKTIPLTAAQNQHSAGILATIVRQKYKTTLDLANGFWAHPITPESYWLTAFTWQGKQYCWTRLPQGFLNSPALFNADVVDLLKEIPNVQVYVDDIYLSHDDPKEHVQQLEKVFQILLQAGYVVSLKKSEIGQKTVEFLGFNITKEGRGLTDTFKTKLLNITPPKDLKQLQSILGKLNFARNFIPNFAELVQPLYNLIAPAKGKYIEWSEENTKQLNMVIEALNTASNLEERLPEQRLVIKVNTSPSAGYVRYYNETGKKPIMYLNYVFSKAELKFSMLEKLLTTMHKALIKAMDLAMGQEILVYSPIVSMTKIQKTPLPERKALPIRWITWMTYLEDPRIQFHYDKTLPELKHIPDVYTSSQSPVKHPSQYEGVFYTDGSAIKSPDPTKSNNAGMGIVHATYKPEYQVLNQWSIPLGNHTAQMAEIAAVEFACKKALKIPGPVLVITDSFYVAESANKELPYWKSNGFVNNKKKPLKHISKWKSIAECLSMKPDITIQHEKGISLQIPVFILKGNALADKLATQGSYVVNAGKRTADGSEFEKRTADGSEFESPKKKAKVE

SEQ ID NO: 1316 - protein, 2086 aa, synthetic construct
MPAAKRVKLDGGDKKYSIGLDIGTNSVGWAVITDEYKVPSKKFKVLGNTDRHSIKKNLIGALLFDSGETAEATRLKRTARRRYTRRKNRICYLQEIFSNEMAKVDDSFFHRLEESFLVEEDKKHERHPIFGNIVDEVAYHEKYPTIYHLRKKLVDSTDKADLRLIYLALAHMIKFRGHFLIEGDLNPDNSDVDKLFIQLVQTYNQLFEENPINASGVDAKAILSARLSKSRRLENLIAQLPGEKKNGLFGNLIALSLGLTPNFKSNFDLAEDAKLQLSKDTYDDDLDNLLAQIGDQYADLFLAAKNLSDAILLSDILRVNTEITKAPLSASMIKRYDEHHQDLTLLKALVRQQLPEKYKEIFFDQSKNGYAGYIDGGASQEEFYKFIKPILEKMDGTEELLVKLNREDLLRKQRTFDNGSIPHQIHLGELHAILRRQEDFYPFLKDNREKIEKILTFRIPYYVGPLARGNSRFAWMTRKSEETITPWNFEEVVDKGASAQSFIERMTNFDKNLPNEKVLPKHSLLYEYFTVYNELTKVKYVTEGMRKPAFLSGEQKKAIVDLLFKTNRKVTVKQLKEDYFKKIECFDSVEISGVEDRFNASLGTYHDLLKIIKDKDFLDNEENEDILEDIVLTLTLFEDREMIEERLKTYAHLFDDKVMKQLKRRRYTGWGRLSRKLINGIRDKQSGKTILDFLKSDGFANRNFMQLIHDDSLTFKEDIQKAQVSGQGDSLHEHIANLAGSPAIKKGILQTVKVVDELVKVMGRHKPENIVIEMARENQTTQKGQKNSRERMKRIEEGIKELGSQILKEHPVENTQLQNEKLYLYYLQNGRDMYVDQELDINRLSDYDVDHIVPQSFLKDDSIDNKVLTRSDKARGKSDNVPSEEVVKKMKNYWRQLLNAKLITQRKFDNLTKAERGGLSELDKAGFIKRQLVETRQITKHVAQILDSRMNTKYDENDKLIREVKVITLKSKLVSDFRKDFQFYKVREINNYHHAHDAYLNAVVGTALIKKYPKLESEFVYGDYKVYDVRKMIAKSEQEIGKATAKYFFYSNIMNFFKTEITLANGEIRKRPLIETNGETGEIVWDKGRDFATVRKVLSMPQVNIVKKTEVQTGGFSKESILPKRNSDKLIARKKDWDPKKYGGFDSPTVAYSVLVVAKVEKGKSKKLKSVKELLGITIMERSSFEKNPIDFLEAKGYKEVKKDLIIKLPKYSLFELENGRKRMLASAGELQKGNELALPSKYVNFLYLASHYEKLKGSPEDNEQKQLFVEQHKHYLDEIIEQISEFSKRVILADANLDKVLSAYNKHRDKPIREQAENIIHLFTLTNLGAPAAFKYFDTTIDRKRYTSTKEVLDATLIHQSITGLYETRIDLSQLGGDGGGGGGSGGGGSGGVPWLTQQPLQLTILVPLQEYQEKILSKTALPEDQKQQLKTLFVKYDNLWQHWENQVGHRKIRPHNIATGDYPPRPQKQYPINPKAKPSIQIVIDDLLKQGVLTPQNSTMNTPVYPVPKPDGRWRMVLDYREVNKTIPLTAAQNQHSAGILATIVRQKYKTTLDLANGFWAHPITPESYWLTAFTWQGKQYCWTRLPQGFLNSPALFNADVVDLLKEIPNVQVYVDDIYLSHDDPKEHVQQLEKVFQILLQAGYVVSLKKSEIGQKTVEFLGFNITKEGRGLTDTFKTKLLNITPPKDLKQLQSILGKLNFARNFIPNFAELVQPLYNLIAPAKGKYIEWSEENTKQLNMVIEALNTASNLEERLPEQRLVIKVNTSPSAGYVRYYNETGKKPIMYLNYVFSKAELKFSMLEKLLTTMHKALIKAMDLAMGQEILVYSPIVSMTKIQKTPLPERKALPIRWITWMTYLEDPRIQFHYDKTLPELKHIPDVYTSSQSPVKHPSQYEGVFYTDGSAIKSPDPTKSNNAGMGIVHATYKPEYQVLNQWSIPLGNHTAQMAEIAAVEFACKKALKIPGPVLVITDSFYVAESANKELPYWKSNGFVNNKKKPLKHISKWKSIAECLSMKPDITIQHEKGISLQIPVFILKGNALADKLATQGSYVVNAGKRTADGSEFEKRTADGSEFESPKKKAKVE

SEQ ID NO: 1317 - protein, 2087 aa, synthetic construct
MPAAKRVKLDGGDKKYSIGLDIGTNSVGWAVITDEYKVPSKKFKVLGNTDRHSIKKNLIGALLFDSGETAEATRLKRTARRRYTRRKNRICYLQEIFSNEMAKVDDSFFHRLEESFLVEEDKKHERHPIFGNIVDEVAYHEKYPTIYHLRKKLVDSTDKADLRLIYLALAHMIKFRGHFLIEGDLNPDNSDVDKLFIQLVQTYNQLFEENPINASGVDAKAILSARLSKSRRLENLIAQLPGEKKNGLFGNLIALSLGLTPNFKSNFDLAEDAKLQLSKDTYDDDLDNLLAQIGDQYADLFLAAKNLSDAILLSDILRVNTEITKAPLSASMIKRYDEHHQDLTLLKALVRQQLPEKYKEIFFDQSKNGYAGYIDGGASQEEFYKFIKPILEKMDGTEELLVKLNREDLLRKQRTFDNGSIPHQIHLGELHAILRRQEDFYPFLKDNREKIEKILTFRIPYYVGPLARGNSRFAWMTRKSEETITPWNFEEVVDKGASAQSFIERMTNFDKNLPNEKVLPKHSLLYEYFTVYNELTKVKYVTEGMRKPAFLSGEQKKAIVDLLFKTNRKVTVKQLKEDYFKKIECFDSVEISGVEDRFNASLGTYHDLLKIIKDKDFLDNEENEDILEDIVLTLTLFEDREMIEERLKTYAHLFDDKVMKQLKRRRYTGWGRLSRKLINGIRDKQSGKTILDFLKSDGFANRNFMQLIHDDSLTFKEDIQKAQVSGQGDSLHEHIANLAGSPAIKKGILQTVKVVDELVKVMGRHKPENIVIEMARENQTTQKGQKNSRERMKRIEEGIKELGSQILKEHPVENTQLQNEKLYLYYLQNGRDMYVDQELDINRLSDYDVDHIVPQSFLKDDSIDNKVLTRSDKARGKSDNVPSEEVVKKMKNYWRQLLNAKLITQRKFDNLTKAERGGLSELDKAGFIKRQLVETRQITKHVAQILDSRMNTKYDENDKLIREVKVITLKSKLVSDFRKDFQFYKVREINNYHHAHDAYLNAVVGTALIKKYPKLESEFVYGDYKVYDVRKMIAKSEQEIGKATAKYFFYSNIMNFFKTEITLANGEIRKRPLIETNGETGEIVWDKGRDFATVRKVLSMPQVNIVKKTEVQTGGFSKESILPKRNSDKLIARKKDWDPKKYGGFDSPTVAYSVLVVAKVEKGKSKKLKSVKELLGITIMERSSFEKNPIDFLEAKGYKEVKKDLIIKLPKYSLFELENGRKRMLASAGELQKGNELALPSKYVNFLYLASHYEKLKGSPEDNEQKQLFVEQHKHYLDEIIEQISEFSKRVILADANLDKVLSAYNKHRDKPIREQAENIIHLFTLTNLGAPAAFKYFDTTIDRKRYTSTKEVLDATLIHQSITGLYETRIDLSQLGGDGGPAPGSSEAAAKGGVPWLTQQPLQLTILVPLQEYQEKILSKTALPEDQKQQLKTLFVKYDNLWQHWENQVGHRKIRPHNIATGDYPPRPQKQYPINPKAKPSIQIVIDDLLKQGVLTPQNSTMNTPVYPVPKPDGRWRMVLDYREVNKTIPLTAAQNQHSAGILATIVRQKYKTTLDLANGFWAHPITPESYWLTAFTWQGKQYCWTRLPQGFLNSPALFNADVVDLLKEIPNVQVYVDDIYLSHDDPKEHVQQLEKVFQILLQAGYVVSLKKSEIGQKTVEFLGFNITKEGRGLTDTFKTKLLNITPPKDLKQLQSILGKLNFARNFIPNFAELVQPLYNLIAPAKGKYIEWSEENTKQLNMVIEALNTASNLEERLPEQRLVIKVNTSPSAGYVRYYNETGKKPIMYLNYVFSKAELKFSMLEKLLTTMHKALIKAMDLAMGQEILVYSPIVSMTKIQKTPLPERKALPIRWITWMTYLEDPRIQFHYDKTLPELKHIPDVYTSSQSPVKHPSQYEGVFYTDGSAIKSPDPTKSNNAGMGIVHATYKPEYQVLNQWSIPLGNHTAQMAEIAAVEFACKKALKIPGPVLVITDSFYVAESANKELPYWKSNGFVNNKKKPLKHISKWKSIAECLSMKPDITIQHEKGISLQIPVFILKGNALADKLATQGSYVVNAGKRTADGSEFEKRTADGSEFESPKKKAKVE

SEQ ID NO: 1318 - protein, 2087 aa, synthetic construct
MPAAKRVKLDGGDKKYSIGLDIGTNSVGWAVITDEYKVPSKKFKVLGNTDRHSIKKNLIGALLFDSGETAEATRLKRTARRRYTRRKNRICYLQEIFSNEMAKVDDSFFHRLEESFLVEEDKKHERHPIFGNIVDEVAYHEKYPTIYHLRKKLVDSTDKADLRLIYLALAHMIKFRGHFLIEGDLNPDNSDVDKLFIQLVQTYNQLFEENPINASGVDAKAILSARLSKSRRLENLIAQLPGEKKNGLFGNLIALSLGLTPNFKSNFDLAEDAKLQLSKDTYDDDLDNLLAQIGDQYADLFLAAKNLSDAILLSDILRVNTEITKAPLSASMIKRYDEHHQDLTLLKALVRQQLPEKYKEIFFDQSKNGYAGYIDGGASQEEFYKFIKPILEKMDGTEELLVKLNREDLLRKQRTFDNGSIPHQIHLGELHAILRRQEDFYPFLKDNREKIEKILTFRIPYYVGPLARGNSRFAWMTRKSEETITPWNFEEVVDKGASAQSFIERMTNFDKNLPNEKVLPKHSLLYEYFTVYNELTKVKYVTEGMRKPAFLSGEQKKAIVDLLFKTNRKVTVKQLKEDYFKKIECFDSVEISGVEDRFNASLGTYHDLLKIIKDKDFLDNEENEDILEDIVLTLTLFEDREMIEERLKTYAHLFDDKVMKQLKRRRYTGWGRLSRKLINGIRDKQSGKTILDFLKSDGFANRNFMQLIHDDSLTFKEDIQKAQVSGQGDSLHEHIANLAGSPAIKKGILQTVKVVDELVKVMGRHKPENIVIEMARENQTTQKGQKNSRERMKRIEEGIKELGSQILKEHPVENTQLQNEKLYLYYLQNGRDMYVDQELDINRLSDYDVDHIVPQSFLKDDSIDNKVLTRSDKARGKSDNVPSEEVVKKMKNYWRQLLNAKLITQRKFDNLTKAERGGLSELDKAGFIKRQLVETRQITKHVAQILDSRMNTKYDENDKLIREVKVITLKSKLVSDFRKDFQFYKVREINNYHHAHDAYLNAVVGTALIKKYPKLESEFVYGDYKVYDVRKMIAKSEQEIGKATAKYFFYSNIMNFFKTEITLANGEIRKRPLIETNGETGEIVWDKGRDFATVRKVLSMPQVNIVKKTEVQTGGFSKESILPKRNSDKLIARKKDWDPKKYGGFDSPTVAYSVLVVAKVEKGKSKKLKSVKELLGITIMERSSFEKNPIDFLEAKGYKEVKKDLIIKLPKYSLFELENGRKRMLASAGELQKGNELALPSKYVNFLYLASHYEKLKGSPEDNEQKQLFVEQHKHYLDEIIEQISEFSKRVILADANLDKVLSAYNKHRDKPIREQAENIIHLFTLTNLGAPAAFKYFDTTIDRKRYTSTKEVLDATLIHQSITGLYETRIDLSQLGGDGGPAPAPAPAPAPGGVPWLTQQPLQLTILVPLQEYQEKILSKTALPEDQKQQLKTLFVKYDNLWQHWENQVGHRKIRPHNIATGDYPPRPQKQYPINPKAKPSIQIVIDDLLKQGVLTPQNSTMNTPVYPVPKPDGRWRMVLDYREVNKTIPLTAAQNQHSAGILATIVRQKYKTTLDLANGFWAHPITPESYWLTAFTWQGKQYCWTRLPQGFLNSPALFNADVVDLLKEIPNVQVYVDDIYLSHDDPKEHVQQLEKVFQILLQAGYVVSLKKSEIGQKTVEFLGFNITKEGRGLTDTFKTKLLNITPPKDLKQLQSILGKLNFARNFIPNFAELVQPLYNLIAPAKGKYIEWSEENTKQLNMVIEALNTASNLEERLPEQRLVIKVNTSPSAGYVRYYNETGKKPIMYLNYVFSKAELKFSMLEKLLTTMHKALIKAMDLAMGQEILVYSPIVSMTKIQKTPLPERKALPIRWITWMTYLEDPRIQFHYDKTLPELKHIPDVYTSSQSPVKHPSQYEGVFYTDGSAIKSPDPTKSNNAGMGIVHATYKPEYQVLNQWSIPLGNHTAQMAEIAAVEFACKKALKIPGPVLVITDSFYVAESANKELPYWKSNGFVNNKKKPLKHISKWKSIAECLSMKPDITIQHEKGISLQIPVFILKGNALADKLATQGSYVVNAGKRTADGSEFEKRTADGSEFESPKKKAKVE

SEQ ID NO: 1319 - protein, 2085 aa, synthetic construct
MPAAKRVKLDGGDKKYSIGLDIGTNSVGWAVITDEYKVPSKKFKVLGNTDRHSIKKNLIGALLFDSGETAEATRLKRTARRRYTRRKNRICYLQEIFSNEMAKVDDSFFHRLEESFLVEEDKKHERHPIFGNIVDEVAYHEKYPTIYHLRKKLVDSTDKADLRLIYLALAHMIKFRGHFLIEGDLNPDNSDVDKLFIQLVQTYNQLFEENPINASGVDAKAILSARLSKSRRLENLIAQLPGEKKNGLFGNLIALSLGLTPNFKSNFDLAEDAKLQLSKDTYDDDLDNLLAQIGDQYADLFLAAKNLSDAILLSDILRVNTEITKAPLSASMIKRYDEHHQDLTLLKALVRQQLPEKYKEIFFDQSKNGYAGYIDGGASQEEFYKFIKPILEKMDGTEELLVKLNREDLLRKQRTFDNGSIPHQIHLGELHAILRRQEDFYPFLKDNREKIEKILTFRIPYYVGPLARGNSRFAWMTRKSEETITPWNFEEVVDKGASAQSFIERMTNFDKNLPNEKVLPKHSLLYEYFTVYNELTKVKYVTEGMRKPAFLSGEQKKAIVDLLFKTNRKVTVKQLKEDYFKKIECFDSVEISGVEDRFNASLGTYHDLLKIIKDKDFLDNEENEDILEDIVLTLTLFEDREMIEERLKTYAHLFDDKVMKQLKRRRYTGWGRLSRKLINGIRDKQSGKTILDFLKSDGFANRNFMQLIHDDSLTFKEDIQKAQVSGQGDSLHEHIANLAGSPAIKKGILQTVKVVDELVKVMGRHKPENIVIEMARENQTTQKGQKNSRERMKRIEEGIKELGSQILKEHPVENTQLQNEKLYLYYLQNGRDMYVDQELDINRLSDYDVDHIVPQSFLKDDSIDNKVLTRSDKARGKSDNVPSEEVVKKMKNYWRQLLNAKLITQRKFDNLTKAERGGLSELDKAGFIKRQLVETRQITKHVAQILDSRMNTKYDENDKLIREVKVITLKSKLVSDFRKDFQFYKVREINNYHHAHDAYLNAVVGTALIKKYPKLESEFVYGDYKVYDVRKMIAKSEQEIGKATAKYFFYSNIMNFFKTEITLANGEIRKRPLIETNGETGEIVWDKGRDFATVRKVLSMPQVNIVKKTEVQTGGFSKESILPKRNSDKLIARKKDWDPKKYGGFDSPTVAYSVLVVAKVEKGKSKKLKSVKELLGITIMERSSFEKNPIDFLEAKGYKEVKKDLIIKLPKYSLFELENGRKRMLASAGELQKGNELALPSKYVNFLYLASHYEKLKGSPEDNEQKQLFVEQHKHYLDEIIEQISEFSKRVILADANLDKVLSAYNKHRDKPIREQAENIIHLFTLTNLGAPAAFKYFDTTIDRKRYTSTKEVLDATLIHQSITGLYETRIDLSQLGGDGGPAPGSSGGGGGVPWLTQQPLQLTILVPLQEYQEKILSKTALPEDQKQQLKTLFVKYDNLWQHWENQVGHRKIRPHNIATGDYPPRPQKQYPINPKAKPSIQIVIDDLLKQGVLTPQNSTMNTPVYPVPKPDGRWRMVLDYREVNKTIPLTAAQNQHSAGILATIVRQKYKTTLDLANGFWAHPITPESYWLTAFTWQGKQYCWTRLPQGFLNSPALFNADVVDLLKEIPNVQVYVDDIYLSHDDPKEHVQQLEKVFQILLQAGYVVSLKKSEIGQKTVEFLGFNITKEGRGLTDTFKTKLLNITPPKDLKQLQSILGKLNFARNFIPNFAELVQPLYNLIAPAKGKYIEWSEENTKQLNMVIEALNTASNLEERLPEQRLVIKVNTSPSAGYVRYYNETGKKPIMYLNYVFSKAELKFSMLEKLLTTMHKALIKAMDLAMGQEILVYSPIVSMTKIQKTPLPERKALPIRWITWMTYLEDPRIQFHYDKTLPELKHIPDVYTSSQSPVKHPSQYEGVFYTDGSAIKSPDPTKSNNAGMGIVHATYKPEYQVLNQWSIPLGNHTAQMAEIAAVEFACKKALKIPGPVLVITDSFYVAESANKELPYWKSNGFVNNKKKPLKHISKWKSIAECLSMKPDITIQHEKGISLQIPVFILKGNALADKLATQGSYVVNAGKRTADGSEFEKRTADGSEFESPKKKAKVE

SEQ ID NO: 1320 - protein, 2176 aa, synthetic construct
MPAAKRVKLDGGDKKYSIGLDIGTNSVGWAVITDEYKVPSKKFKVLGNTDRHSIKKNLIGALLFDSGETAEATRLKRTARRRYTRRKNRICYLQEIFSNEMAKVDDSFFHRLEESFLVEEDKKHERHPIFGNIVDEVAYHEKYPTIYHLRKKLVDSTDKADLRLIYLALAHMIKFRGHFLIEGDLNPDNSDVDKLFIQLVQTYNQLFEENPINASGVDAKAILSARLSKSRRLENLIAQLPGEKKNGLFGNLIALSLGLTPNFKSNFDLAEDAKLQLSKDTYDDDLDNLLAQIGDQYADLFLAAKNLSDAILLSDILRVNTEITKAPLSASMIKRYDEHHQDLTLLKALVRQQLPEKYKEIFFDQSKNGYAGYIDGGASQEEFYKFIKPILEKMDGTEELLVKLNREDLLRKQRTFDNGSIPHQIHLGELHAILRRQEDFYPFLKDNREKIEKILTFRIPYYVGPLARGNSRFAWMTRKSEETITPWNFEEVVDKGASAQSFIERMTNFDKNLPNEKVLPKHSLLYEYFTVYNELTKVKYVTEGMRKPAFLSGEQKKAIVDLLFKTNRKVTVKQLKEDYFKKIECFDSVEISGVEDRFNASLGTYHDLLKIIKDKDFLDNEENEDILEDIVLTLTLFEDREMIEERLKTYAHLFDDKVMKQLKRRRYTGWGRLSRKLINGIRDKQSGKTILDFLKSDGFANRNFMQLIHDDSLTFKEDIQKAQVSGQGDSLHEHIANLAGSPAIKKGILQTVKVVDELVKVMGRHKPENIVIEMARENQTTQKGQKNSRERMKRIEEGIKELGSQILKEHPVENTQLQNEKLYLYYLQNGRDMYVDQELDINRLSDYDVDHIVPQSFLKDDSIDNKVLTRSDKARGKSDNVPSEEVVKKMKNYWRQLLNAKLITQRKFDNLTKAERGGLSELDKAGFIKRQLVETRQITKHVAQILDSRMNTKYDENDKLIREVKVITLKSKLVSDFRKDFQFYKVREINNYHHAHDAYLNAVVGTALIKKYPKLESEFVYGDYKVYDVRKMIAKSEQEIGKATAKYFFYSNIMNFFKTEITLANGEIRKRPLIETNGETGEIVWDKGRDFATVRKVLSMPQVNIVKKTEVQTGGFSKESILPKRNSDKLIARKKDWDPKKYGGFDSPTVAYSVLVVAKVEKGKSKKLKSVKELLGITIMERSSFEKNPIDFLEAKGYKEVKKDLIIKLPKYSLFELENGRKRMLASAGELQKGNELALPSKYVNFLYLASHYEKLKGSPEDNEQKQLFVEQHKHYLDEIIEQISEFSKRVILADANLDKVLSAYNKHRDKPIREQAENIIHLFTLTNLGAPAAFKYFDTTIDRKRYTSTKEVLDATLIHQSITGLYETRIDLSQLGGDGGEAAAKPAPGSSGGMNPLQLLQPLPAEIKGTKLLAHWNSGATITCIPESFLEDEQPIKKTLIKTIHGEKQQNVYYVTFKVKGRKVEAEVIASPYEYILLSPTDVPWLTQQPLQLTILVPLQEYQEKILSKTALPEDQKQQLKTLFVKYDNLWQHWENQVGHRKIRPHNIATGDYPPRPQKQYPINPKAKPSIQIVIDDLLKQGVLTPQNSTMNTPVYPVPKPDGRWRMVLDYREVNKTIPLTAAQNQHSAGILATIVRQKYKTTLDLANGFWAHPITPESYWLTAFTWQGKQYCWTRLPQGFLNSPALFNADVVDLLKEIPNVQVYVDDIYLSHDDPKEHVQQLEKVFQILLQAGYVVSLKKSEIGQKTVEFLGFNITKEGRGLTDTFKTKLLNITPPKDLKQLQSILGLLNFARNFIPNFAELVQPLYNLIAPAKGKYIEWSEENTKQLNMVIEALNTASNLEERLPEQRLVIKVNTSPSAGYVRYYNETGKKPIMYLNYVFSKAELKFSMLEKLLTTMHKALIKAMDLAMGQEILVYSPIVSMTKIQKTPLPERKALPIRWITWMTYLEDPRIQFHYDKTLPELKHIPDVYTSSQSPVKHPSQYEGVFYTDGSAIKSPDPTKSNNAGMGIVHATYKPEYQVLNQWSIPLGNHTAQMAEIAAVEFACKKALKIPGPVLVITDSFYVAESANKELPYWKSNGFVNNKKKPLKHISKWKSIAECLSMKPDITIQHEKGISLQIPVFILKGNALADKLATQGSYVVNAGKRTADGSEFEKRTADGSEFESPKKKAKVE

SEQ ID NO: 1321 - protein, 2178 aa, synthetic construct
MPAAKRVKLDGGDKKYSIGLDIGTNSVGWAVITDEYKVPSKKFKVLGNTDRHSIKKNLIGALLFDSGETAEATRLKRTARRRYTRRKNRICYLQEIFSNEMAKVDDSFFHRLEESFLVEEDKKHERHPIFGNIVDEVAYHEKYPTIYHLRKKLVDSTDKADLRLIYLALAHMIKFRGHFLIEGDLNPDNSDVDKLFIQLVQTYNQLFEENPINASGVDAKAILSARLSKSRRLENLIAQLPGEKKNGLFGNLIALSLGLTPNFKSNFDLAEDAKLQLSKDTYDDDLDNLLAQIGDQYADLFLAAKNLSDAILLSDILRVNTEITKAPLSASMIKRYDEHHQDLTLLKALVRQQLPEKYKEIFFDQSKNGYAGYIDGGASQEEFYKFIKPILEKMDGTEELLVKLNREDLLRKQRTFDNGSIPHQIHLGELHAILRRQEDFYPFLKDNREKIEKILTFRIPYYVGPLARGNSRFAWMTRKSEETITPWNFEEVVDKGASAQSFIERMTNFDKNLPNEKVLPKHSLLYEYFTVYNELTKVKYVTEGMRKPAFLSGEQKKAIVDLLFKTNRKVTVKQLKEDYFKKIECFDSVEISGVEDRFNASLGTYHDLLKIIKDKDFLDNEENEDILEDIVLTLTLFEDREMIEERLKTYAHLFDDKVMKQLKRRRYTGWGRLSRKLINGIRDKQSGKTILDFLKSDGFANRNFMQLIHDDSLTFKEDIQKAQVSGQGDSLHEHIANLAGSPAIKKGILQTVKVVDELVKVMGRHKPENIVIEMARENQTTQKGQKNSRERMKRIEEGIKELGSQILKEHPVENTQLQNEKLYLYYLQNGRDMYVDQELDINRLSDYDVDHIVPQSFLKDDSIDNKVLTRSDKARGKSDNVPSEEVVKKMKNYWRQLLNAKLITQRKFDNLTKAERGGLSELDKAGFIKRQLVETRQITKHVAQILDSRMNTKYDENDKLIREVKVITLKSKLVSDFRKDFQFYKVREINNYHHAHDAYLNAVVGTALIKKYPKLESEFVYGDYKVYDVRKMIAKSEQEIGKATAKYFFYSNIMNFFKTEITLANGEIRKRPLIETNGETGEIVWDKGRDFATVRKVLSMPQVNIVKKTEVQTGGFSKESILPKRNSDKLIARKKDWDPKKYGGFDSPTVAYSVLVVAKVEKGKSKKLKSVKELLGITIMERSSFEKNPIDFLEAKGYKEVKKDLIIKLPKYSLFELENGRKRMLASAGELQKGNELALPSKYVNFLYLASHYEKLKGSPEDNEQKQLFVEQHKHYLDEIIEQISEFSKRVILADANLDKVLSAYNKHRDKPIREQAENIIHLFTLTNLGAPAAFKYFDTTIDRKRYTSTKEVLDATLIHQSITGLYETRIDLSQLGGDGGPAPAPAPAPAPAPGGMNPLQLLQPLPAEIKGTKLLAHWNSGATITCIPESFLEDEQPIKKTLIKTIHGEKQQNVYYVTFKVKGRKVEAEVIASPYEYILLSPTDVPWLTQQPLQLTILVPLQEYQEKILSKTALPEDQKQQLKTLFVKYDNLWQHWENQVGHRKIRPHNIATGDYPPRPQKQYPINPKAKPSIQIVIDDLLKQGVLTPQNSTMNTPVYPVPKPDGRWRMVLDYREVNKTIPLTAAQNQHSAGILATIVRQKYKTTLDLANGFWAHPITPESYWLTAFTWQGKQYCWTRLPQGFLNSPALFNADVVDLLKEIPNVQVYVDDIYLSHDDPKEHVQQLEKVFQILLQAGYVVSLKKSEIGQKTVEFLGFNITKEGRGLTDTFKTKLLNITPPKDLKQLQSILGLLNFARNFIPNFAELVQPLYNLIAPAKGKYIEWSEENTKQLNMVIEALNTASNLEERLPEQRLVIKVNTSPSAGYVRYYNETGKKPIMYLNYVFSKAELKFSMLEKLLTTMHKALIKAMDLAMGQEILVYSPIVSMTKIQKTPLPERKALPIRWITWMTYLEDPRIQFHYDKTLPELKHIPDVYTSSQSPVKHPSQYEGVFYTDGSAIKSPDPTKSNNAGMGIVHATYKPEYQVLNQWSIPLGNHTAQMAEIAAVEFACKKALKIPGPVLVITDSFYVAESANKELPYWKSNGFVNNKKKPLKHISKWKSIAECLSMKPDITIQHEKGISLQIPVFILKGNALADKLATQGSYVVNAGKRTADGSEFEKRTADGSEFESPKKKAKVE

SEQ ID NO: 1322 - protein, 2174 aa, synthetic construct
MPAAKRVKLDGGDKKYSIGLDIGTNSVGWAVITDEYKVPSKKFKVLGNTDRHSIKKNLIGALLFDSGETAEATRLKRTARRRYTRRKNRICYLQEIFSNEMAKVDDSFFHRLEESFLVEEDKKHERHPIFGNIVDEVAYHEKYPTIYHLRKKLVDSTDKADLRLIYLALAHMIKFRGHFLIEGDLNPDNSDVDKLFIQLVQTYNQLFEENPINASGVDAKAILSARLSKSRRLENLIAQLPGEKKNGLFGNLIALSLGLTPNFKSNFDLAEDAKLQLSKDTYDDDLDNLLAQIGDQYADLFLAAKNLSDAILLSDILRVNTEITKAPLSASMIKRYDEHHQDLTLLKALVRQQLPEKYKEIFFDQSKNGYAGYIDGGASQEEFYKFIKPILEKMDGTEELLVKLNREDLLRKQRTFDNGSIPHQIHLGELHAILRRQEDFYPFLKDNREKIEKILTFRIPYYVGPLARGNSRFAWMTRKSEETITPWNFEEVVDKGASAQSFIERMTNFDKNLPNEKVLPKHSLLYEYFTVYNELTKVKYVTEGMRKPAFLSGEQKKAIVDLLFKTNRKVTVKQLKEDYFKKIECFDSVEISGVEDRFNASLGTYHDLLKIIKDKDFLDNEENEDILEDIVLTLTLFEDREMIEERLKTYAHLFDDKVMKQLKRRRYTGWGRLSRKLINGIRDKQSGKTILDFLKSDGFANRNFMQLIHDDSLTFKEDIQKAQVSGQGDSLHEHIANLAGSPAIKKGILQTVKVVDELVKVMGRHKPENIVIEMARENQTTQKGQKNSRERMKRIEEGIKELGSQILKEHPVENTQLQNEKLYLYYLQNGRDMYVDQELDINRLSDYDVDHIVPQSFLKDDSIDNKVLTRSDKARGKSDNVPSEEVVKKMKNYWRQLLNAKLITQRKFDNLTKAERGGLSELDKAGFIKRQLVETRQITKHVAQILDSRMNTKYDENDKLIREVKVITLKSKLVSDFRKDFQFYKVREINNYHHAHDAYLNAVVGTALIKKYPKLESEFVYGDYKVYDVRKMIAKSEQEIGKATAKYFFYSNIMNFFKTEITLANGEIRKRPLIETNGETGEIVWDKGRDFATVRKVLSMPQVNIVKKTEVQTGGFSKESILPKRNSDKLIARKKDWDPKKYGGFDSPTVAYSVLVVAKVEKGKSKKLKSVKELLGITIMERSSFEKNPIDFLEAKGYKEVKKDLIIKLPKYSLFELENGRKRMLASAGELQKGNELALPSKYVNFLYLASHYEKLKGSPEDNEQKQLFVEQHKHYLDEIIEQISEFSKRVILADANLDKVLSAYNKHRDKPIREQAENIIHLFTLTNLGAPAAFKYFDTTIDRKRYTSTKEVLDATLIHQSITGLYETRIDLSQLGGDGGGGSGGGPAPGGMNPLQLLQPLPAEIKGTKLLAHWNSGATITCIPESFLEDEQPIKKTLIKTIHGEKQQNVYYVTFKVKGRKVEAEVIASPYEYILLSPTDVPWLTQQPLQLTILVPLQEYQEKILSKTALPEDQKQQLKTLFVKYDNLWQHWENQVGHRKIRPHNIATGDYPPRPQKQYPINPKAKPSIQIVIDDLLKQGVLTPQNSTMNTPVYPVPKPDGRWRMVLDYREVNKTIPLTAAQNQHSAGILATIVRQKYKTTLDLANGFWAHPITPESYWLTAFTWQGKQYCWTRLPQGFLNSPALFNADVVDLLKEIPNVQVYVDDIYLSHDDPKEHVQQLEKVFQILLQAGYVVSLKKSEIGQKTVEFLGFNITKEGRGLTDTFKTKLLNITPPKDLKQLQSILGLLNFARNFIPNFAELVQPLYNLIAPAKGKYIEWSEENTKQLNMVIEALNTASNLEERLPEQRLVIKVNTSPSAGYVRYYNETGKKPIMYLNYVFSKAELKFSMLEKLLTTMHKALIKAMDLAMGQEILVYSPIVSMTKIQKTPLPERKALPIRWITWMTYLEDPRIQFHYDKTLPELKHIPDVYTSSQSPVKHPSQYEGVFYTDGSAIKSPDPTKSNNAGMGIVHATYKPEYQVLNQWSIPLGNHTAQMAEIAAVEFACKKALKIPGPVLVITDSFYVAESANKELPYWKSNGFVNNKKKPLKHISKWKSIAECLSMKPDITIQHEKGISLQIPVFILKGNALADKLATQGSYVVNAGKRTADGSEFEKRTADGSEFESPKKKAKVE

SEQ ID NO: 1323 - protein, 2176 aa, synthetic construct
MPAAKRVKLDGGDKKYSIGLDIGTNSVGWAVITDEYKVPSKKFKVLGNTDRHSIKKNLIGALLFDSGETAEATRLKRTARRRYTRRKNRICYLQEIFSNEMAKVDDSFFHRLEESFLVEEDKKHERHPIFGNIVDEVAYHEKYPTIYHLRKKLVDSTDKADLRLIYLALAHMIKFRGHFLIEGDLNPDNSDVDKLFIQLVQTYNQLFEENPINASGVDAKAILSARLSKSRRLENLIAQLPGEKKNGLFGNLIALSLGLTPNFKSNFDLAEDAKLQLSKDTYDDDLDNLLAQIGDQYADLFLAAKNLSDAILLSDILRVNTEITKAPLSASMIKRYDEHHQDLTLLKALVRQQLPEKYKEIFFDQSKNGYAGYIDGGASQEEFYKFIKPILEKMDGTEELLVKLNREDLLRKQRTFDNGSIPHQIHLGELHAILRRQEDFYPFLKDNREKIEKILTFRIPYYVGPLARGNSRFAWMTRKSEETITPWNFEEVVDKGASAQSFIERMTNFDKNLPNEKVLPKHSLLYEYFTVYNELTKVKYVTEGMRKPAFLSGEQKKAIVDLLFKTNRKVTVKQLKEDYFKKIECFDSVEISGVEDRFNASLGTYHDLLKIIKDKDFLDNEENEDILEDIVLTLTLFEDREMIEERLKTYAHLFDDKVMKQLKRRRYTGWGRLSRKLINGIRDKQSGKTILDFLKSDGFANRNFMQLIHDDSLTFKEDIQKAQVSGQGDSLHEHIANLAGSPAIKKGILQTVKVVDELVKVMGRHKPENIVIEMARENQTTQKGQKNSRERMKRIEEGIKELGSQILKEHPVENTQLQNEKLYLYYLQNGRDMYVDQELDINRLSDYDVDHIVPQSFLKDDSIDNKVLTRSDKARGKSDNVPSEEVVKKMKNYWRQLLNAKLITQRKFDNLTKAERGGLSELDKAGFIKRQLVETRQITKHVAQILDSRMNTKYDENDKLIREVKVITLKSKLVSDFRKDFQFYKVREINNYHHAHDAYLNAVVGTALIKKYPKLESEFVYGDYKVYDVRKMIAKSEQEIGKATAKYFFYSNIMNFFKTEITLANGEIRKRPLIETNGETGEIVWDKGRDFATVRKVLSMPQVNIVKKTEVQTGGFSKESILPKRNSDKLIARKKDWDPKKYGGFDSPTVAYSVLVVAKVEKGKSKKLKSVKELLGITIMERSSFEKNPIDFLEAKGYKEVKKDLIIKLPKYSLFELENGRKRMLASAGELQKGNELALPSKYVNFLYLASHYEKLKGSPEDNEQKQLFVEQHKHYLDEIIEQISEFSKRVILADANLDKVLSAYNKHRDKPIREQAENIIHLFTLTNLGAPAAFKYFDTTIDRKRYTSTKEVLDATLIHQSITGLYETRIDLSQLGGDGGGGSEAAAKGGGGGMNPLQLLQPLPAEIKGTKLLAHWNSGATITCIPESFLEDEQPIKKTLIKTIHGEKQQNVYYVTFKVKGRKVEAEVIASPYEYILLSPTDVPWLTQQPLQLTILVPLQEYQEKILSKTALPEDQKQQLKTLFVKYDNLWQHWENQVGHRKIRPHNIATGDYPPRPQKQYPINPKAKPSIQIVIDDLLKQGVLTPQNSTMNTPVYPVPKPDGRWRMVLDYREVNKTIPLTAAQNQHSAGILATIVRQKYKTTLDLANGFWAHPITPESYWLTAFTWQGKQYCWTRLPQGFLNSPALFNADVVDLLKEIPNVQVYVDDIYLSHDDPKEHVQQLEKVFQILLQAGYVVSLKKSEIGQKTVEFLGFNITKEGRGLTDTFKTKLLNITPPKDLKQLQSILGLLNFARNFIPNFAELVQPLYNLIAPAKGKYIEWSEENTKQLNMVIEALNTASNLEERLPEQRLVIKVNTSPSAGYVRYYNETGKKPIMYLNYVFSKAELKFSMLEKLLTTMHKALIKAMDLAMGQEILVYSPIVSMTKIQKTPLPERKALPIRWITWMTYLEDPRIQFHYDKTLPELKHIPDVYTSSQSPVKHPSQYEGVFYTDGSAIKSPDPTKSNNAGMGIVHATYKPEYQVLNQWSIPLGNHTAQMAEIAAVEFACKKALKIPGPVLVITDSFYVAESANKELPYWKSNGFVNNKKKPLKHISKWKSIAECLSMKPDITIQHEKGISLQIPVFILKGNALADKLATQGSYVVNAGKRTADGSEFEKRTADGSEFESPKKKAKVE

SEQ ID NO: 1324 - protein, 2176 aa, synthetic construct
MPAAKRVKLDGGDKKYSIGLDIGTNSVGWAVITDEYKVPSKKFKVLGNTDRHSIKKNLIGALLFDSGETAEATRLKRTARRRYTRRKNRICYLQEIFSNEMAKVDDSFFHRLEESFLVEEDKKHERHPIFGNIVDEVAYHEKYPTIYHLRKKLVDSTDKADLRLIYLALAHMIKFRGHFLIEGDLNPDNSDVDKLFIQLVQTYNQLFEENPINASGVDAKAILSARLSKSRRLENLIAQLPGEKKNGLFGNLIALSLGLTPNFKSNFDLAEDAKLQLSKDTYDDDLDNLLAQIGDQYADLFLAAKNLSDAILLSDILRVNTEITKAPLSASMIKRYDEHHQDLTLLKALVRQQLPEKYKEIFFDQSKNGYAGYIDGGASQEEFYKFIKPILEKMDGTEELLVKLNREDLLRKQRTFDNGSIPHQIHLGELHAILRRQEDFYPFLKDNREKIEKILTFRIPYYVGPLARGNSRFAWMTRKSEETITPWNFEEVVDKGASAQSFIERMTNFDKNLPNEKVLPKHSLLYEYFTVYNELTKVKYVTEGMRKPAFLSGEQKKAIVDLLFKTNRKVTVKQLKEDYFKKIECFDSVEISGVEDRFNASLGTYHDLLKIIKDKDFLDNEENEDILEDIVLTLTLFEDREMIEERLKTYAHLFDDKVMKQLKRRRYTGWGRLSRKLINGIRDKQSGKTILDFLKSDGFANRNFMQLIHDDSLTFKEDIQKAQVSGQGDSLHEHIANLAGSPAIKKGILQTVKVVDELVKVMGRHKPENIVIEMARENQTTQKGQKNSRERMKRIEEGIKELGSQILKEHPVENTQLQNEKLYLYYLQNGRDMYVDQELDINRLSDYDVDHIVPQSFLKDDSIDNKVLTRSDKARGKSDNVPSEEVVKKMKNYWRQLLNAKLITQRKFDNLTKAERGGLSELDKAGFIKRQLVETRQITKHVAQILDSRMNTKYDENDKLIREVKVITLKSKLVSDFRKDFQFYKVREINNYHHAHDAYLNAVVGTALIKKYPKLESEFVYGDYKVYDVRKMIAKSEQEIGKATAKYFFYSNIMNFFKTEITLANGEIRKRPLIETNGETGEIVWDKGRDFATVRKVLSMPQVNIVKKTEVQTGGFSKESILPKRNSDKLIARKKDWDPKKYGGFDSPTVAYSVLVVAKVEKGKSKKLKSVKELLGITIMERSSFEKNPIDFLEAKGYKEVKKDLIIKLPKYSLFELENGRKRMLASAGELQKGNELALPSKYVNFLYLASHYEKLKGSPEDNEQKQLFVEQHKHYLDEIIEQISEFSKRVILADANLDKVLSAYNKHRDKPIREQAENIIHLFTLTNLGAPAAFKYFDTTIDRKRYTSTKEVLDATLIHQSITGLYETRIDLSQLGGDGGPAPEAAAKGGSGGMNPLQLLQPLPAEIKGTKLLAHWNSGATITCIPESFLEDEQPIKKTLIKTIHGEKQQNVYYVTFKVKGRKVEAEVIASPYEYILLSPTDVPWLTQQPLQLTILVPLQEYQEKILSKTALPEDQKQQLKTLFVKYDNLWQHWENQVGHRKIRPHNIATGDYPPRPQKQYPINPKAKPSIQIVIDDLLKQGVLTPQNSTMNTPVYPVPKPDGRWRMVLDYREVNKTIPLTAAQNQHSAGILATIVRQKYKTTLDLANGFWAHPITPESYWLTAFTWQGKQYCWTRLPQGFLNSPALFNADVVDLLKEIPNVQVYVDDIYLSHDDPKEHVQQLEKVFQILLQAGYVVSLKKSEIGQKTVEFLGFNITKEGRGLTDTFKTKLLNITPPKDLKQLQSILGLLNFARNFIPNFAELVQPLYNLIAPAKGKYIEWSEENTKQLNMVIEALNTASNLEERLPEQRLVIKVNTSPSAGYVRYYNETGKKPIMYLNYVFSKAELKFSMLEKLLTTMHKALIKAMDLAMGQEILVYSPIVSMTKIQKTPLPERKALPIRWITWMTYLEDPRIQFHYDKTLPELKHIPDVYTSSQSPVKHPSQYEGVFYTDGSAIKSPDPTKSNNAGMGIVHATYKPEYQVLNQWSIPLGNHTAQMAEIAAVEFACKKALKIPGPVLVITDSFYVAESANKELPYWKSNGFVNNKKKPLKHISKWKSIAECLSMKPDITIQHEKGISLQIPVFILKGNALADKLATQGSYVVNAGKRTADGSEFEKRTADGSEFESPKKKAKVE

SEQ ID NO: 1325 - protein, 2176 aa, synthetic construct
MPAAKRVKLDGGDKKYSIGLDIGTNSVGWAVITDEYKVPSKKFKVLGNTDRHSIKKNLIGALLFDSGETAEATRLKRTARRRYTRRKNRICYLQEIFSNEMAKVDDSFFHRLEESFLVEEDKKHERHPIFGNIVDEVAYHEKYPTIYHLRKKLVDSTDKADLRLIYLALAHMIKFRGHFLIEGDLNPDNSDVDKLFIQLVQTYNQLFEENPINASGVDAKAILSARLSKSRRLENLIAQLPGEKKNGLFGNLIALSLGLTPNFKSNFDLAEDAKLQLSKDTYDDDLDNLLAQIGDQYADLFLAAKNLSDAILLSDILRVNTEITKAPLSASMIKRYDEHHQDLTLLKALVRQQLPEKYKEIFFDQSKNGYAGYIDGGASQEEFYKFIKPILEKMDGTEELLVKLNREDLLRKQRTFDNGSIPHQIHLGELHAILRRQEDFYPFLKDNREKIEKILTFRIPYYVGPLARGNSRFAWMTRKSEETITPWNFEEVVDKGASAQSFIERMTNFDKNLPNEKVLPKHSLLYEYFTVYNELTKVKYVTEGMRKPAFLSGEQKKAIVDLLFKTNRKVTVKQLKEDYFKKIECFDSVEISGVEDRFNASLGTYHDLLKIIKDKDFLDNEENEDILEDIVLTLTLFEDREMIEERLKTYAHLFDDKVMKQLKRRRYTGWGRLSRKLINGIRDKQSGKTILDFLKSDGFANRNFMQLIHDDSLTFKEDIQKAQVSGQGDSLHEHIANLAGSPAIKKGILQTVKVVDELVKVMGRHKPENIVIEMARENQTTQKGQKNSRERMKRIEEGIKELGSQILKEHPVENTQLQNEKLYLYYLQNGRDMYVDQELDINRLSDYDVDHIVPQSFLKDDSIDNKVLTRSDKARGKSDNVPSEEVVKKMKNYWRQLLNAKLITQRKFDNLTKAERGGLSELDKAGFIKRQLVETRQITKHVAQILDSRMNTKYDENDKLIREVKVITLKSKLVSDFRKDFQFYKVREINNYHHAHDAYLNAVVGTALIKKYPKLESEFVYGDYKVYDVRKMIAKSEQEIGKATAKYFFYSNIMNFFKTEITLANGEIRKRPLIETNGETGEIVWDKGRDFATVRKVLSMPQVNIVKKTEVQTGGFSKESILPKRNSDKLIARKKDWDPKKYGGFDSPTVAYSVLVVAKVEKGKSKKLKSVKELLGITIMERSSFEKNPIDFLEAKGYKEVKKDLIIKLPKYSLFELENGRKRMLASAGELQKGNELALPSKYVNFLYLASHYEKLKGSPEDNEQKQLFVEQHKHYLDEIIEQISEFSKRVILADANLDKVLSAYNKHRDKPIREQAENIIHLFTLTNLGAPAAFKYFDTTIDRKRYTSTKEVLDATLIHQSITGLYETRIDLSQLGGDGGEAAAKGGSPAPGGMNPLQLLQPLPAEIKGTKLLAHWNSGATITCIPESFLEDEQPIKKTLIKTIHGEKQQNVYYVTFKVKGRKVEAEVIASPYEYILLSPTDVPWLTQQPLQLTILVPLQEYQEKILSKTALPEDQKQQLKTLFVKYDNLWQHWENQVGHRKIRPHNIATGDYPPRPQKQYPINPKAKPSIQIVIDDLLKQGVLTPQNSTMNTPVYPVPKPDGRWRMVLDYREVNKTIPLTAAQNQHSAGILATIVRQKYKTTLDLANGFWAHPITPESYWLTAFTWQGKQYCWTRLPQGFLNSPALFNADVVDLLKEIPNVQVYVDDIYLSHDDPKEHVQQLEKVFQILLQAGYVVSLKKSEIGQKTVEFLGFNITKEGRGLTDTFKTKLLNITPPKDLKQLQSILGLLNFARNFIPNFAELVQPLYNLIAPAKGKYIEWSEENTKQLNMVIEALNTASNLEERLPEQRLVIKVNTSPSAGYVRYYNETGKKPIMYLNYVFSKAELKFSMLEKLLTTMHKALIKAMDLAMGQEILVYSPIVSMTKIQKTPLPERKALPIRWITWMTYLEDPRIQFHYDKTLPELKHIPDVYTSSQSPVKHPSQYEGVFYTDGSAIKSPDPTKSNNAGMGIVHATYKPEYQVLNQWSIPLGNHTAQMAEIAAVEFACKKALKIPGPVLVITDSFYVAESANKELPYWKSNGFVNNKKKPLKHISKWKSIAECLSMKPDITIQHEKGISLQIPVFILKGNALADKLATQGSYVVNAGKRTADGSEFEKRTADGSEFESPKKKAKVE

SEQ ID NO: 1326 - protein, 2176 aa, synthetic construct
MPAAKRVKLDGGDKKYSIGLDIGTNSVGWAVITDEYKVPSKKFKVLGNTDRHSIKKNLIGALLFDSGETAEATRLKRTARRRYTRRKNRICYLQEIFSNEMAKVDDSFFHRLEESFLVEEDKKHERHPIFGNIVDEVAYHEKYPTIYHLRKKLVDSTDKADLRLIYLALAHMIKFRGHFLIEGDLNPDNSDVDKLFIQLVQTYNQLFEENPINASGVDAKAILSARLSKSRRLENLIAQLPGEKKNGLFGNLIALSLGLTPNFKSNFDLAEDAKLQLSKDTYDDDLDNLLAQIGDQYADLFLAAKNLSDAILLSDILRVNTEITKAPLSASMIKRYDEHHQDLTLLKALVRQQLPEKYKEIFFDQSKNGYAGYIDGGASQEEFYKFIKPILEKMDGTEELLVKLNREDLLRKQRTFDNGSIPHQIHLGELHAILRRQEDFYPFLKDNREKIEKILTFRIPYYVGPLARGNSRFAWMTRKSEETITPWNFEEVVDKGASAQSFIERMTNFDKNLPNEKVLPKHSLLYEYFTVYNELTKVKYVTEGMRKPAFLSGEQKKAIVDLLFKTNRKVTVKQLKEDYFKKIECFDSVEISGVEDRFNASLGTYHDLLKIIKDKDFLDNEENEDILEDIVLTLTLFEDREMIEERLKTYAHLFDDKVMKQLKRRRYTGWGRLSRKLINGIRDKQSGKTILDFLKSDGFANRNFMQLIHDDSLTFKEDIQKAQVSGQGDSLHEHIANLAGSPAIKKGILQTVKVVDELVKVMGRHKPENIVIEMARENQTTQKGQKNSRERMKRIEEGIKELGSQILKEHPVENTQLQNEKLYLYYLQNGRDMYVDQELDINRLSDYDVDHIVPQSFLKDDSIDNKVLTRSDKARGKSDNVPSEEVVKKMKNYWRQLLNAKLITQRKFDNLTKAERGGLSELDKAGFIKRQLVETRQITKHVAQILDSRMNTKYDENDKLIREVKVITLKSKLVSDFRKDFQFYKVREINNYHHAHDAYLNAVVGTALIKKYPKLESEFVYGDYKVYDVRKMIAKSEQEIGKATAKYFFYSNIMNFFKTEITLANGEIRKRPLIETNGETGEIVWDKGRDFATVRKVLSMPQVNIVKKTEVQTGGFSKESILPKRNSDKLIARKKDWDPKKYGGFDSPTVAYSVLVVAKVEKGKSKKLKSVKELLGITIMERSSFEKNPIDFLEAKGYKEVKKDLIIKLPKYSLFELENGRKRMLASAGELQKGNELALPSKYVNFLYLASHYEKLKGSPEDNEQKQLFVEQHKHYLDEIIEQISEFSKRVILADANLDKVLSAYNKHRDKPIREQAENIIHLFTLTNLGAPAAFKYFDTTIDRKRYTSTKEVLDATLIHQSITGLYETRIDLSQLGGDGGGGGGGSEAAAKGGMNPLQLLQPLPAEIKGTKLLAHWNSGATITCIPESFLEDEQPIKKTLIKTIHGEKQQNVYYVTFKVKGRKVEAEVIASPYEYILLSPTDVPWLTQQPLQLTILVPLQEYQEKILSKTALPEDQKQQLKTLFVKYDNLWQHWENQVGHRKIRPHNIATGDYPPRPQKQYPINPKAKPSIQIVIDDLLKQGVLTPQNSTMNTPVYPVPKPDGRWRMVLDYREVNKTIPLTAAQNQHSAGILATIVRQKYKTTLDLANGFWAHPITPESYWLTAFTWQGKQYCWTRLPQGFLNSPALFNADVVDLLKEIPNVQVYVDDIYLSHDDPKEHVQQLEKVFQILLQAGYVVSLKKSEIGQKTVEFLGFNITKEGRGLTDTFKTKLLNITPPKDLKQLQSILGLLNFARNFIPNFAELVQPLYNLIAPAKGKYIEWSEENTKQLNMVIEALNTASNLEERLPEQRLVIKVNTSPSAGYVRYYNETGKKPIMYLNYVFSKAELKFSMLEKLLTTMHKALIKAMDLAMGQEILVYSPIVSMTKIQKTPLPERKALPIRWITWMTYLEDPRIQFHYDKTLPELKHIPDVYTSSQSPVKHPSQYEGVFYTDGSAIKSPDPTKSNNAGMGIVHATYKPEYQVLNQWSIPLGNHTAQMAEIAAVEFACKKALKIPGPVLVITDSFYVAESANKELPYWKSNGFVNNKKKPLKHISKWKSIAECLSMKPDITIQHEKGISLQIPVFILKGNALADKLATQGSYVVNAGKRTADGSEFEKRTADGSEFESPKKKAKVE

SEQ ID NO: 1327 - protein, 2176 aa, synthetic construct
MPAAKRVKLDGGDKKYSIGLDIGTNSVGWAVITDEYKVPSKKFKVLGNTDRHSIKKNLIGALLFDSGETAEATRLKRTARRRYTRRKNRICYLQEIFSNEMAKVDDSFFHRLEESFLVEEDKKHERHPIFGNIVDEVAYHEKYPTIYHLRKKLVDSTDKADLRLIYLALAHMIKFRGHFLIEGDLNPDNSDVDKLFIQLVQTYNQLFEENPINASGVDAKAILSARLSKSRRLENLIAQLPGEKKNGLFGNLIALSLGLTPNFKSNFDLAEDAKLQLSKDTYDDDLDNLLAQIGDQYADLFLAAKNLSDAILLSDILRVNTEITKAPLSASMIKRYDEHHQDLTLLKALVRQQLPEKYKEIFFDQSKNGYAGYIDGGASQEEFYKFIKPILEKMDGTEELLVKLNREDLLRKQRTFDNGSIPHQIHLGELHAILRRQEDFYPFLKDNREKIEKILTFRIPYYVGPLARGNSRFAWMTRKSEETITPWNFEEVVDKGASAQSFIERMTNFDKNLPNEKVLPKHSLLYEYFTVYNELTKVKYVTEGMRKPAFLSGEQKKAIVDLLFKTNRKVTVKQLKEDYFKKIECFDSVEISGVEDRFNASLGTYHDLLKIIKDKDFLDNEENEDILEDIVLTLTLFEDREMIEERLKTYAHLFDDKVMKQLKRRRYTGWGRLSRKLINGIRDKQSGKTILDFLKSDGFANRNFMQLIHDDSLTFKEDIQKAQVSGQGDSLHEHIANLAGSPAIKKGILQTVKVVDELVKVMGRHKPENIVIEMARENQTTQKGQKNSRERMKRIEEGIKELGSQILKEHPVENTQLQNEKLYLYYLQNGRDMYVDQELDINRLSDYDVDHIVPQSFLKDDSIDNKVLTRSDKARGKSDNVPSEEVVKKMKNYWRQLLNAKLITQRKFDNLTKAERGGLSELDKAGFIKRQLVETRQITKHVAQILDSRMNTKYDENDKLIREVKVITLKSKLVSDFRKDFQFYKVREINNYHHAHDAYLNAVVGTALIKKYPKLESEFVYGDYKVYDVRKMIAKSEQEIGKATAKYFFYSNIMNFFKTEITLANGEIRKRPLIETNGETGEIVWDKGRDFATVRKVLSMPQVNIVKKTEVQTGGFSKESILPKRNSDKLIARKKDWDPKKYGGFDSPTVAYSVLVVAKVEKGKSKKLKSVKELLGITIMERSSFEKNPIDFLEAKGYKEVKKDLIIKLPKYSLFELENGRKRMLASAGELQKGNELALPSKYVNFLYLASHYEKLKGSPEDNEQKQLFVEQHKHYLDEIIEQISEFSKRVILADANLDKVLSAYNKHRDKPIREQAENIIHLFTLTNLGAPAAFKYFDTTIDRKRYTSTKEVLDATLIHQSITGLYETRIDLSQLGGDGGEAAAKGSSPAPGGMNPLQLLQPLPAEIKGTKLLAHWNSGATITCIPESFLEDEQPIKKTLIKTIHGEKQQNVYYVTFKVKGRKVEAEVIASPYEYILLSPTDVPWLTQQPLQLTILVPLQEYQEKILSKTALPEDQKQQLKTLFVKYDNLWQHWENQVGHRKIRPHNIATGDYPPRPQKQYPINPKAKPSIQIVIDDLLKQGVLTPQNSTMNTPVYPVPKPDGRWRMVLDYREVNKTIPLTAAQNQHSAGILATIVRQKYKTTLDLANGFWAHPITPESYWLTAFTWQGKQYCWTRLPQGFLNSPALFNADVVDLLKEIPNVQVYVDDIYLSHDDPKEHVQQLEKVFQILLQAGYVVSLKKSEIGQKTVEFLGFNITKEGRGLTDTFKTKLLNITPPKDLKQLQSILGLLNFARNFIPNFAELVQPLYNLIAPAKGKYIEWSEENTKQLNMVIEALNTASNLEERLPEQRLVIKVNTSPSAGYVRYYNETGKKPIMYLNYVFSKAELKFSMLEKLLTTMHKALIKAMDLAMGQEILVYSPIVSMTKIQKTPLPERKALPIRWITWMTYLEDPRIQFHYDKTLPELKHIPDVYTSSQSPVKHPSQYEGVFYTDGSAIKSPDPTKSNNAGMGIVHATYKPEYQVLNQWSIPLGNHTAQMAEIAAVEFACKKALKIPGPVLVITDSFYVAESANKELPYWKSNGFVNNKKKPLKHISKWKSIAECLSMKPDITIQHEKGISLQIPVFILKGNALADKLATQGSYVVNAGKRTADGSEFEKRTADGSEFESPKKKAKVE

SEQ ID NO: 1328 - protein, 2176 aa, synthetic construct
MPAAKRVKLDGGDKKYSIGLDIGTNSVGWAVITDEYKVPSKKFKVLGNTDRHSIKKNLIGALLFDSGETAEATRLKRTARRRYTRRKNRICYLQEIFSNEMAKVDDSFFHRLEESFLVEEDKKHERHPIFGNIVDEVAYHEKYPTIYHLRKKLVDSTDKADLRLIYLALAHMIKFRGHFLIEGDLNPDNSDVDKLFIQLVQTYNQLFEENPINASGVDAKAILSARLSKSRRLENLIAQLPGEKKNGLFGNLIALSLGLTPNFKSNFDLAEDAKLQLSKDTYDDDLDNLLAQIGDQYADLFLAAKNLSDAILLSDILRVNTEITKAPLSASMIKRYDEHHQDLTLLKALVRQQLPEKYKEIFFDQSKNGYAGYIDGGASQEEFYKFIKPILEKMDGTEELLVKLNREDLLRKQRTFDNGSIPHQIHLGELHAILRRQEDFYPFLKDNREKIEKILTFRIPYYVGPLARGNSRFAWMTRKSEETITPWNFEEVVDKGASAQSFIERMTNFDKNLPNEKVLPKHSLLYEYFTVYNELTKVKYVTEGMRKPAFLSGEQKKAIVDLLFKTNRKVTVKQLKEDYFKKIECFDSVEISGVEDRFNASLGTYHDLLKIIKDKDFLDNEENEDILEDIVLTLTLFEDREMIEERLKTYAHLFDDKVMKQLKRRRYTGWGRLSRKLINGIRDKQSGKTILDFLKSDGFANRNFMQLIHDDSLTFKEDIQKAQVSGQGDSLHEHIANLAGSPAIKKGILQTVKVVDELVKVMGRHKPENIVIEMARENQTTQKGQKNSRERMKRIEEGIKELGSQILKEHPVENTQLQNEKLYLYYLQNGRDMYVDQELDINRLSDYDVDHIVPQSFLKDDSIDNKVLTRSDKARGKSDNVPSEEVVKKMKNYWRQLLNAKLITQRKFDNLTKAERGGLSELDKAGFIKRQLVETRQITKHVAQILDSRMNTKYDENDKLIREVKVITLKSKLVSDFRKDFQFYKVREINNYHHAHDAYLNAVVGTALIKKYPKLESEFVYGDYKVYDVRKMIAKSEQEIGKATAKYFFYSNIMNFFKTEITLANGEIRKRPLIETNGETGEIVWDKGRDFATVRKVLSMPQVNIVKKTEVQTGGFSKESILPKRNSDKLIARKKDWDPKKYGGFDSPTVAYSVLVVAKVEKGKSKKLKSVKELLGITIMERSSFEKNPIDFLEAKGYKEVKKDLIIKLPKYSLFELENGRKRMLASAGELQKGNELALPSKYVNFLYLASHYEKLKGSPEDNEQKQLFVEQHKHYLDEIIEQISEFSKRVILADANLDKVLSAYNKHRDKPIREQAENIIHLFTLTNLGAPAAFKYFDTTIDRKRYTSTKEVLDATLIHQSITGLYETRIDLSQLGGDGGGGSPAPEAAAKGGMNPLQLLQPLPAEIKGTKLLAHWNSGATITCIPESFLEDEQPIKKTLIKTIHGEKQQNVYYVTFKVKGRKVEAEVIASPYEYILLSPTDVPWLTQQPLQLTILVPLQEYQEKILSKTALPEDQKQQLKTLFVKYDNLWQHWENQVGHRKIRPHNIATGDYPPRPQKQYPINPKAKPSIQIVIDDLLKQGVLTPQNSTMNTPVYPVPKPDGRWRMVLDYREVNKTIPLTAAQNQHSAGILATIVRQKYKTTLDLANGFWAHPITPESYWLTAFTWQGKQYCWTRLPQGFLNSPALFNADVVDLLKEIPNVQVYVDDIYLSHDDPKEHVQQLEKVFQILLQAGYVVSLKKSEIGQKTVEFLGFNITKEGRGLTDTFKTKLLNITPPKDLKQLQSILGLLNFARNFIPNFAELVQPLYNLIAPAKGKYIEWSEENTKQLNMVIEALNTASNLEERLPEQRLVIKVNTSPSAGYVRYYNETGKKPIMYLNYVFSKAELKFSMLEKLLTTMHKALIKAMDLAMGQEILVYSPIVSMTKIQKTPLPERKALPIRWITWMTYLEDPRIQFHYDKTLPELKHIPDVYTSSQSPVKHPSQYEGVFYTDGSAIKSPDPTKSNNAGMGIVHATYKPEYQVLNQWSIPLGNHTAQMAEIAAVEFACKKALKIPGPVLVITDSFYVAESANKELPYWKSNGFVNNKKKPLKHISKWKSIAECLSMKPDITIQHEKGISLQIPVFILKGNALADKLATQGSYVVNAGKRTADGSEFEKRTADGSEFESPKKKAKVE

SEQ ID NO: 1329 - protein, 2176 aa, synthetic construct
MPAAKRVKLDGGDKKYSIGLDIGTNSVGWAVITDEYKVPSKKFKVLGNTDRHSIKKNLIGALLFDSGETAEATRLKRTARRRYTRRKNRICYLQEIFSNEMAKVDDSFFHRLEESFLVEEDKKHERHPIFGNIVDEVAYHEKYPTIYHLRKKLVDSTDKADLRLIYLALAHMIKFRGHFLIEGDLNPDNSDVDKLFIQLVQTYNQLFEENPINASGVDAKAILSARLSKSRRLENLIAQLPGEKKNGLFGNLIALSLGLTPNFKSNFDLAEDAKLQLSKDTYDDDLDNLLAQIGDQYADLFLAAKNLSDAILLSDILRVNTEITKAPLSASMIKRYDEHHQDLTLLKALVRQQLPEKYKEIFFDQSKNGYAGYIDGGASQEEFYKFIKPILEKMDGTEELLVKLNREDLLRKQRTFDNGSIPHQIHLGELHAILRRQEDFYPFLKDNREKIEKILTFRIPYYVGPLARGNSRFAWMTRKSEETITPWNFEEVVDKGASAQSFIERMTNFDKNLPNEKVLPKHSLLYEYFTVYNELTKVKYVTEGMRKPAFLSGEQKKAIVDLLFKTNRKVTVKQLKEDYFKKIECFDSVEISGVEDRFNASLGTYHDLLKIIKDKDFLDNEENEDILEDIVLTLTLFEDREMIEERLKTYAHLFDDKVMKQLKRRRYTGWGRLSRKLINGIRDKQSGKTILDFLKSDGFANRNFMQLIHDDSLTFKEDIQKAQVSGQGDSLHEHIANLAGSPAIKKGILQTVKVVDELVKVMGRHKPENIVIEMARENQTTQKGQKNSRERMKRIEEGIKELGSQILKEHPVENTQLQNEKLYLYYLQNGRDMYVDQELDINRLSDYDVDHIVPQSFLKDDSIDNKVLTRSDKARGKSDNVPSEEVVKKMKNYWRQLLNAKLITQRKFDNLTKAERGGLSELDKAGFIKRQLVETRQITKHVAQILDSRMNTKYDENDKLIREVKVITLKSKLVSDFRKDFQFYKVREINNYHHAHDAYLNAVVGTALIKKYPKLESEFVYGDYKVYDVRKMIAKSEQEIGKATAKYFFYSNIMNFFKTEITLANGEIRKRPLIETNGETGEIVWDKGRDFATVRKVLSMPQVNIVKKTEVQTGGFSKESILPKRNSDKLIARKKDWDPKKYGGFDSPTVAYSVLVVAKVEKGKSKKLKSVKELLGITIMERSSFEKNPIDFLEAKGYKEVKKDLIIKLPKYSLFELENGRKRMLASAGELQKGNELALPSKYVNFLYLASHYEKLKGSPEDNEQKQLFVEQHKHYLDEIIEQISEFSKRVILADANLDKVLSAYNKHRDKPIREQAENIIHLFTLTNLGAPAAFKYFDTTIDRKRYTSTKEVLDATLIHQSITGLYETRIDLSQLGGDGGEAAAKGGSGGGGGMNPLQLLQPLPAEIKGTKLLAHWNSGATITCIPESFLEDEQPIKKTLIKTIHGEKQQNVYYVTFKVKGRKVEAEVIASPYEYILLSPTDVPWLTQQPLQLTILVPLQEYQEKILSKTALPEDQKQQLKTLFVKYDNLWQHWENQVGHRKIRPHNIATGDYPPRPQKQYPINPKAKPSIQIVIDDLLKQGVLTPQNSTMNTPVYPVPKPDGRWRMVLDYREVNKTIPLTAAQNQHSAGILATIVRQKYKTTLDLANGFWAHPITPESYWLTAFTWQGKQYCWTRLPQGFLNSPALFNADVVDLLKEIPNVQVYVDDIYLSHDDPKEHVQQLEKVFQILLQAGYVVSLKKSEIGQKTVEFLGFNITKEGRGLTDTFKTKLLNITPPKDLKQLQSILGLLNFARNFIPNFAELVQPLYNLIAPAKGKYIEWSEENTKQLNMVIEALNTASNLEERLPEQRLVIKVNTSPSAGYVRYYNETGKKPIMYLNYVFSKAELKFSMLEKLLTTMHKALIKAMDLAMGQEILVYSPIVSMTKIQKTPLPERKALPIRWITWMTYLEDPRIQFHYDKTLPELKHIPDVYTSSQSPVKHPSQYEGVFYTDGSAIKSPDPTKSNNAGMGIVHATYKPEYQVLNQWSIPLGNHTAQMAEIAAVEFACKKALKIPGPVLVITDSFYVAESANKELPYWKSNGFVNNKKKPLKHISKWKSIAECLSMKPDITIQHEKGISLQIPVFILKGNALADKLATQGSYVVNAGKRTADGSEFEKRTADGSEFESPKKKAKVE

SEQ ID NO: 1330 - protein, 2180 aa, synthetic construct
MPAAKRVKLDGGDKKYSIGLDIGTNSVGWAVITDEYKVPSKKFKVLGNTDRHSIKKNLIGALLFDSGETAEATRLKRTARRRYTRRKNRICYLQEIFSNEMAKVDDSFFHRLEESFLVEEDKKHERHPIFGNIVDEVAYHEKYPTIYHLRKKLVDSTDKADLRLIYLALAHMIKFRGHFLIEGDLNPDNSDVDKLFIQLVQTYNQLFEENPINASGVDAKAILSARLSKSRRLENLIAQLPGEKKNGLFGNLIALSLGLTPNFKSNFDLAEDAKLQLSKDTYDDDLDNLLAQIGDQYADLFLAAKNLSDAILLSDILRVNTEITKAPLSASMIKRYDEHHQDLTLLKALVRQQLPEKYKEIFFDQSKNGYAGYIDGGASQEEFYKFIKPILEKMDGTEELLVKLNREDLLRKQRTFDNGSIPHQIHLGELHAILRRQEDFYPFLKDNREKIEKILTFRIPYYVGPLARGNSRFAWMTRKSEETITPWNFEEVVDKGASAQSFIERMTNFDKNLPNEKVLPKHSLLYEYFTVYNELTKVKYVTEGMRKPAFLSGEQKKAIVDLLFKTNRKVTVKQLKEDYFKKIECFDSVEISGVEDRFNASLGTYHDLLKIIKDKDFLDNEENEDILEDIVLTLTLFEDREMIEERLKTYAHLFDDKVMKQLKRRRYTGWGRLSRKLINGIRDKQSGKTILDFLKSDGFANRNFMQLIHDDSLTFKEDIQKAQVSGQGDSLHEHIANLAGSPAIKKGILQTVKVVDELVKVMGRHKPENIVIEMARENQTTQKGQKNSRERMKRIEEGIKELGSQILKEHPVENTQLQNEKLYLYYLQNGRDMYVDQELDINRLSDYDVDHIVPQSFLKDDSIDNKVLTRSDKARGKSDNVPSEEVVKKMKNYWRQLLNAKLITQRKFDNLTKAERGGLSELDKAGFIKRQLVETRQITKHVAQILDSRMNTKYDENDKLIREVKVITLKSKLVSDFRKDFQFYKVREINNYHHAHDAYLNAVVGTALIKKYPKLESEFVYGDYKVYDVRKMIAKSEQEIGKATAKYFFYSNIMNFFKTEITLANGEIRKRPLIETNGETGEIVWDKGRDFATVRKVLSMPQVNIVKKTEVQTGGFSKESILPKRNSDKLIARKKDWDPKKYGGFDSPTVAYSVLVVAKVEKGKSKKLKSVKELLGITIMERSSFEKNPIDFLEAKGYKEVKKDLIIKLPKYSLFELENGRKRMLASAGELQKGNELALPSKYVNFLYLASHYEKLKGSPEDNEQKQLFVEQHKHYLDEIIEQISEFSKRVILADANLDKVLSAYNKHRDKPIREQAENIIHLFTLTNLGAPAAFKYFDTTIDRKRYTSTKEVLDATLIHQSITGLYETRIDLSQLGGDGGGGGGSEAAAKGGGGSGGMNPLQLLQPLPAEIKGTKLLAHWNSGATITCIPESFLEDEQPIKKTLIKTIHGEKQQNVYYVTFKVKGRKVEAEVIASPYEYILLSPTDVPWLTQQPLQLTILVPLQEYQEKILSKTALPEDQKQQLKTLFVKYDNLWQHWENQVGHRKIRPHNIATGDYPPRPQKQYPINPKAKPSIQIVIDDLLKQGVLTPQNSTMNTPVYPVPKPDGRWRMVLDYREVNKTIPLTAAQNQHSAGILATIVRQKYKTTLDLANGFWAHPITPESYWLTAFTWQGKQYCWTRLPQGFLNSPALFNADVVDLLKEIPNVQVYVDDIYLSHDDPKEHVQQLEKVFQILLQAGYVVSLKKSEIGQKTVEFLGFNITKEGRGLTDTFKTKLLNITPPKDLKQLQSILGLLNFARNFIPNFAELVQPLYNLIAPAKGKYIEWSEENTKQLNMVIEALNTASNLEERLPEQRLVIKVNTSPSAGYVRYYNETGKKPIMYLNYVFSKAELKFSMLEKLLTTMHKALIKAMDLAMGQEILVYSPIVSMTKIQKTPLPERKALPIRWITWMTYLEDPRIQFHYDKTLPELKHIPDVYTSSQSPVKHPSQYEGVFYTDGSAIKSPDPTKSNNAGMGIVHATYKPEYQVLNQWSIPLGNHTAQMAEIAAVEFACKKALKIPGPVLVITDSFYVAESANKELPYWKSNGFVNNKKKPLKHISKWKSIAECLSMKPDITIQHEKGISLQIPVFILKGNALADKLATQGSYVVNAGKRTADGSEFEKRTADGSEFESPKKKAKVE

SEQ ID NO: 1331 - protein, 2174 aa, synthetic construct
MPAAKRVKLDGGDKKYSIGLDIGTNSVGWAVITDEYKVPSKKFKVLGNTDRHSIKKNLIGALLFDSGETAEATRLKRTARRRYTRRKNRICYLQEIFSNEMAKVDDSFFHRLEESFLVEEDKKHERHPIFGNIVDEVAYHEKYPTIYHLRKKLVDSTDKADLRLIYLALAHMIKFRGHFLIEGDLNPDNSDVDKLFIQLVQTYNQLFEENPINASGVDAKAILSARLSKSRRLENLIAQLPGEKKNGLFGNLIALSLGLTPNFKSNFDLAEDAKLQLSKDTYDDDLDNLLAQIGDQYADLFLAAKNLSDAILLSDILRVNTEITKAPLSASMIKRYDEHHQDLTLLKALVRQQLPEKYKEIFFDQSKNGYAGYIDGGASQEEFYKFIKPILEKMDGTEELLVKLNREDLLRKQRTFDNGSIPHQIHLGELHAILRRQEDFYPFLKDNREKIEKILTFRIPYYVGPLARGNSRFAWMTRKSEETITPWNFEEVVDKGASAQSFIERMTNFDKNLPNEKVLPKHSLLYEYFTVYNELTKVKYVTEGMRKPAFLSGEQKKAIVDLLFKTNRKVTVKQLKEDYFKKIECFDSVEISGVEDRFNASLGTYHDLLKIIKDKDFLDNEENEDILEDIVLTLTLFEDREMIEERLKTYAHLFDDKVMKQLKRRRYTGWGRLSRKLINGIRDKQSGKTILDFLKSDGFANRNFMQLIHDDSLTFKEDIQKAQVSGQGDSLHEHIANLAGSPAIKKGILQTVKVVDELVKVMGRHKPENIVIEMARENQTTQKGQKNSRERMKRIEEGIKELGSQILKEHPVENTQLQNEKLYLYYLQNGRDMYVDQELDINRLSDYDVDHIVPQSFLKDDSIDNKVLTRSDKARGKSDNVPSEEVVKKMKNYWRQLLNAKLITQRKFDNLTKAERGGLSELDKAGFIKRQLVETRQITKHVAQILDSRMNTKYDENDKLIREVKVITLKSKLVSDFRKDFQFYKVREINNYHHAHDAYLNAVVGTALIKKYPKLESEFVYGDYKVYDVRKMIAKSEQEIGKATAKYFFYSNIMNFFKTEITLANGEIRKRPLIETNGETGEIVWDKGRDFATVRKVLSMPQVNIVKKTEVQTGGFSKESILPKRNSDKLIARKKDWDPKKYGGFDSPTVAYSVLVVAKVEKGKSKKLKSVKELLGITIMERSSFEKNPIDFLEAKGYKEVKKDLIIKLPKYSLFELENGRKRMLASAGELQKGNELALPSKYVNFLYLASHYEKLKGSPEDNEQKQLFVEQHKHYLDEIIEQISEFSKRVILADANLDKVLSAYNKHRDKPIREQAENIIHLFTLTNLGAPAAFKYFDTTIDRKRYTSTKEVLDATLIHQSITGLYETRIDLSQLGGDGGGGSPAPGSSGGMNPLQLLQPLPAEIKGTKLLAHWNSGATITCIPESFLEDEQPIKKTLIKTIHGEKQQNVYYVTFKVKGRKVEAEVIASPYEYILLSPTDVPWLTQQPLQLTILVPLQEYQEKILSKTALPEDQKQQLKTLFVKYDNLWQHWENQVGHRKIRPHNIATGDYPPRPQKQYPINPKAKPSIQIVIDDLLKQGVLTPQNSTMNTPVYPVPKPDGRWRMVLDYREVNKTIPLTAAQNQHSAGILATIVRQKYKTTLDLANGFWAHPITPESYWLTAFTWQGKQYCWTRLPQGFLNSPALFNADVVDLLKEIPNVQVYVDDIYLSHDDPKEHVQQLEKVFQILLQAGYVVSLKKSEIGQKTVEFLGFNITKEGRGLTDTFKTKLLNITPPKDLKQLQSILGLLNFARNFIPNFAELVQPLYNLIAPAKGKYIEWSEENTKQLNMVIEALNTASNLEERLPEQRLVIKVNTSPSAGYVRYYNETGKKPIMYLNYVFSKAELKFSMLEKLLTTMHKALIKAMDLAMGQEILVYSPIVSMTKIQKTPLPERKALPIRWITWMTYLEDPRIQFHYDKTLPELKHIPDVYTSSQSPVKHPSQYEGVFYTDGSAIKSPDPTKSNNAGMGIVHATYKPEYQVLNQWSIPLGNHTAQMAEIAAVEFACKKALKIPGPVLVITDSFYVAESANKELPYWKSNGFVNNKKKPLKHISKWKSIAECLSMKPDITIQHEKGISLQIPVFILKGNALADKLATQGSYVVNAGKRTADGSEFEKRTADGSEFESPKKKAKVE

SEQ ID NO: 1332 - protein, 2177 aa, synthetic construct
MPAAKRVKLDGGDKKYSIGLDIGTNSVGWAVITDEYKVPSKKFKVLGNTDRHSIKKNLIGALLFDSGETAEATRLKRTARRRYTRRKNRICYLQEIFSNEMAKVDDSFFHRLEESFLVEEDKKHERHPIFGNIVDEVAYHEKYPTIYHLRKKLVDSTDKADLRLIYLALAHMIKFRGHFLIEGDLNPDNSDVDKLFIQLVQTYNQLFEENPINASGVDAKAILSARLSKSRRLENLIAQLPGEKKNGLFGNLIALSLGLTPNFKSNFDLAEDAKLQLSKDTYDDDLDNLLAQIGDQYADLFLAAKNLSDAILLSDILRVNTEITKAPLSASMIKRYDEHHQDLTLLKALVRQQLPEKYKEIFFDQSKNGYAGYIDGGASQEEFYKFIKPILEKMDGTEELLVKLNREDLLRKQRTFDNGSIPHQIHLGELHAILRRQEDFYPFLKDNREKIEKILTFRIPYYVGPLARGNSRFAWMTRKSEETITPWNFEEVVDKGASAQSFIERMTNFDKNLPNEKVLPKHSLLYEYFTVYNELTKVKYVTEGMRKPAFLSGEQKKAIVDLLFKTNRKVTVKQLKEDYFKKIECFDSVEISGVEDRFNASLGTYHDLLKIIKDKDFLDNEENEDILEDIVLTLTLFEDREMIEERLKTYAHLFDDKVMKQLKRRRYTGWGRLSRKLINGIRDKQSGKTILDFLKSDGFANRNFMQLIHDDSLTFKEDIQKAQVSGQGDSLHEHIANLAGSPAIKKGILQTVKVVDELVKVMGRHKPENIVIEMARENQTTQKGQKNSRERMKRIEEGIKELGSQILKEHPVENTQLQNEKLYLYYLQNGRDMYVDQELDINRLSDYDVDHIVPQSFLKDDSIDNKVLTRSDKARGKSDNVPSEEVVKKMKNYWRQLLNAKLITQRKFDNLTKAERGGLSELDKAGFIKRQLVETRQITKHVAQILDSRMNTKYDENDKLIREVKVITLKSKLVSDFRKDFQFYKVREINNYHHAHDAYLNAVVGTALIKKYPKLESEFVYGDYKVYDVRKMIAKSEQEIGKATAKYFFYSNIMNFFKTEITLANGEIRKRPLIETNGETGEIVWDKGRDFATVRKVLSMPQVNIVKKTEVQTGGFSKESILPKRNSDKLIARKKDWDPKKYGGFDSPTVAYSVLVVAKVEKGKSKKLKSVKELLGITIMERSSFEKNPIDFLEAKGYKEVKKDLIIKLPKYSLFELENGRKRMLASAGELQKGNELALPSKYVNFLYLASHYEKLKGSPEDNEQKQLFVEQHKHYLDEIIEQISEFSKRVILADANLDKVLSAYNKHRDKPIREQAENIIHLFTLTNLGAPAAFKYFDTTIDRKRYTSTKEVLDATLIHQSITGLYETRIDLSQLGGDGGGSSGSSGSSGSSGGMNPLQLLQPLPAEIKGTKLLAHWNSGATITCIPESFLEDEQPIKKTLIKTIHGEKQQNVYYVTFKVKGRKVEAEVIASPYEYILLSPTDVPWLTQQPLQLTILVPLQEYQEKILSKTALPEDQKQQLKTLFVKYDNLWQHWENQVGHRKIRPHNIATGDYPPRPQKQYPINPKAKPSIQIVIDDLLKQGVLTPQNSTMNTPVYPVPKPDGRWRMVLDYREVNKTIPLTAAQNQHSAGILATIVRQKYKTTLDLANGFWAHPITPESYWLTAFTWQGKQYCWTRLPQGFLNSPALFNADVVDLLKEIPNVQVYVDDIYLSHDDPKEHVQQLEKVFQILLQAGYVVSLKKSEIGQKTVEFLGFNITKEGRGLTDTFKTKLLNITPPKDLKQLQSILGLLNFARNFIPNFAELVQPLYNLIAPAKGKYIEWSEENTKQLNMVIEALNTASNLEERLPEQRLVIKVNTSPSAGYVRYYNETGKKPIMYLNYVFSKAELKFSMLEKLLTTMHKALIKAMDLAMGQEILVYSPIVSMTKIQKTPLPERKALPIRWITWMTYLEDPRIQFHYDKTLPELKHIPDVYTSSQSPVKHPSQYEGVFYTDGSAIKSPDPTKSNNAGMGIVHATYKPEYQVLNQWSIPLGNHTAQMAEIAAVEFACKKALKIPGPVLVITDSFYVAESANKELPYWKSNGFVNNKKKPLKHISKWKSIAECLSMKPDITIQHEKGISLQIPVFILKGNALADKLATQGSYVVNAGKRTADGSEFEKRTADGSEFESPKKKAKVE

SEQ ID NO: 1333 - protein, 2174 aa, synthetic construct
MPAAKRVKLDGGDKKYSIGLDIGTNSVGWAVITDEYKVPSKKFKVLGNTDRHSIKKNLIGALLFDSGETAEATRLKRTARRRYTRRKNRICYLQEIFSNEMAKVDDSFFHRLEESFLVEEDKKHERHPIFGNIVDEVAYHEKYPTIYHLRKKLVDSTDKADLRLIYLALAHMIKFRGHFLIEGDLNPDNSDVDKLFIQLVQTYNQLFEENPINASGVDAKAILSARLSKSRRLENLIAQLPGEKKNGLFGNLIALSLGLTPNFKSNFDLAEDAKLQLSKDTYDDDLDNLLAQIGDQYADLFLAAKNLSDAILLSDILRVNTEITKAPLSASMIKRYDEHHQDLTLLKALVRQQLPEKYKEIFFDQSKNGYAGYIDGGASQEEFYKFIKPILEKMDGTEELLVKLNREDLLRKQRTFDNGSIPHQIHLGELHAILRRQEDFYPFLKDNREKIEKILTFRIPYYVGPLARGNSRFAWMTRKSEETITPWNFEEVVDKGASAQSFIERMTNFDKNLPNEKVLPKHSLLYEYFTVYNELTKVKYVTEGMRKPAFLSGEQKKAIVDLLFKTNRKVTVKQLKEDYFKKIECFDSVEISGVEDRFNASLGTYHDLLKIIKDKDFLDNEENEDILEDIVLTLTLFEDREMIEERLKTYAHLFDDKVMKQLKRRRYTGWGRLSRKLINGIRDKQSGKTILDFLKSDGFANRNFMQLIHDDSLTFKEDIQKAQVSGQGDSLHEHIANLAGSPAIKKGILQTVKVVDELVKVMGRHKPENIVIEMARENQTTQKGQKNSRERMKRIEEGIKELGSQILKEHPVENTQLQNEKLYLYYLQNGRDMYVDQELDINRLSDYDVDHIVPQSFLKDDSIDNKVLTRSDKARGKSDNVPSEEVVKKMKNYWRQLLNAKLITQRKFDNLTKAERGGLSELDKAGFIKRQLVETRQITKHVAQILDSRMNTKYDENDKLIREVKVITLKSKLVSDFRKDFQFYKVREINNYHHAHDAYLNAVVGTALIKKYPKLESEFVYGDYKVYDVRKMIAKSEQEIGKATAKYFFYSNIMNFFKTEITLANGEIRKRPLIETNGETGEIVWDKGRDFATVRKVLSMPQVNIVKKTEVQTGGFSKESILPKRNSDKLIARKKDWDPKKYGGFDSPTVAYSVLVVAKVEKGKSKKLKSVKELLGITIMERSSFEKNPIDFLEAKGYKEVKKDLIIKLPKYSLFELENGRKRMLASAGELQKGNELALPSKYVNFLYLASHYEKLKGSPEDNEQKQLFVEQHKHYLDEIIEQISEFSKRVILADANLDKVLSAYNKHRDKPIREQAENIIHLFTLTNLGAPAAFKYFDTTIDRKRYTSTKEVLDATLIHQSITGLYETRIDLSQLGGDGGPAPGSSGGSGGMNPLQLLQPLPAEIKGTKLLAHWNSGATITCIPESFLEDEQPIKKTLIKTIHGEKQQNVYYVTFKVKGRKVEAEVIASPYEYILLSPTDVPWLTQQPLQLTILVPLQEYQEKILSKTALPEDQKQQLKTLFVKYDNLWQHWENQVGHRKIRPHNIATGDYPPRPQKQYPINPKAKPSIQIVIDDLLKQGVLTPQNSTMNTPVYPVPKPDGRWRMVLDYREVNKTIPLTAAQNQHSAGILATIVRQKYKTTLDLANGFWAHPITPESYWLTAFTWQGKQYCWTRLPQGFLNSPALFNADVVDLLKEIPNVQVYVDDIYLSHDDPKEHVQQLEKVFQILLQAGYVVSLKKSEIGQKTVEFLGFNITKEGRGLTDTFKTKLLNITPPKDLKQLQSILGLLNFARNFIPNFAELVQPLYNLIAPAKGKYIEWSEENTKQLNMVIEALNTASNLEERLPEQRLVIKVNTSPSAGYVRYYNETGKKPIMYLNYVFSKAELKFSMLEKLLTTMHKALIKAMDLAMGQEILVYSPIVSMTKIQKTPLPERKALPIRWITWMTYLEDPRIQFHYDKTLPELKHIPDVYTSSQSPVKHPSQYEGVFYTDGSAIKSPDPTKSNNAGMGIVHATYKPEYQVLNQWSIPLGNHTAQMAEIAAVEFACKKALKIPGPVLVITDSFYVAESANKELPYWKSNGFVNNKKKPLKHISKWKSIAECLSMKPDITIQHEKGISLQIPVFILKGNALADKLATQGSYVVNAGKRTADGSEFEKRTADGSEFESPKKKAKVE

SEQ ID NO: 1334 - protein, 2176 aa, synthetic construct
MPAAKRVKLDGGDKKYSIGLDIGTNSVGWAVITDEYKVPSKKFKVLGNTDRHSIKKNLIGALLFDSGETAEATRLKRTARRRYTRRKNRICYLQEIFSNEMAKVDDSFFHRLEESFLVEEDKKHERHPIFGNIVDEVAYHEKYPTIYHLRKKLVDSTDKADLRLIYLALAHMIKFRGHFLIEGDLNPDNSDVDKLFIQLVQTYNQLFEENPINASGVDAKAILSARLSKSRRLENLIAQLPGEKKNGLFGNLIALSLGLTPNFKSNFDLAEDAKLQLSKDTYDDDLDNLLAQIGDQYADLFLAAKNLSDAILLSDILRVNTEITKAPLSASMIKRYDEHHQDLTLLKALVRQQLPEKYKEIFFDQSKNGYAGYIDGGASQEEFYKFIKPILEKMDGTEELLVKLNREDLLRKQRTFDNGSIPHQIHLGELHAILRRQEDFYPFLKDNREKIEKILTFRIPYYVGPLARGNSRFAWMTRKSEETITPWNFEEVVDKGASAQSFIERMTNFDKNLPNEKVLPKHSLLYEYFTVYNELTKVKYVTEGMRKPAFLSGEQKKAIVDLLFKTNRKVTVKQLKEDYFKKIECFDSVEISGVEDRFNASLGTYHDLLKIIKDKDFLDNEENEDILEDIVLTLTLFEDREMIEERLKTYAHLFDDKVMKQLKRRRYTGWGRLSRKLINGIRDKQSGKTILDFLKSDGFANRNFMQLIHDDSLTFKEDIQKAQVSGQGDSLHEHIANLAGSPAIKKGILQTVKVVDELVKVMGRHKPENIVIEMARENQTTQKGQKNSRERMKRIEEGIKELGSQILKEHPVENTQLQNEKLYLYYLQNGRDMYVDQELDINRLSDYDVDHIVPQSFLKDDSIDNKVLTRSDKARGKSDNVPSEEVVKKMKNYWRQLLNAKLITQRKFDNLTKAERGGLSELDKAGFIKRQLVETRQITKHVAQILDSRMNTKYDENDKLIREVKVITLKSKLVSDFRKDFQFYKVREINNYHHAHDAYLNAVVGTALIKKYPKLESEFVYGDYKVYDVRKMIAKSEQEIGKATAKYFFYSNIMNFFKTEITLANGEIRKRPLIETNGETGEIVWDKGRDFATVRKVLSMPQVNIVKKTEVQTGGFSKESILPKRNSDKLIARKKDWDPKKYGGFDSPTVAYSVLVVAKVEKGKSKKLKSVKELLGITIMERSSFEKNPIDFLEAKGYKEVKKDLIIKLPKYSLFELENGRKRMLASAGELQKGNELALPSKYVNFLYLASHYEKLKGSPEDNEQKQLFVEQHKHYLDEIIEQISEFSKRVILADANLDKVLSAYNKHRDKPIREQAENIIHLFTLTNLGAPAAFKYFDTTIDRKRYTSTKEVLDATLIHQSITGLYETRIDLSQLGGDGGEAAAKGGGGGSGGMNPLQLLQPLPAEIKGTKLLAHWNSGATITCIPESFLEDEQPIKKTLIKTIHGEKQQNVYYVTFKVKGRKVEAEVIASPYEYILLSPTDVPWLTQQPLQLTILVPLQEYQEKILSKTALPEDQKQQLKTLFVKYDNLWQHWENQVGHRKIRPHNIATGDYPPRPQKQYPINPKAKPSIQIVIDDLLKQGVLTPQNSTMNTPVYPVPKPDGRWRMVLDYREVNKTIPLTAAQNQHSAGILATIVRQKYKTTLDLANGFWAHPITPESYWLTAFTWQGKQYCWTRLPQGFLNSPALFNADVVDLLKEIPNVQVYVDDIYLSHDDPKEHVQQLEKVFQILLQAGYVVSLKKSEIGQKTVEFLGFNITKEGRGLTDTFKTKLLNITPPKDLKQLQSILGLLNFARNFIPNFAELVQPLYNLIAPAKGKYIEWSEENTKQLNMVIEALNTASNLEERLPEQRLVIKVNTSPSAGYVRYYNETGKKPIMYLNYVFSKAELKFSMLEKLLTTMHKALIKAMDLAMGQEILVYSPIVSMTKIQKTPLPERKALPIRWITWMTYLEDPRIQFHYDKTLPELKHIPDVYTSSQSPVKHPSQYEGVFYTDGSAIKSPDPTKSNNAGMGIVHATYKPEYQVLNQWSIPLGNHTAQMAEIAAVEFACKKALKIPGPVLVITDSFYVAESANKELPYWKSNGFVNNKKKPLKHISKWKSIAECLSMKPDITIQHEKGISLQIPVFILKGNALADKLATQGSYVVNAGKRTADGSEFEKRTADGSEFESPKKKAKVE

SEQ ID NO: 1335 - protein, 2176 aa, synthetic construct
MPAAKRVKLDGGDKKYSIGLDIGTNSVGWAVITDEYKVPSKKFKVLGNTDRHSIKKNLIGALLFDSGETAEATRLKRTARRRYTRRKNRICYLQEIFSNEMAKVDDSFFHRLEESFLVEEDKKHERHPIFGNIVDEVAYHEKYPTIYHLRKKLVDSTDKADLRLIYLALAHMIKFRGHFLIEGDLNPDNSDVDKLFIQLVQTYNQLFEENPINASGVDAKAILSARLSKSRRLENLIAQLPGEKKNGLFGNLIALSLGLTPNFKSNFDLAEDAKLQLSKDTYDDDLDNLLAQIGDQYADLFLAAKNLSDAILLSDILRVNTEITKAPLSASMIKRYDEHHQDLTLLKALVRQQLPEKYKEIFFDQSKNGYAGYIDGGASQEEFYKFIKPILEKMDGTEELLVKLNREDLLRKQRTFDNGSIPHQIHLGELHAILRRQEDFYPFLKDNREKIEKILTFRIPYYVGPLARGNSRFAWMTRKSEETITPWNFEEVVDKGASAQSFIERMTNFDKNLPNEKVLPKHSLLYEYFTVYNELTKVKYVTEGMRKPAFLSGEQKKAIVDLLFKTNRKVTVKQLKEDYFKKIECFDSVEISGVEDRFNASLGTYHDLLKIIKDKDFLDNEENEDILEDIVLTLTLFEDREMIEERLKTYAHLFDDKVMKQLKRRRYTGWGRLSRKLINGIRDKQSGKTILDFLKSDGFANRNFMQLIHDDSLTFKEDIQKAQVSGQGDSLHEHIANLAGSPAIKKGILQTVKVVDELVKVMGRHKPENIVIEMARENQTTQKGQKNSRERMKRIEEGIKELGSQILKEHPVENTQLQNEKLYLYYLQNGRDMYVDQELDINRLSDYDVDHIVPQSFLKDDSIDNKVLTRSDKARGKSDNVPSEEVVKKMKNYWRQLLNAKLITQRKFDNLTKAERGGLSELDKAGFIKRQLVETRQITKHVAQILDSRMNTKYDENDKLIREVKVITLKSKLVSDFRKDFQFYKVREINNYHHAHDAYLNAVVGTALIKKYPKLESEFVYGDYKVYDVRKMIAKSEQEIGKATAKYFFYSNIMNFFKTEITLANGEIRKRPLIETNGETGEIVWDKGRDFATVRKVLSMPQVNIVKKTEVQTGGFSKESILPKRNSDKLIARKKDWDPKKYGGFDSPTVAYSVLVVAKVEKGKSKKLKSVKELLGITIMERSSFEKNPIDFLEAKGYKEVKKDLIIKLPKYSLFELENGRKRMLASAGELQKGNELALPSKYVNFLYLASHYEKLKGSPEDNEQKQLFVEQHKHYLDEIIEQISEFSKRVILADANLDKVLSAYNKHRDKPIREQAENIIHLFTLTNLGAPAAFKYFDTTIDRKRYTSTKEVLDATLIHQSITGLYETRIDLSQLGGDGGEAAAKGGGGSSGGMNPLQLLQPLPAEIKGTKLLAHWNSGATITCIPESFLEDEQPIKKTLIKTIHGEKQQNVYYVTFKVKGRKVEAEVIASPYEYILLSPTDVPWLTQQPLQLTILVPLQEYQEKILSKTALPEDQKQQLKTLFVKYDNLWQHWENQVGHRKIRPHNIATGDYPPRPQKQYPINPKAKPSIQIVIDDLLKQGVLTPQNSTMNTPVYPVPKPDGRWRMVLDYREVNKTIPLTAAQNQHSAGILATIVRQKYKTTLDLANGFWAHPITPESYWLTAFTWQGKQYCWTRLPQGFLNSPALFNADVVDLLKEIPNVQVYVDDIYLSHDDPKEHVQQLEKVFQILLQAGYVVSLKKSEIGQKTVEFLGFNITKEGRGLTDTFKTKLLNITPPKDLKQLQSILGLLNFARNFIPNFAELVQPLYNLIAPAKGKYIEWSEENTKQLNMVIEALNTASNLEERLPEQRLVIKVNTSPSAGYVRYYNETGKKPIMYLNYVFSKAELKFSMLEKLLTTMHKALIKAMDLAMGQEILVYSPIVSMTKIQKTPLPERKALPIRWITWMTYLEDPRIQFHYDKTLPELKHIPDVYTSSQSPVKHPSQYEGVFYTDGSAIKSPDPTKSNNAGMGIVHATYKPEYQVLNQWSIPLGNHTAQMAEIAAVEFACKKALKIPGPVLVITDSFYVAESANKELPYWKSNGFVNNKKKPLKHISKWKSIAECLSMKPDITIQHEKGISLQIPVFILKGNALADKLATQGSYVVNAGKRTADGSEFEKRTADGSEFESPKKKAKVE

SEQ ID NO: 1336 - protein, 2174 aa, synthetic construct
MPAAKRVKLDGGDKKYSIGLDIGTNSVGWAVITDEYKVPSKKFKVLGNTDRHSIKKNLIGALLFDSGETAEATRLKRTARRRYTRRKNRICYLQEIFSNEMAKVDDSFFHRLEESFLVEEDKKHERHPIFGNIVDEVAYHEKYPTIYHLRKKLVDSTDKADLRLIYLALAHMIKFRGHFLIEGDLNPDNSDVDKLFIQLVQTYNQLFEENPINASGVDAKAILSARLSKSRRLENLIAQLPGEKKNGLFGNLIALSLGLTPNFKSNFDLAEDAKLQLSKDTYDDDLDNLLAQIGDQYADLFLAAKNLSDAILLSDILRVNTEITKAPLSASMIKRYDEHHQDLTLLKALVRQQLPEKYKEIFFDQSKNGYAGYIDGGASQEEFYKFIKPILEKMDGTEELLVKLNREDLLRKQRTFDNGSIPHQIHLGELHAILRRQEDFYPFLKDNREKIEKILTFRIPYYVGPLARGNSRFAWMTRKSEETITPWNFEEVVDKGASAQSFIERMTNFDKNLPNEKVLPKHSLLYEYFTVYNELTKVKYVTEGMRKPAFLSGEQKKAIVDLLFKTNRKVTVKQLKEDYFKKIECFDSVEISGVEDRFNASLGTYHDLLKIIKDKDFLDNEENEDILEDIVLTLTLFEDREMIEERLKTYAHLFDDKVMKQLKRRRYTGWGRLSRKLINGIRDKQSGKTILDFLKSDGFANRNFMQLIHDDSLTFKEDIQKAQVSGQGDSLHEHIANLAGSPAIKKGILQTVKVVDELVKVMGRHKPENIVIEMARENQTTQKGQKNSRERMKRIEEGIKELGSQILKEHPVENTQLQNEKLYLYYLQNGRDMYVDQELDINRLSDYDVDHIVPQSFLKDDSIDNKVLTRSDKARGKSDNVPSEEVVKKMKNYWRQLLNAKLITQRKFDNLTKAERGGLSELDKAGFIKRQLVETRQITKHVAQILDSRMNTKYDENDKLIREVKVITLKSKLVSDFRKDFQFYKVREINNYHHAHDAYLNAVVGTALIKKYPKLESEFVYGDYKVYDVRKMIAKSEQEIGKATAKYFFYSNIMNFFKTEITLANGEIRKRPLIETNGETGEIVWDKGRDFATVRKVLSMPQVNIVKKTEVQTGGFSKESILPKRNSDKLIARKKDWDPKKYGGFDSPTVAYSVLVVAKVEKGKSKKLKSVKELLGITIMERSSFEKNPIDFLEAKGYKEVKKDLIIKLPKYSLFELENGRKRMLASAGELQKGNELALPSKYVNFLYLASHYEKLKGSPEDNEQKQLFVEQHKHYLDEIIEQISEFSKRVILADANLDKVLSAYNKHRDKPIREQAENIIHLFTLTNLGAPAAFKYFDTTIDRKRYTSTKEVLDATLIHQSITGLYETRIDLSQLGGDGGGGGGSSPAPGGMNPLQLLQPLPAEIKGTKLLAHWNSGATITCIPESFLEDEQPIKKTLIKTIHGEKQQNVYYVTFKVKGRKVEAEVIASPYEYILLSPTDVPWLTQQPLQLTILVPLQEYQEKILSKTALPEDQKQQLKTLFVKYDNLWQHWENQVGHRKIRPHNIATGDYPPRPQKQYPINPKAKPSIQIVIDDLLKQGVLTPQNSTMNTPVYPVPKPDGRWRMVLDYREVNKTIPLTAAQNQHSAGILATIVRQKYKTTLDLANGFWAHPITPESYWLTAFTWQGKQYCWTRLPQGFLNSPALFNADVVDLLKEIPNVQVYVDDIYLSHDDPKEHVQQLEKVFQILLQAGYVVSLKKSEIGQKTVEFLGFNITKEGRGLTDTFKTKLLNITPPKDLKQLQSILGLLNFARNFIPNFAELVQPLYNLIAPAKGKYIEWSEENTKQLNMVIEALNTASNLEERLPEQRLVIKVNTSPSAGYVRYYNETGKKPIMYLNYVFSKAELKFSMLEKLLTTMHKALIKAMDLAMGQEILVYSPIVSMTKIQKTPLPERKALPIRWITWMTYLEDPRIQFHYDKTLPELKHIPDVYTSSQSPVKHPSQYEGVFYTDGSAIKSPDPTKSNNAGMGIVHATYKPEYQVLNQWSIPLGNHTAQMAEIAAVEFACKKALKIPGPVLVITDSFYVAESANKELPYWKSNGFVNNKKKPLKHISKWKSIAECLSMKPDITIQHEKGISLQIPVFILKGNALADKLATQGSYVVNAGKRTADGSEFEKRTADGSEFESPKKKAKVE

SEQ ID NO: 1337 - protein, 2176 aa, synthetic construct
MPAAKRVKLDGGDKKYSIGLDIGTNSVGWAVITDEYKVPSKKFKVLGNTDRHSIKKNLIGALLFDSGETAEATRLKRTARRRYTRRKNRICYLQEIFSNEMAKVDDSFFHRLEESFLVEEDKKHERHPIFGNIVDEVAYHEKYPTIYHLRKKLVDSTDKADLRLIYLALAHMIKFRGHFLIEGDLNPDNSDVDKLFIQLVQTYNQLFEENPINASGVDAKAILSARLSKSRRLENLIAQLPGEKKNGLFGNLIALSLGLTPNFKSNFDLAEDAKLQLSKDTYDDDLDNLLAQIGDQYADLFLAAKNLSDAILLSDILRVNTEITKAPLSASMIKRYDEHHQDLTLLKALVRQQLPEKYKEIFFDQSKNGYAGYIDGGASQEEFYKFIKPILEKMDGTEELLVKLNREDLLRKQRTFDNGSIPHQIHLGELHAILRRQEDFYPFLKDNREKIEKILTFRIPYYVGPLARGNSRFAWMTRKSEETITPWNFEEVVDKGASAQSFIERMTNFDKNLPNEKVLPKHSLLYEYFTVYNELTKVKYVTEGMRKPAFLSGEQKKAIVDLLFKTNRKVTVKQLKEDYFKKIECFDSVEISGVEDRFNASLGTYHDLLKIIKDKDFLDNEENEDILEDIVLTLTLFEDREMIEERLKTYAHLFDDKVMKQLKRRRYTGWGRLSRKLINGIRDKQSGKTILDFLKSDGFANRNFMQLIHDDSLTFKEDIQKAQVSGQGDSLHEHIANLAGSPAIKKGILQTVKVVDELVKVMGRHKPENIVIEMARENQTTQKGQKNSRERMKRIEEGIKELGSQILKEHPVENTQLQNEKLYLYYLQNGRDMYVDQELDINRLSDYDVDHIVPQSFLKDDSIDNKVLTRSDKARGKSDNVPSEEVVKKMKNYWRQLLNAKLITQRKFDNLTKAERGGLSELDKAGFIKRQLVETRQITKHVAQILDSRMNTKYDENDKLIREVKVITLKSKLVSDFRKDFQFYKVREINNYHHAHDAYLNAVVGTALIKKYPKLESEFVYGDYKVYDVRKMIAKSEQEIGKATAKYFFYSNIMNFFKTEITLANGEIRKRPLIETNGETGEIVWDKGRDFATVRKVLSMPQVNIVKKTEVQTGGFSKESILPKRNSDKLIARKKDWDPKKYGGFDSPTVAYSVLVVAKVEKGKSKKLKSVKELLGITIMERSSFEKNPIDFLEAKGYKEVKKDLIIKLPKYSLFELENGRKRMLASAGELQKGNELALPSKYVNFLYLASHYEKLKGSPEDNEQKQLFVEQHKHYLDEIIEQISEFSKRVILADANLDKVLSAYNKHRDKPIREQAENIIHLFTLTNLGAPAAFKYFDTTIDRKRYTSTKEVLDATLIHQSITGLYETRIDLSQLGGDGGGGGGSSEAAAKGGMNPLQLLQPLPAEIKGTKLLAHWNSGATITCIPESFLEDEQPIKKTLIKTIHGEKQQNVYYVTFKVKGRKVEAEVIASPYEYILLSPTDVPWLTQQPLQLTILVPLQEYQEKILSKTALPEDQKQQLKTLFVKYDNLWQHWENQVGHRKIRPHNIATGDYPPRPQKQYPINPKAKPSIQIVIDDLLKQGVLTPQNSTMNTPVYPVPKPDGRWRMVLDYREVNKTIPLTAAQNQHSAGILATIVRQKYKTTLDLANGFWAHPITPESYWLTAFTWQGKQYCWTRLPQGFLNSPALFNADVVDLLKEIPNVQVYVDDIYLSHDDPKEHVQQLEKVFQILLQAGYVVSLKKSEIGQKTVEFLGFNITKEGRGLTDTFKTKLLNITPPKDLKQLQSILGLLNFARNFIPNFAELVQPLYNLIAPAKGKYIEWSEENTKQLNMVIEALNTASNLEERLPEQRLVIKVNTSPSAGYVRYYNETGKKPIMYLNYVFSKAELKFSMLEKLLTTMHKALIKAMDLAMGQEILVYSPIVSMTKIQKTPLPERKALPIRWITWMTYLEDPRIQFHYDKTLPELKHIPDVYTSSQSPVKHPSQYEGVFYTDGSAIKSPDPTKSNNAGMGIVHATYKPEYQVLNQWSIPLGNHTAQMAEIAAVEFACKKALKIPGPVLVITDSFYVAESANKELPYWKSNGFVNNKKKPLKHISKWKSIAECLSMKPDITIQHEKGISLQIPVFILKGNALADKLATQGSYVVNAGKRTADGSEFEKRTADGSEFESPKKKAKVE

SEQ ID NO: 1338 - protein, 2174 aa, synthetic construct
MPAAKRVKLDGGDKKYSIGLDIGTNSVGWAVITDEYKVPSKKFKVLGNTDRHSIKKNLIGALLFDSGETAEATRLKRTARRRYTRRKNRICYLQEIFSNEMAKVDDSFFHRLEESFLVEEDKKHERHPIFGNIVDEVAYHEKYPTIYHLRKKLVDSTDKADLRLIYLALAHMIKFRGHFLIEGDLNPDNSDVDKLFIQLVQTYNQLFEENPINASGVDAKAILSARLSKSRRLENLIAQLPGEKKNGLFGNLIALSLGLTPNFKSNFDLAEDAKLQLSKDTYDDDLDNLLAQIGDQYADLFLAAKNLSDAILLSDILRVNTEITKAPLSASMIKRYDEHHQDLTLLKALVRQQLPEKYKEIFFDQSKNGYAGYIDGGASQEEFYKFIKPILEKMDGTEELLVKLNREDLLRKQRTFDNGSIPHQIHLGELHAILRRQEDFYPFLKDNREKIEKILTFRIPYYVGPLARGNSRFAWMTRKSEETITPWNFEEVVDKGASAQSFIERMTNFDKNLPNEKVLPKHSLLYEYFTVYNELTKVKYVTEGMRKPAFLSGEQKKAIVDLLFKTNRKVTVKQLKEDYFKKIECFDSVEISGVEDRFNASLGTYHDLLKIIKDKDFLDNEENEDILEDIVLTLTLFEDREMIEERLKTYAHLFDDKVMKQLKRRRYTGWGRLSRKLINGIRDKQSGKTILDFLKSDGFANRNFMQLIHDDSLTFKEDIQKAQVSGQGDSLHEHIANLAGSPAIKKGILQTVKVVDELVKVMGRHKPENIVIEMARENQTTQKGQKNSRERMKRIEEGIKELGSQILKEHPVENTQLQNEKLYLYYLQNGRDMYVDQELDINRLSDYDVDHIVPQSFLKDDSIDNKVLTRSDKARGKSDNVPSEEVVKKMKNYWRQLLNAKLITQRKFDNLTKAERGGLSELDKAGFIKRQLVETRQITKHVAQILDSRMNTKYDENDKLIREVKVITLKSKLVSDFRKDFQFYKVREINNYHHAHDAYLNAVVGTALIKKYPKLESEFVYGDYKVYDVRKMIAKSEQEIGKATAKYFFYSNIMNFFKTEITLANGEIRKRPLIETNGETGEIVWDKGRDFATVRKVLSMPQVNIVKKTEVQTGGFSKESILPKRNSDKLIARKKDWDPKKYGGFDSPTVAYSVLVVAKVEKGKSKKLKSVKELLGITIMERSSFEKNPIDFLEAKGYKEVKKDLIIKLPKYSLFELENGRKRMLASAGELQKGNELALPSKYVNFLYLASHYEKLKGSPEDNEQKQLFVEQHKHYLDEIIEQISEFSKRVILADANLDKVLSAYNKHRDKPIREQAENIIHLFTLTNLGAPAAFKYFDTTIDRKRYTSTKEVLDATLIHQSITGLYETRIDLSQLGGDGGGGGGGSGSSGGMNPLQLLQPLPAEIKGTKLLAHWNSGATITCIPESFLEDEQPIKKTLIKTIHGEKQQNVYYVTFKVKGRKVEAEVIASPYEYILLSPTDVPWLTQQPLQLTILVPLQEYQEKILSKTALPEDQKQQLKTLFVKYDNLWQHWENQVGHRKIRPHNIATGDYPPRPQKQYPINPKAKPSIQIVIDDLLKQGVLTPQNSTMNTPVYPVPKPDGRWRMVLDYREVNKTIPLTAAQNQHSAGILATIVRQKYKTTLDLANGFWAHPITPESYWLTAFTWQGKQYCWTRLPQGFLNSPALFNADVVDLLKEIPNVQVYVDDIYLSHDDPKEHVQQLEKVFQILLQAGYVVSLKKSEIGQKTVEFLGFNITKEGRGLTDTFKTKLLNITPPKDLKQLQSILGLLNFARNFIPNFAELVQPLYNLIAPAKGKYIEWSEENTKQLNMVIEALNTASNLEERLPEQRLVIKVNTSPSAGYVRYYNETGKKPIMYLNYVFSKAELKFSMLEKLLTTMHKALIKAMDLAMGQEILVYSPIVSMTKIQKTPLPERKALPIRWITWMTYLEDPRIQFHYDKTLPELKHIPDVYTSSQSPVKHPSQYEGVFYTDGSAIKSPDPTKSNNAGMGIVHATYKPEYQVLNQWSIPLGNHTAQMAEIAAVEFACKKALKIPGPVLVITDSFYVAESANKELPYWKSNGFVNNKKKPLKHISKWKSIAECLSMKPDITIQHEKGISLQIPVFILKGNALADKLATQGSYVVNAGKRTADGSEFEKRTADGSEFESPKKKAKVE

SEQ ID NO: 1339 - protein, 2176 aa, synthetic construct
MPAAKRVKLDGGDKKYSIGLDIGTNSVGWAVITDEYKVPSKKFKVLGNTDRHSIKKNLIGALLFDSGETAEATRLKRTARRRYTRRKNRICYLQEIFSNEMAKVDDSFFHRLEESFLVEEDKKHERHPIFGNIVDEVAYHEKYPTIYHLRKKLVDSTDKADLRLIYLALAHMIKFRGHFLIEGDLNPDNSDVDKLFIQLVQTYNQLFEENPINASGVDAKAILSARLSKSRRLENLIAQLPGEKKNGLFGNLIALSLGLTPNFKSNFDLAEDAKLQLSKDTYDDDLDNLLAQIGDQYADLFLAAKNLSDAILLSDILRVNTEITKAPLSASMIKRYDEHHQDLTLLKALVRQQLPEKYKEIFFDQSKNGYAGYIDGGASQEEFYKFIKPILEKMDGTEELLVKLNREDLLRKQRTFDNGSIPHQIHLGELHAILRRQEDFYPFLKDNREKIEKILTFRIPYYVGPLARGNSRFAWMTRKSEETITPWNFEEVVDKGASAQSFIERMTNFDKNLPNEKVLPKHSLLYEYFTVYNELTKVKYVTEGMRKPAFLSGEQKKAIVDLLFKTNRKVTVKQLKEDYFKKIECFDSVEISGVEDRFNASLGTYHDLLKIIKDKDFLDNEENEDILEDIVLTLTLFEDREMIEERLKTYAHLFDDKVMKQLKRRRYTGWGRLSRKLINGIRDKQSGKTILDFLKSDGFANRNFMQLIHDDSLTFKEDIQKAQVSGQGDSLHEHIANLAGSPAIKKGILQTVKVVDELVKVMGRHKPENIVIEMARENQTTQKGQKNSRERMKRIEEGIKELGSQILKEHPVENTQLQNEKLYLYYLQNGRDMYVDQELDINRLSDYDVDHIVPQSFLKDDSIDNKVLTRSDKARGKSDNVPSEEVVKKMKNYWRQLLNAKLITQRKFDNLTKAERGGLSELDKAGFIKRQLVETRQITKHVAQILDSRMNTKYDENDKLIREVKVITLKSKLVSDFRKDFQFYKVREINNYHHAHDAYLNAVVGTALIKKYPKLESEFVYGDYKVYDVRKMIAKSEQEIGKATAKYFFYSNIMNFFKTEITLANGEIRKRPLIETNGETGEIVWDKGRDFATVRKVLSMPQVNIVKKTEVQTGGFSKESILPKRNSDKLIARKKDWDPKKYGGFDSPTVAYSVLVVAKVEKGKSKKLKSVKELLGITIMERSSFEKNPIDFLEAKGYKEVKKDLIIKLPKYSLFELENGRKRMLASAGELQKGNELALPSKYVNFLYLASHYEKLKGSPEDNEQKQLFVEQHKHYLDEIIEQISEFSKRVILADANLDKVLSAYNKHRDKPIREQAENIIHLFTLTNLGAPAAFKYFDTTIDRKRYTSTKEVLDATLIHQSITGLYETRIDLSQLGGDGGGGGEAAAKGSSGGMNPLQLLQPLPAEIKGTKLLAHWNSGATITCIPESFLEDEQPIKKTLIKTIHGEKQQNVYYVTFKVKGRKVEAEVIASPYEYILLSPTDVPWLTQQPLQLTILVPLQEYQEKILSKTALPEDQKQQLKTLFVKYDNLWQHWENQVGHRKIRPHNIATGDYPPRPQKQYPINPKAKPSIQIVIDDLLKQGVLTPQNSTMNTPVYPVPKPDGRWRMVLDYREVNKTIPLTAAQNQHSAGILATIVRQKYKTTLDLANGFWAHPITPESYWLTAFTWQGKQYCWTRLPQGFLNSPALFNADVVDLLKEIPNVQVYVDDIYLSHDDPKEHVQQLEKVFQILLQAGYVVSLKKSEIGQKTVEFLGFNITKEGRGLTDTFKTKLLNITPPKDLKQLQSILGLLNFARNFIPNFAELVQPLYNLIAPAKGKYIEWSEENTKQLNMVIEALNTASNLEERLPEQRLVIKVNTSPSAGYVRYYNETGKKPIMYLNYVFSKAELKFSMLEKLLTTMHKALIKAMDLAMGQEILVYSPIVSMTKIQKTPLPERKALPIRWITWMTYLEDPRIQFHYDKTLPELKHIPDVYTSSQSPVKHPSQYEGVFYTDGSAIKSPDPTKSNNAGMGIVHATYKPEYQVLNQWSIPLGNHTAQMAEIAAVEFACKKALKIPGPVLVITDSFYVAESANKELPYWKSNGFVNNKKKPLKHISKWKSIAECLSMKPDITIQHEKGISLQIPVFILKGNALADKLATQGSYVVNAGKRTADGSEFEKRTADGSEFESPKKKAKVE

SEQ ID NO: 1340 - protein, 2171 aa, synthetic construct
MPAAKRVKLDGGDKKYSIGLDIGTNSVGWAVITDEYKVPSKKFKVLGNTDRHSIKKNLIGALLFDSGETAEATRLKRTARRRYTRRKNRICYLQEIFSNEMAKVDDSFFHRLEESFLVEEDKKHERHPIFGNIVDEVAYHEKYPTIYHLRKKLVDSTDKADLRLIYLALAHMIKFRGHFLIEGDLNPDNSDVDKLFIQLVQTYNQLFEENPINASGVDAKAILSARLSKSRRLENLIAQLPGEKKNGLFGNLIALSLGLTPNFKSNFDLAEDAKLQLSKDTYDDDLDNLLAQIGDQYADLFLAAKNLSDAILLSDILRVNTEITKAPLSASMIKRYDEHHQDLTLLKALVRQQLPEKYKEIFFDQSKNGYAGYIDGGASQEEFYKFIKPILEKMDGTEELLVKLNREDLLRKQRTFDNGSIPHQIHLGELHAILRRQEDFYPFLKDNREKIEKILTFRIPYYVGPLARGNSRFAWMTRKSEETITPWNFEEVVDKGASAQSFIERMTNFDKNLPNEKVLPKHSLLYEYFTVYNELTKVKYVTEGMRKPAFLSGEQKKAIVDLLFKTNRKVTVKQLKEDYFKKIECFDSVEISGVEDRFNASLGTYHDLLKIIKDKDFLDNEENEDILEDIVLTLTLFEDREMIEERLKTYAHLFDDKVMKQLKRRRYTGWGRLSRKLINGIRDKQSGKTILDFLKSDGFANRNFMQLIHDDSLTFKEDIQKAQVSGQGDSLHEHIANLAGSPAIKKGILQTVKVVDELVKVMGRHKPENIVIEMARENQTTQKGQKNSRERMKRIEEGIKELGSQILKEHPVENTQLQNEKLYLYYLQNGRDMYVDQELDINRLSDYDVDHIVPQSFLKDDSIDNKVLTRSDKARGKSDNVPSEEVVKKMKNYWRQLLNAKLITQRKFDNLTKAERGGLSELDKAGFIKRQLVETRQITKHVAQILDSRMNTKYDENDKLIREVKVITLKSKLVSDFRKDFQFYKVREINNYHHAHDAYLNAVVGTALIKKYPKLESEFVYGDYKVYDVRKMIAKSEQEIGKATAKYFFYSNIMNFFKTEITLANGEIRKRPLIETNGETGEIVWDKGRDFATVRKVLSMPQVNIVKKTEVQTGGFSKESILPKRNSDKLIARKKDWDPKKYGGFDSPTVAYSVLVVAKVEKGKSKKLKSVKELLGITIMERSSFEKNPIDFLEAKGYKEVKKDLIIKLPKYSLFELENGRKRMLASAGELQKGNELALPSKYVNFLYLASHYEKLKGSPEDNEQKQLFVEQHKHYLDEIIEQISEFSKRVILADANLDKVLSAYNKHRDKPIREQAENIIHLFTLTNLGAPAAFKYFDTTIDRKRYTSTKEVLDATLIHQSITGLYETRIDLSQLGGDGGGSSGGGGGMNPLQLLQPLPAEIKGTKLLAHWNSGATITCIPESFLEDEQPIKKTLIKTIHGEKQQNVYYVTFKVKGRKVEAEVIASPYEYILLSPTDVPWLTQQPLQLTILVPLQEYQEKILSKTALPEDQKQQLKTLFVKYDNLWQHWENQVGHRKIRPHNIATGDYPPRPQKQYPINPKAKPSIQIVIDDLLKQGVLTPQNSTMNTPVYPVPKPDGRWRMVLDYREVNKTIPLTAAQNQHSAGILATIVRQKYKTTLDLANGFWAHPITPESYWLTAFTWQGKQYCWTRLPQGFLNSPALFNADVVDLLKEIPNVQVYVDDIYLSHDDPKEHVQQLEKVFQILLQAGYVVSLKKSEIGQKTVEFLGFNITKEGRGLTDTFKTKLLNITPPKDLKQLQSILGLLNFARNFIPNFAELVQPLYNLIAPAKGKYIEWSEENTKQLNMVIEALNTASNLEERLPEQRLVIKVNTSPSAGYVRYYNETGKKPIMYLNYVFSKAELKFSMLEKLLTTMHKALIKAMDLAMGQEILVYSPIVSMTKIQKTPLPERKALPIRWITWMTYLEDPRIQFHYDKTLPELKHIPDVYTSSQSPVKHPSQYEGVFYTDGSAIKSPDPTKSNNAGMGIVHATYKPEYQVLNQWSIPLGNHTAQMAEIAAVEFACKKALKIPGPVLVITDSFYVAESANKELPYWKSNGFVNNKKKPLKHISKWKSIAECLSMKPDITIQHEKGISLQIPVFILKGNALADKLATQGSYVVNAGKRTADGSEFEKRTADGSEFESPKKKAKVE

SEQ ID NO: 1341 - protein, 2171 aa, synthetic construct
MPAAKRVKLDGGDKKYSIGLDIGTNSVGWAVITDEYKVPSKKFKVLGNTDRHSIKKNLIGALLFDSGETAEATRLKRTARRRYTRRKNRICYLQEIFSNEMAKVDDSFFHRLEESFLVEEDKKHERHPIFGNIVDEVAYHEKYPTIYHLRKKLVDSTDKADLRLIYLALAHMIKFRGHFLIEGDLNPDNSDVDKLFIQLVQTYNQLFEENPINASGVDAKAILSARLSKSRRLENLIAQLPGEKKNGLFGNLIALSLGLTPNFKSNFDLAEDAKLQLSKDTYDDDLDNLLAQIGDQYADLFLAAKNLSDAILLSDILRVNTEITKAPLSASMIKRYDEHHQDLTLLKALVRQQLPEKYKEIFFDQSKNGYAGYIDGGASQEEFYKFIKPILEKMDGTEELLVKLNREDLLRKQRTFDNGSIPHQIHLGELHAILRRQEDFYPFLKDNREKIEKILTFRIPYYVGPLARGNSRFAWMTRKSEETITPWNFEEVVDKGASAQSFIERMTNFDKNLPNEKVLPKHSLLYEYFTVYNELTKVKYVTEGMRKPAFLSGEQKKAIVDLLFKTNRKVTVKQLKEDYFKKIECFDSVEISGVEDRFNASLGTYHDLLKIIKDKDFLDNEENEDILEDIVLTLTLFEDREMIEERLKTYAHLFDDKVMKQLKRRRYTGWGRLSRKLINGIRDKQSGKTILDFLKSDGFANRNFMQLIHDDSLTFKEDIQKAQVSGQGDSLHEHIANLAGSPAIKKGILQTVKVVDELVKVMGRHKPENIVIEMARENQTTQKGQKNSRERMKRIEEGIKELGSQILKEHPVENTQLQNEKLYLYYLQNGRDMYVDQELDINRLSDYDVDHIVPQSFLKDDSIDNKVLTRSDKARGKSDNVPSEEVVKKMKNYWRQLLNAKLITQRKFDNLTKAERGGLSELDKAGFIKRQLVETRQITKHVAQILDSRMNTKYDENDKLIREVKVITLKSKLVSDFRKDFQFYKVREINNYHHAHDAYLNAVVGTALIKKYPKLESEFVYGDYKVYDVRKMIAKSEQEIGKATAKYFFYSNIMNFFKTEITLANGEIRKRPLIETNGETGEIVWDKGRDFATVRKVLSMPQVNIVKKTEVQTGGFSKESILPKRNSDKLIARKKDWDPKKYGGFDSPTVAYSVLVVAKVEKGKSKKLKSVKELLGITIMERSSFEKNPIDFLEAKGYKEVKKDLIIKLPKYSLFELENGRKRMLASAGELQKGNELALPSKYVNFLYLASHYEKLKGSPEDNEQKQLFVEQHKHYLDEIIEQISEFSKRVILADANLDKVLSAYNKHRDKPIREQAENIIHLFTLTNLGAPAAFKYFDTTIDRKRYTSTKEVLDATLIHQSITGLYETRIDLSQLGGDGGGGGGGSGGMNPLQLLQPLPAEIKGTKLLAHWNSGATITCIPESFLEDEQPIKKTLIKTIHGEKQQNVYYVTFKVKGRKVEAEVIASPYEYILLSPTDVPWLTQQPLQLTILVPLQEYQEKILSKTALPEDQKQQLKTLFVKYDNLWQHWENQVGHRKIRPHNIATGDYPPRPQKQYPINPKAKPSIQIVIDDLLKQGVLTPQNSTMNTPVYPVPKPDGRWRMVLDYREVNKTIPLTAAQNQHSAGILATIVRQKYKTTLDLANGFWAHPITPESYWLTAFTWQGKQYCWTRLPQGFLNSPALFNADVVDLLKEIPNVQVYVDDIYLSHDDPKEHVQQLEKVFQILLQAGYVVSLKKSEIGQKTVEFLGFNITKEGRGLTDTFKTKLLNITPPKDLKQLQSILGLLNFARNFIPNFAELVQPLYNLIAPAKGKYIEWSEENTKQLNMVIEALNTASNLEERLPEQRLVIKVNTSPSAGYVRYYNETGKKPIMYLNYVFSKAELKFSMLEKLLTTMHKALIKAMDLAMGQEILVYSPIVSMTKIQKTPLPERKALPIRWITWMTYLEDPRIQFHYDKTLPELKHIPDVYTSSQSPVKHPSQYEGVFYTDGSAIKSPDPTKSNNAGMGIVHATYKPEYQVLNQWSIPLGNHTAQMAEIAAVEFACKKALKIPGPVLVITDSFYVAESANKELPYWKSNGFVNNKKKPLKHISKWKSIAECLSMKPDITIQHEKGISLQIPVFILKGNALADKLATQGSYVVNAGKRTADGSEFEKRTADGSEFESPKKKAKVE

SEQ ID NO: 1342 - protein, 2176 aa, synthetic construct
MPAAKRVKLDGGDKKYSIGLDIGTNSVGWAVITDEYKVPSKKFKVLGNTDRHSIKKNLIGALLFDSGETAEATRLKRTARRRYTRRKNRICYLQEIFSNEMAKVDDSFFHRLEESFLVEEDKKHERHPIFGNIVDEVAYHEKYPTIYHLRKKLVDSTDKADLRLIYLALAHMIKFRGHFLIEGDLNPDNSDVDKLFIQLVQTYNQLFEENPINASGVDAKAILSARLSKSRRLENLIAQLPGEKKNGLFGNLIALSLGLTPNFKSNFDLAEDAKLQLSKDTYDDDLDNLLAQIGDQYADLFLAAKNLSDAILLSDILRVNTEITKAPLSASMIKRYDEHHQDLTLLKALVRQQLPEKYKEIFFDQSKNGYAGYIDGGASQEEFYKFIKPILEKMDGTEELLVKLNREDLLRKQRTFDNGSIPHQIHLGELHAILRRQEDFYPFLKDNREKIEKILTFRIPYYVGPLARGNSRFAWMTRKSEETITPWNFEEVVDKGASAQSFIERMTNFDKNLPNEKVLPKHSLLYEYFTVYNELTKVKYVTEGMRKPAFLSGEQKKAIVDLLFKTNRKVTVKQLKEDYFKKIECFDSVEISGVEDRFNASLGTYHDLLKIIKDKDFLDNEENEDILEDIVLTLTLFEDREMIEERLKTYAHLFDDKVMKQLKRRRYTGWGRLSRKLINGIRDKQSGKTILDFLKSDGFANRNFMQLIHDDSLTFKEDIQKAQVSGQGDSLHEHIANLAGSPAIKKGILQTVKVVDELVKVMGRHKPENIVIEMARENQTTQKGQKNSRERMKRIEEGIKELGSQILKEHPVENTQLQNEKLYLYYLQNGRDMYVDQELDINRLSDYDVDHIVPQSFLKDDSIDNKVLTRSDKARGKSDNVPSEEVVKKMKNYWRQLLNAKLITQRKFDNLTKAERGGLSELDKAGFIKRQLVETRQITKHVAQILDSRMNTKYDENDKLIREVKVITLKSKLVSDFRKDFQFYKVREINNYHHAHDAYLNAVVGTALIKKYPKLESEFVYGDYKVYDVRKMIAKSEQEIGKATAKYFFYSNIMNFFKTEITLANGEIRKRPLIETNGETGEIVWDKGRDFATVRKVLSMPQVNIVKKTEVQTGGFSKESILPKRNSDKLIARKKDWDPKKYGGFDSPTVAYSVLVVAKVEKGKSKKLKSVKELLGITIMERSSFEKNPIDFLEAKGYKEVKKDLIIKLPKYSLFELENGRKRMLASAGELQKGNELALPSKYVNFLYLASHYEKLKGSPEDNEQKQLFVEQHKHYLDEIIEQISEFSKRVILADANLDKVLSAYNKHRDKPIREQAENIIHLFTLTNLGAPAAFKYFDTTIDRKRYTSTKEVLDATLIHQSITGLYETRIDLSQLGGDGGEAAAKGGGPAPGGMNPLQLLQPLPAEIKGTKLLAHWNSGATITCIPESFLEDEQPIKKTLIKTIHGEKQQNVYYVTFKVKGRKVEAEVIASPYEYILLSPTDVPWLTQQPLQLTILVPLQEYQEKILSKTALPEDQKQQLKTLFVKYDNLWQHWENQVGHRKIRPHNIATGDYPPRPQKQYPINPKAKPSIQIVIDDLLKQGVLTPQNSTMNTPVYPVPKPDGRWRMVLDYREVNKTIPLTAAQNQHSAGILATIVRQKYKTTLDLANGFWAHPITPESYWLTAFTWQGKQYCWTRLPQGFLNSPALFNADVVDLLKEIPNVQVYVDDIYLSHDDPKEHVQQLEKVFQILLQAGYVVSLKKSEIGQKTVEFLGFNITKEGRGLTDTFKTKLLNITPPKDLKQLQSILGLLNFARNFIPNFAELVQPLYNLIAPAKGKYIEWSEENTKQLNMVIEALNTASNLEERLPEQRLVIKVNTSPSAGYVRYYNETGKKPIMYLNYVFSKAELKFSMLEKLLTTMHKALIKAMDLAMGQEILVYSPIVSMTKIQKTPLPERKALPIRWITWMTYLEDPRIQFHYDKTLPELKHIPDVYTSSQSPVKHPSQYEGVFYTDGSAIKSPDPTKSNNAGMGIVHATYKPEYQVLNQWSIPLGNHTAQMAEIAAVEFACKKALKIPGPVLVITDSFYVAESANKELPYWKSNGFVNNKKKPLKHISKWKSIAECLSMKPDITIQHEKGISLQIPVFILKGNALADKLATQGSYVVNAGKRTADGSEFEKRTADGSEFESPKKKAKVE

SEQ ID NO: 1343 - protein, 2171 aa, synthetic construct
MPAAKRVKLDGGDKKYSIGLDIGTNSVGWAVITDEYKVPSKKFKVLGNTDRHSIKKNLIGALLFDSGETAEATRLKRTARRRYTRRKNRICYLQEIFSNEMAKVDDSFFHRLEESFLVEEDKKHERHPIFGNIVDEVAYHEKYPTIYHLRKKLVDSTDKADLRLIYLALAHMIKFRGHFLIEGDLNPDNSDVDKLFIQLVQTYNQLFEENPINASGVDAKAILSARLSKSRRLENLIAQLPGEKKNGLFGNLIALSLGLTPNFKSNFDLAEDAKLQLSKDTYDDDLDNLLAQIGDQYADLFLAAKNLSDAILLSDILRVNTEITKAPLSASMIKRYDEHHQDLTLLKALVRQQLPEKYKEIFFDQSKNGYAGYIDGGASQEEFYKFIKPILEKMDGTEELLVKLNREDLLRKQRTFDNGSIPHQIHLGELHAILRRQEDFYPFLKDNREKIEKILTFRIPYYVGPLARGNSRFAWMTRKSEETITPWNFEEVVDKGASAQSFIERMTNFDKNLPNEKVLPKHSLLYEYFTVYNELTKVKYVTEGMRKPAFLSGEQKKAIVDLLFKTNRKVTVKQLKEDYFKKIECFDSVEISGVEDRFNASLGTYHDLLKIIKDKDFLDNEENEDILEDIVLTLTLFEDREMIEERLKTYAHLFDDKVMKQLKRRRYTGWGRLSRKLINGIRDKQSGKTILDFLKSDGFANRNFMQLIHDDSLTFKEDIQKAQVSGQGDSLHEHIANLAGSPAIKKGILQTVKVVDELVKVMGRHKPENIVIEMARENQTTQKGQKNSRERMKRIEEGIKELGSQILKEHPVENTQLQNEKLYLYYLQNGRDMYVDQELDINRLSDYDVDHIVPQSFLKDDSIDNKVLTRSDKARGKSDNVPSEEVVKKMKNYWRQLLNAKLITQRKFDNLTKAERGGLSELDKAGFIKRQLVETRQITKHVAQILDSRMNTKYDENDKLIREVKVITLKSKLVSDFRKDFQFYKVREINNYHHAHDAYLNAVVGTALIKKYPKLESEFVYGDYKVYDVRKMIAKSEQEIGKATAKYFFYSNIMNFFKTEITLANGEIRKRPLIETNGETGEIVWDKGRDFATVRKVLSMPQVNIVKKTEVQTGGFSKESILPKRNSDKLIARKKDWDPKKYGGFDSPTVAYSVLVVAKVEKGKSKKLKSVKELLGITIMERSSFEKNPIDFLEAKGYKEVKKDLIIKLPKYSLFELENGRKRMLASAGELQKGNELALPSKYVNFLYLASHYEKLKGSPEDNEQKQLFVEQHKHYLDEIIEQISEFSKRVILADANLDKVLSAYNKHRDKPIREQAENIIHLFTLTNLGAPAAFKYFDTTIDRKRYTSTKEVLDATLIHQSITGLYETRIDLSQLGGDGGGGGGSSGGMNPLQLLQPLPAEIKGTKLLAHWNSGATITCIPESFLEDEQPIKKTLIKTIHGEKQQNVYYVTFKVKGRKVEAEVIASPYEYILLSPTDVPWLTQQPLQLTILVPLQEYQEKILSKTALPEDQKQQLKTLFVKYDNLWQHWENQVGHRKIRPHNIATGDYPPRPQKQYPINPKAKPSIQIVIDDLLKQGVLTPQNSTMNTPVYPVPKPDGRWRMVLDYREVNKTIPLTAAQNQHSAGILATIVRQKYKTTLDLANGFWAHPITPESYWLTAFTWQGKQYCWTRLPQGFLNSPALFNADVVDLLKEIPNVQVYVDDIYLSHDDPKEHVQQLEKVFQILLQAGYVVSLKKSEIGQKTVEFLGFNITKEGRGLTDTFKTKLLNITPPKDLKQLQSILGLLNFARNFIPNFAELVQPLYNLIAPAKGKYIEWSEENTKQLNMVIEALNTASNLEERLPEQRLVIKVNTSPSAGYVRYYNETGKKPIMYLNYVFSKAELKFSMLEKLLTTMHKALIKAMDLAMGQEILVYSPIVSMTKIQKTPLPERKALPIRWITWMTYLEDPRIQFHYDKTLPELKHIPDVYTSSQSPVKHPSQYEGVFYTDGSAIKSPDPTKSNNAGMGIVHATYKPEYQVLNQWSIPLGNHTAQMAEIAAVEFACKKALKIPGPVLVITDSFYVAESANKELPYWKSNGFVNNKKKPLKHISKWKSIAECLSMKPDITIQHEKGISLQIPVFILKGNALADKLATQGSYVVNAGKRTADGSEFEKRTADGSEFESPKKKAKVE

SEQ ID NO: 1344 - protein, 2174 aa, synthetic construct
MPAAKRVKLDGGDKKYSIGLDIGTNSVGWAVITDEYKVPSKKFKVLGNTDRHSIKKNLIGALLFDSGETAEATRLKRTARRRYTRRKNRICYLQEIFSNEMAKVDDSFFHRLEESFLVEEDKKHERHPIFGNIVDEVAYHEKYPTIYHLRKKLVDSTDKADLRLIYLALAHMIKFRGHFLIEGDLNPDNSDVDKLFIQLVQTYNQLFEENPINASGVDAKAILSARLSKSRRLENLIAQLPGEKKNGLFGNLIALSLGLTPNFKSNFDLAEDAKLQLSKDTYDDDLDNLLAQIGDQYADLFLAAKNLSDAILLSDILRVNTEITKAPLSASMIKRYDEHHQDLTLLKALVRQQLPEKYKEIFFDQSKNGYAGYIDGGASQEEFYKFIKPILEKMDGTEELLVKLNREDLLRKQRTFDNGSIPHQIHLGELHAILRRQEDFYPFLKDNREKIEKILTFRIPYYVGPLARGNSRFAWMTRKSEETITPWNFEEVVDKGASAQSFIERMTNFDKNLPNEKVLPKHSLLYEYFTVYNELTKVKYVTEGMRKPAFLSGEQKKAIVDLLFKTNRKVTVKQLKEDYFKKIECFDSVEISGVEDRFNASLGTYHDLLKIIKDKDFLDNEENEDILEDIVLTLTLFEDREMIEERLKTYAHLFDDKVMKQLKRRRYTGWGRLSRKLINGIRDKQSGKTILDFLKSDGFANRNFMQLIHDDSLTFKEDIQKAQVSGQGDSLHEHIANLAGSPAIKKGILQTVKVVDELVKVMGRHKPENIVIEMARENQTTQKGQKNSRERMKRIEEGIKELGSQILKEHPVENTQLQNEKLYLYYLQNGRDMYVDQELDINRLSDYDVDHIVPQSFLKDDSIDNKVLTRSDKARGKSDNVPSEEVVKKMKNYWRQLLNAKLITQRKFDNLTKAERGGLSELDKAGFIKRQLVETRQITKHVAQILDSRMNTKYDENDKLIREVKVITLKSKLVSDFRKDFQFYKVREINNYHHAHDAYLNAVVGTALIKKYPKLESEFVYGDYKVYDVRKMIAKSEQEIGKATAKYFFYSNIMNFFKTEITLANGEIRKRPLIETNGETGEIVWDKGRDFATVRKVLSMPQVNIVKKTEVQTGGFSKESILPKRNSDKLIARKKDWDPKKYGGFDSPTVAYSVLVVAKVEKGKSKKLKSVKELLGITIMERSSFEKNPIDFLEAKGYKEVKKDLIIKLPKYSLFELENGRKRMLASAGELQKGNELALPSKYVNFLYLASHYEKLKGSPEDNEQKQLFVEQHKHYLDEIIEQISEFSKRVILADANLDKVLSAYNKHRDKPIREQAENIIHLFTLTNLGAPAAFKYFDTTIDRKRYTSTKEVLDATLIHQSITGLYETRIDLSQLGGDGGGSSGSSGSSGGMNPLQLLQPLPAEIKGTKLLAHWNSGATITCIPESFLEDEQPIKKTLIKTIHGEKQQNVYYVTFKVKGRKVEAEVIASPYEYILLSPTDVPWLTQQPLQLTILVPLQEYQEKILSKTALPEDQKQQLKTLFVKYDNLWQHWENQVGHRKIRPHNIATGDYPPRPQKQYPINPKAKPSIQIVIDDLLKQGVLTPQNSTMNTPVYPVPKPDGRWRMVLDYREVNKTIPLTAAQNQHSAGILATIVRQKYKTTLDLANGFWAHPITPESYWLTAFTWQGKQYCWTRLPQGFLNSPALFNADVVDLLKEIPNVQVYVDDIYLSHDDPKEHVQQLEKVFQILLQAGYVVSLKKSEIGQKTVEFLGFNITKEGRGLTDTFKTKLLNITPPKDLKQLQSILGLLNFARNFIPNFAELVQPLYNLIAPAKGKYIEWSEENTKQLNMVIEALNTASNLEERLPEQRLVIKVNTSPSAGYVRYYNETGKKPIMYLNYVFSKAELKFSMLEKLLTTMHKALIKAMDLAMGQEILVYSPIVSMTKIQKTPLPERKALPIRWITWMTYLEDPRIQFHYDKTLPELKHIPDVYTSSQSPVKHPSQYEGVFYTDGSAIKSPDPTKSNNAGMGIVHATYKPEYQVLNQWSIPLGNHTAQMAEIAAVEFACKKALKIPGPVLVITDSFYVAESANKELPYWKSNGFVNNKKKPLKHISKWKSIAECLSMKPDITIQHEKGISLQIPVFILKGNALADKLATQGSYVVNAGKRTADGSEFEKRTADGSEFESPKKKAKVE

SEQ ID NO: 1345 - protein, 2171 aa, synthetic construct
MPAAKRVKLDGGDKKYSIGLDIGTNSVGWAVITDEYKVPSKKFKVLGNTDRHSIKKNLIGALLFDSGETAEATRLKRTARRRYTRRKNRICYLQEIFSNEMAKVDDSFFHRLEESFLVEEDKKHERHPIFGNIVDEVAYHEKYPTIYHLRKKLVDSTDKADLRLIYLALAHMIKFRGHFLIEGDLNPDNSDVDKLFIQLVQTYNQLFEENPINASGVDAKAILSARLSKSRRLENLIAQLPGEKKNGLFGNLIALSLGLTPNFKSNFDLAEDAKLQLSKDTYDDDLDNLLAQIGDQYADLFLAAKNLSDAILLSDILRVNTEITKAPLSASMIKRYDEHHQDLTLLKALVRQQLPEKYKEIFFDQSKNGYAGYIDGGASQEEFYKFIKPILEKMDGTEELLVKLNREDLLRKQRTFDNGSIPHQIHLGELHAILRRQEDFYPFLKDNREKIEKILTFRIPYYVGPLARGNSRFAWMTRKSEETITPWNFEEVVDKGASAQSFIERMTNFDKNLPNEKVLPKHSLLYEYFTVYNELTKVKYVTEGMRKPAFLSGEQKKAIVDLLFKTNRKVTVKQLKEDYFKKIECFDSVEISGVEDRFNASLGTYHDLLKIIKDKDFLDNEENEDILEDIVLTLTLFEDREMIEERLKTYAHLFDDKVMKQLKRRRYTGWGRLSRKLINGIRDKQSGKTILDFLKSDGFANRNFMQLIHDDSLTFKEDIQKAQVSGQGDSLHEHIANLAGSPAIKKGILQTVKVVDELVKVMGRHKPENIVIEMARENQTTQKGQKNSRERMKRIEEGIKELGSQILKEHPVENTQLQNEKLYLYYLQNGRDMYVDQELDINRLSDYDVDHIVPQSFLKDDSIDNKVLTRSDKARGKSDNVPSEEVVKKMKNYWRQLLNAKLITQRKFDNLTKAERGGLSELDKAGFIKRQLVETRQITKHVAQILDSRMNTKYDENDKLIREVKVITLKSKLVSDFRKDFQFYKVREINNYHHAHDAYLNAVVGTALIKKYPKLESEFVYGDYKVYDVRKMIAKSEQEIGKATAKYFFYSNIMNFFKTEITLANGEIRKRPLIETNGETGEIVWDKGRDFATVRKVLSMPQVNIVKKTEVQTGGFSKESILPKRNSDKLIARKKDWDPKKYGGFDSPTVAYSVLVVAKVEKGKSKKLKSVKELLGITIMERSSFEKNPIDFLEAKGYKEVKKDLIIKLPKYSLFELENGRKRMLASAGELQKGNELALPSKYVNFLYLASHYEKLKGSPEDNEQKQLFVEQHKHYLDEIIEQISEFSKRVILADANLDKVLSAYNKHRDKPIREQAENIIHLFTLTNLGAPAAFKYFDTTIDRKRYTSTKEVLDATLIHQSITGLYETRIDLSQLGGDGGPAPGGGGGMNPLQLLQPLPAEIKGTKLLAHWNSGATITCIPESFLEDEQPIKKTLIKTIHGEKQQNVYYVTFKVKGRKVEAEVIASPYEYILLSPTDVPWLTQQPLQLTILVPLQEYQEKILSKTALPEDQKQQLKTLFVKYDNLWQHWENQVGHRKIRPHNIATGDYPPRPQKQYPINPKAKPSIQIVIDDLLKQGVLTPQNSTMNTPVYPVPKPDGRWRMVLDYREVNKTIPLTAAQNQHSAGILATIVRQKYKTTLDLANGFWAHPITPESYWLTAFTWQGKQYCWTRLPQGFLNSPALFNADVVDLLKEIPNVQVYVDDIYLSHDDPKEHVQQLEKVFQILLQAGYVVSLKKSEIGQKTVEFLGFNITKEGRGLTDTFKTKLLNITPPKDLKQLQSILGLLNFARNFIPNFAELVQPLYNLIAPAKGKYIEWSEENTKQLNMVIEALNTASNLEERLPEQRLVIKVNTSPSAGYVRYYNETGKKPIMYLNYVFSKAELKFSMLEKLLTTMHKALIKAMDLAMGQEILVYSPIVSMTKIQKTPLPERKALPIRWITWMTYLEDPRIQFHYDKTLPELKHIPDVYTSSQSPVKHPSQYEGVFYTDGSAIKSPDPTKSNNAGMGIVHATYKPEYQVLNQWSIPLGNHTAQMAEIAAVEFACKKALKIPGPVLVITDSFYVAESANKELPYWKSNGFVNNKKKPLKHISKWKSIAECLSMKPDITIQHEKGISLQIPVFILKGNALADKLATQGSYVVNAGKRTADGSEFEKRTADGSEFESPKKKAKVE

SEQ ID NO: 1346 - protein, 2195 aa, synthetic construct
MPAAKRVKLDGGDKKYSIGLDIGTNSVGWAVITDEYKVPSKKFKVLGNTDRHSIKKNLIGALLFDSGETAEATRLKRTARRRYTRRKNRICYLQEIFSNEMAKVDDSFFHRLEESFLVEEDKKHERHPIFGNIVDEVAYHEKYPTIYHLRKKLVDSTDKADLRLIYLALAHMIKFRGHFLIEGDLNPDNSDVDKLFIQLVQTYNQLFEENPINASGVDAKAILSARLSKSRRLENLIAQLPGEKKNGLFGNLIALSLGLTPNFKSNFDLAEDAKLQLSKDTYDDDLDNLLAQIGDQYADLFLAAKNLSDAILLSDILRVNTEITKAPLSASMIKRYDEHHQDLTLLKALVRQQLPEKYKEIFFDQSKNGYAGYIDGGASQEEFYKFIKPILEKMDGTEELLVKLNREDLLRKQRTFDNGSIPHQIHLGELHAILRRQEDFYPFLKDNREKIEKILTFRIPYYVGPLARGNSRFAWMTRKSEETITPWNFEEVVDKGASAQSFIERMTNFDKNLPNEKVLPKHSLLYEYFTVYNELTKVKYVTEGMRKPAFLSGEQKKAIVDLLFKTNRKVTVKQLKEDYFKKIECFDSVEISGVEDRFNASLGTYHDLLKIIKDKDFLDNEENEDILEDIVLTLTLFEDREMIEERLKTYAHLFDDKVMKQLKRRRYTGWGRLSRKLINGIRDKQSGKTILDFLKSDGFANRNFMQLIHDDSLTFKEDIQKAQVSGQGDSLHEHIANLAGSPAIKKGILQTVKVVDELVKVMGRHKPENIVIEMARENQTTQKGQKNSRERMKRIEEGIKELGSQILKEHPVENTQLQNEKLYLYYLQNGRDMYVDQELDINRLSDYDVDHIVPQSFLKDDSIDNKVLTRSDKARGKSDNVPSEEVVKKMKNYWRQLLNAKLITQRKFDNLTKAERGGLSELDKAGFIKRQLVETRQITKHVAQILDSRMNTKYDENDKLIREVKVITLKSKLVSDFRKDFQFYKVREINNYHHAHDAYLNAVVGTALIKKYPKLESEFVYGDYKVYDVRKMIAKSEQEIGKATAKYFFYSNIMNFFKTEITLANGEIRKRPLIETNGETGEIVWDKGRDFATVRKVLSMPQVNIVKKTEVQTGGFSKESILPKRNSDKLIARKKDWDPKKYGGFDSPTVAYSVLVVAKVEKGKSKKLKSVKELLGITIMERSSFEKNPIDFLEAKGYKEVKKDLIIKLPKYSLFELENGRKRMLASAGELQKGNELALPSKYVNFLYLASHYEKLKGSPEDNEQKQLFVEQHKHYLDEIIEQISEFSKRVILADANLDKVLSAYNKHRDKPIREQAENIIHLFTLTNLGAPAAFKYFDTTIDRKRYTSTKEVLDATLIHQSITGLYETRIDLSQLGGDGGEAAAKEAAAKEAAAKEAAAKEAAAKEAAAKGGMNPLQLLQPLPAEIKGTKLLAHWNSGATITCIPESFLEDEQPIKKTLIKTIHGEKQQNVYYVTFKVKGRKVEAEVIASPYEYILLSPTDVPWLTQQPLQLTILVPLQEYQEKILSKTALPEDQKQQLKTLFVKYDNLWQHWENQVGHRKIRPHNIATGDYPPRPQKQYPINPKAKPSIQIVIDDLLKQGVLTPQNSTMNTPVYPVPKPDGRWRMVLDYREVNKTIPLTAAQNQHSAGILATIVRQKYKTTLDLANGFWAHPITPESYWLTAFTWQGKQYCWTRLPQGFLNSPALFNADVVDLLKEIPNVQVYVDDIYLSHDDPKEHVQQLEKVFQILLQAGYVVSLKKSEIGQKTVEFLGFNITKEGRGLTDTFKTKLLNITPPKDLKQLQSILGKLNFARNFIPNFAELVQPLYNLIAPAKGKYIEWSEENTKQLNMVIEALNTASNLEERLPEQRLVIKVNTSPSAGYVRYYNETGKKPIMYLNYVFSKAELKFSMLEKLLTTMHKALIKAMDLAMGQEILVYSPIVSMTKIQKTPLPERKALPIRWITWMTYLEDPRIQFHYDKTLPELKHIPDVYTSSQSPVKHPSQYEGVFYTDGSAIKSPDPTKSNNAGMGIVHATYKPEYQVLNQWSIPLGNHTAQMAEIAAVEFACKKALKIPGPVLVITDSFYVAESANKELPYWKSNGFVNNKKKPLKHISKWKSIAECLSMKPDITIQHEKGISLQIPVFILKGNALADKLATQGSYVVNAGKRTADGSEFEKRTADGSEFESPKKKAKVE

SEQ ID NO: 1347 - protein, 2185 aa, synthetic construct
MPAAKRVKLDGGDKKYSIGLDIGTNSVGWAVITDEYKVPSKKFKVLGNTDRHSIKKNLIGALLFDSGETAEATRLKRTARRRYTRRKNRICYLQEIFSNEMAKVDDSFFHRLEESFLVEEDKKHERHPIFGNIVDEVAYHEKYPTIYHLRKKLVDSTDKADLRLIYLALAHMIKFRGHFLIEGDLNPDNSDVDKLFIQLVQTYNQLFEENPINASGVDAKAILSARLSKSRRLENLIAQLPGEKKNGLFGNLIALSLGLTPNFKSNFDLAEDAKLQLSKDTYDDDLDNLLAQIGDQYADLFLAAKNLSDAILLSDILRVNTEITKAPLSASMIKRYDEHHQDLTLLKALVRQQLPEKYKEIFFDQSKNGYAGYIDGGASQEEFYKFIKPILEKMDGTEELLVKLNREDLLRKQRTFDNGSIPHQIHLGELHAILRRQEDFYPFLKDNREKIEKILTFRIPYYVGPLARGNSRFAWMTRKSEETITPWNFEEVVDKGASAQSFIERMTNFDKNLPNEKVLPKHSLLYEYFTVYNELTKVKYVTEGMRKPAFLSGEQKKAIVDLLFKTNRKVTVKQLKEDYFKKIECFDSVEISGVEDRFNASLGTYHDLLKIIKDKDFLDNEENEDILEDIVLTLTLFEDREMIEERLKTYAHLFDDKVMKQLKRRRYTGWGRLSRKLINGIRDKQSGKTILDFLKSDGFANRNFMQLIHDDSLTFKEDIQKAQVSGQGDSLHEHIANLAGSPAIKKGILQTVKVVDELVKVMGRHKPENIVIEMARENQTTQKGQKNSRERMKRIEEGIKELGSQILKEHPVENTQLQNEKLYLYYLQNGRDMYVDQELDINRLSDYDVDHIVPQSFLKDDSIDNKVLTRSDKARGKSDNVPSEEVVKKMKNYWRQLLNAKLITQRKFDNLTKAERGGLSELDKAGFIKRQLVETRQITKHVAQILDSRMNTKYDENDKLIREVKVITLKSKLVSDFRKDFQFYKVREINNYHHAHDAYLNAVVGTALIKKYPKLESEFVYGDYKVYDVRKMIAKSEQEIGKATAKYFFYSNIMNFFKTEITLANGEIRKRPLIETNGETGEIVWDKGRDFATVRKVLSMPQVNIVKKTEVQTGGFSKESILPKRNSDKLIARKKDWDPKKYGGFDSPTVAYSVLVVAKVEKGKSKKLKSVKELLGITIMERSSFEKNPIDFLEAKGYKEVKKDLIIKLPKYSLFELENGRKRMLASAGELQKGNELALPSKYVNFLYLASHYEKLKGSPEDNEQKQLFVEQHKHYLDEIIEQISEFSKRVILADANLDKVLSAYNKHRDKPIREQAENIIHLFTLTNLGAPAAFKYFDTTIDRKRYTSTKEVLDATLIHQSITGLYETRIDLSQLGGDGGEAAAKEAAAKEAAAKEAAAKGGMNPLQLLQPLPAEIKGTKLLAHWNSGATITCIPESFLEDEQPIKKTLIKTIHGEKQQNVYYVTFKVKGRKVEAEVIASPYEYILLSPTDVPWLTQQPLQLTILVPLQEYQEKILSKTALPEDQKQQLKTLFVKYDNLWQHWENQVGHRKIRPHNIATGDYPPRPQKQYPINPKAKPSIQIVIDDLLKQGVLTPQNSTMNTPVYPVPKPDGRWRMVLDYREVNKTIPLTAAQNQHSAGILATIVRQKYKTTLDLANGFWAHPITPESYWLTAFTWQGKQYCWTRLPQGFLNSPALFNADVVDLLKEIPNVQVYVDDIYLSHDDPKEHVQQLEKVFQILLQAGYVVSLKKSEIGQKTVEFLGFNITKEGRGLTDTFKTKLLNITPPKDLKQLQSILGKLNFARNFIPNFAELVQPLYNLIAPAKGKYIEWSEENTKQLNMVIEALNTASNLEERLPEQRLVIKVNTSPSAGYVRYYNETGKKPIMYLNYVFSKAELKFSMLEKLLTTMHKALIKAMDLAMGQEILVYSPIVSMTKIQKTPLPERKALPIRWITWMTYLEDPRIQFHYDKTLPELKHIPDVYTSSQSPVKHPSQYEGVFYTDGSAIKSPDPTKSNNAGMGIVHATYKPEYQVLNQWSIPLGNHTAQMAEIAAVEFACKKALKIPGPVLVITDSFYVAESANKELPYWKSNGFVNNKKKPLKHISKWKSIAECLSMKPDITIQHEKGISLQIPVFILKGNALADKLATQGSYVVNAGKRTADGSEFEKRTADGSEFESPKKKAKVE

SEQ ID NO: 1348 - protein, 2176 aa, synthetic construct
MPAAKRVKLDGGDKKYSIGLDIGTNSVGWAVITDEYKVPSKKFKVLGNTDRHSIKKNLIGALLFDSGETAEATRLKRTARRRYTRRKNRICYLQEIFSNEMAKVDDSFFHRLEESFLVEEDKKHERHPIFGNIVDEVAYHEKYPTIYHLRKKLVDSTDKADLRLIYLALAHMIKFRGHFLIEGDLNPDNSDVDKLFIQLVQTYNQLFEENPINASGVDAKAILSARLSKSRRLENLIAQLPGEKKNGLFGNLIALSLGLTPNFKSNFDLAEDAKLQLSKDTYDDDLDNLLAQIGDQYADLFLAAKNLSDAILLSDILRVNTEITKAPLSASMIKRYDEHHQDLTLLKALVRQQLPEKYKEIFFDQSKNGYAGYIDGGASQEEFYKFIKPILEKMDGTEELLVKLNREDLLRKQRTFDNGSIPHQIHLGELHAILRRQEDFYPFLKDNREKIEKILTFRIPYYVGPLARGNSRFAWMTRKSEETITPWNFEEVVDKGASAQSFIERMTNFDKNLPNEKVLPKHSLLYEYFTVYNELTKVKYVTEGMRKPAFLSGEQKKAIVDLLFKTNRKVTVKQLKEDYFKKIECFDSVEISGVEDRFNASLGTYHDLLKIIKDKDFLDNEENEDILEDIVLTLTLFEDREMIEERLKTYAHLFDDKVMKQLKRRRYTGWGRLSRKLINGIRDKQSGKTILDFLKSDGFANRNFMQLIHDDSLTFKEDIQKAQVSGQGDSLHEHIANLAGSPAIKKGILQTVKVVDELVKVMGRHKPENIVIEMARENQTTQKGQKNSRERMKRIEEGIKELGSQILKEHPVENTQLQNEKLYLYYLQNGRDMYVDQELDINRLSDYDVDHIVPQSFLKDDSIDNKVLTRSDKARGKSDNVPSEEVVKKMKNYWRQLLNAKLITQRKFDNLTKAERGGLSELDKAGFIKRQLVETRQITKHVAQILDSRMNTKYDENDKLIREVKVITLKSKLVSDFRKDFQFYKVREINNYHHAHDAYLNAVVGTALIKKYPKLESEFVYGDYKVYDVRKMIAKSEQEIGKATAKYFFYSNIMNFFKTEITLANGEIRKRPLIETNGETGEIVWDKGRDFATVRKVLSMPQVNIVKKTEVQTGGFSKESILPKRNSDKLIARKKDWDPKKYGGFDSPTVAYSVLVVAKVEKGKSKKLKSVKELLGITIMERSSFEKNPIDFLEAKGYKEVKKDLIIKLPKYSLFELENGRKRMLASAGELQKGNELALPSKYVNFLYLASHYEKLKGSPEDNEQKQLFVEQHKHYLDEIIEQISEFSKRVILADANLDKVLSAYNKHRDKPIREQAENIIHLFTLTNLGAPAAFKYFDTTIDRKRYTSTKEVLDATLIHQSITGLYETRIDLSQLGGDGGGGSPAPEAAAKGGMNPLQLLQPLPAEIKGTKLLAHWNSGATITCIPESFLEDEQPIKKTLIKTIHGEKQQNVYYVTFKVKGRKVEAEVIASPYEYILLSPTDVPWLTQQPLQLTILVPLQEYQEKILSKTALPEDQKQQLKTLFVKYDNLWQHWENQVGHRKIRPHNIATGDYPPRPQKQYPINPKAKPSIQIVIDDLLKQGVLTPQNSTMNTPVYPVPKPDGRWRMVLDYREVNKTIPLTAAQNQHSAGILATIVRQKYKTTLDLANGFWAHPITPESYWLTAFTWQGKQYCWTRLPQGFLNSPALFNADVVDLLKEIPNVQVYVDDIYLSHDDPKEHVQQLEKVFQILLQAGYVVSLKKSEIGQKTVEFLGFNITKEGRGLTDTFKTKLLNITPPKDLKQLQSILGKLNFARNFIPNFAELVQPLYNLIAPAKGKYIEWSEENTKQLNMVIEALNTASNLEERLPEQRLVIKVNTSPSAGYVRYYNETGKKPIMYLNYVFSKAELKFSMLEKLLTTMHKALIKAMDLAMGQEILVYSPIVSMTKIQKTPLPERKALPIRWITWMTYLEDPRIQFHYDKTLPELKHIPDVYTSSQSPVKHPSQYEGVFYTDGSAIKSPDPTKSNNAGMGIVHATYKPEYQVLNQWSIPLGNHTAQMAEIAAVEFACKKALKIPGPVLVITDSFYVAESANKELPYWKSNGFVNNKKKPLKHISKWKSIAECLSMKPDITIQHEKGISLQIPVFILKGNALADKLATQGSYVVNAGKRTADGSEFEKRTADGSEFESPKKKAKVE

SEQ ID NO: 1349 - protein, 2177 aa, synthetic construct
MPAAKRVKLDGGDKKYSIGLDIGTNSVGWAVITDEYKVPSKKFKVLGNTDRHSIKKNLIGALLFDSGETAEATRLKRTARRRYTRRKNRICYLQEIFSNEMAKVDDSFFHRLEESFLVEEDKKHERHPIFGNIVDEVAYHEKYPTIYHLRKKLVDSTDKADLRLIYLALAHMIKFRGHFLIEGDLNPDNSDVDKLFIQLVQTYNQLFEENPINASGVDAKAILSARLSKSRRLENLIAQLPGEKKNGLFGNLIALSLGLTPNFKSNFDLAEDAKLQLSKDTYDDDLDNLLAQIGDQYADLFLAAKNLSDAILLSDILRVNTEITKAPLSASMIKRYDEHHQDLTLLKALVRQQLPEKYKEIFFDQSKNGYAGYIDGGASQEEFYKFIKPILEKMDGTEELLVKLNREDLLRKQRTFDNGSIPHQIHLGELHAILRRQEDFYPFLKDNREKIEKILTFRIPYYVGPLARGNSRFAWMTRKSEETITPWNFEEVVDKGASAQSFIERMTNFDKNLPNEKVLPKHSLLYEYFTVYNELTKVKYVTEGMRKPAFLSGEQKKAIVDLLFKTNRKVTVKQLKEDYFKKIECFDSVEISGVEDRFNASLGTYHDLLKIIKDKDFLDNEENEDILEDIVLTLTLFEDREMIEERLKTYAHLFDDKVMKQLKRRRYTGWGRLSRKLINGIRDKQSGKTILDFLKSDGFANRNFMQLIHDDSLTFKEDIQKAQVSGQGDSLHEHIANLAGSPAIKKGILQTVKVVDELVKVMGRHKPENIVIEMARENQTTQKGQKNSRERMKRIEEGIKELGSQILKEHPVENTQLQNEKLYLYYLQNGRDMYVDQELDINRLSDYDVDHIVPQSFLKDDSIDNKVLTRSDKARGKSDNVPSEEVVKKMKNYWRQLLNAKLITQRKFDNLTKAERGGLSELDKAGFIKRQLVETRQITKHVAQILDSRMNTKYDENDKLIREVKVITLKSKLVSDFRKDFQFYKVREINNYHHAHDAYLNAVVGTALIKKYPKLESEFVYGDYKVYDVRKMIAKSEQEIGKATAKYFFYSNIMNFFKTEITLANGEIRKRPLIETNGETGEIVWDKGRDFATVRKVLSMPQVNIVKKTEVQTGGFSKESILPKRNSDKLIARKKDWDPKKYGGFDSPTVAYSVLVVAKVEKGKSKKLKSVKELLGITIMERSSFEKNPIDFLEAKGYKEVKKDLIIKLPKYSLFELENGRKRMLASAGELQKGNELALPSKYVNFLYLASHYEKLKGSPEDNEQKQLFVEQHKHYLDEIIEQISEFSKRVILADANLDKVLSAYNKHRDKPIREQAENIIHLFTLTNLGAPAAFKYFDTTIDRKRYTSTKEVLDATLIHQSITGLYETRIDLSQLGGDGGGSAGSAAGSGEFGGMNPLQLLQPLPAEIKGTKLLAHWNSGATITCIPESFLEDEQPIKKTLIKTIHGEKQQNVYYVTFKVKGRKVEAEVIASPYEYILLSPTDVPWLTQQPLQLTILVPLQEYQEKILSKTALPEDQKQQLKTLFVKYDNLWQHWENQVGHRKIRPHNIATGDYPPRPQKQYPINPKAKPSIQIVIDDLLKQGVLTPQNSTMNTPVYPVPKPDGRWRMVLDYREVNKTIPLTAAQNQHSAGILATIVRQKYKTTLDLANGFWAHPITPESYWLTAFTWQGKQYCWTRLPQGFLNSPALFNADVVDLLKEIPNVQVYVDDIYLSHDDPKEHVQQLEKVFQILLQAGYVVSLKKSEIGQKTVEFLGFNITKEGRGLTDTFKTKLLNITPPKDLKQLQSILGKLNFARNFIPNFAELVQPLYNLIAPAKGKYIEWSEENTKQLNMVIEALNTASNLEERLPEQRLVIKVNTSPSAGYVRYYNETGKKPIMYLNYVFSKAELKFSMLEKLLTTMHKALIKAMDLAMGQEILVYSPIVSMTKIQKTPLPERKALPIRWITWMTYLEDPRIQFHYDKTLPELKHIPDVYTSSQSPVKHPSQYEGVFYTDGSAIKSPDPTKSNNAGMGIVHATYKPEYQVLNQWSIPLGNHTAQMAEIAAVEFACKKALKIPGPVLVITDSFYVAESANKELPYWKSNGFVNNKKKPLKHISKWKSIAECLSMKPDITIQHEKGISLQIPVFILKGNALADKLATQGSYVVNAGKRTADGSEFEKRTADGSEFESPKKKAKVE

SEQ ID NO: 1350 - protein, 2173 aa, synthetic construct
MPAAKRVKLDGGDKKYSIGLDIGTNSVGWAVITDEYKVPSKKFKVLGNTDRHSIKKNLIGALLFDSGETAEATRLKRTARRRYTRRKNRICYLQEIFSNEMAKVDDSFFHRLEESFLVEEDKKHERHPIFGNIVDEVAYHEKYPTIYHLRKKLVDSTDKADLRLIYLALAHMIKFRGHFLIEGDLNPDNSDVDKLFIQLVQTYNQLFEENPINASGVDAKAILSARLSKSRRLENLIAQLPGEKKNGLFGNLIALSLGLTPNFKSNFDLAEDAKLQLSKDTYDDDLDNLLAQIGDQYADLFLAAKNLSDAILLSDILRVNTEITKAPLSASMIKRYDEHHQDLTLLKALVRQQLPEKYKEIFFDQSKNGYAGYIDGGASQEEFYKFIKPILEKMDGTEELLVKLNREDLLRKQRTFDNGSIPHQIHLGELHAILRRQEDFYPFLKDNREKIEKILTFRIPYYVGPLARGNSRFAWMTRKSEETITPWNFEEVVDKGASAQSFIERMTNFDKNLPNEKVLPKHSLLYEYFTVYNELTKVKYVTEGMRKPAFLSGEQKKAIVDLLFKTNRKVTVKQLKEDYFKKIECFDSVEISGVEDRFNASLGTYHDLLKIIKDKDFLDNEENEDILEDIVLTLTLFEDREMIEERLKTYAHLFDDKVMKQLKRRRYTGWGRLSRKLINGIRDKQSGKTILDFLKSDGFANRNFMQLIHDDSLTFKEDIQKAQVSGQGDSLHEHIANLAGSPAIKKGILQTVKVVDELVKVMGRHKPENIVIEMARENQTTQKGQKNSRERMKRIEEGIKELGSQILKEHPVENTQLQNEKLYLYYLQNGRDMYVDQELDINRLSDYDVDHIVPQSFLKDDSIDNKVLTRSDKARGKSDNVPSEEVVKKMKNYWRQLLNAKLITQRKFDNLTKAERGGLSELDKAGFIKRQLVETRQITKHVAQILDSRMNTKYDENDKLIREVKVITLKSKLVSDFRKDFQFYKVREINNYHHAHDAYLNAVVGTALIKKYPKLESEFVYGDYKVYDVRKMIAKSEQEIGKATAKYFFYSNIMNFFKTEITLANGEIRKRPLIETNGETGEIVWDKGRDFATVRKVLSMPQVNIVKKTEVQTGGFSKESILPKRNSDKLIARKKDWDPKKYGGFDSPTVAYSVLVVAKVEKGKSKKLKSVKELLGITIMERSSFEKNPIDFLEAKGYKEVKKDLIIKLPKYSLFELENGRKRMLASAGELQKGNELALPSKYVNFLYLASHYEKLKGSPEDNEQKQLFVEQHKHYLDEIIEQISEFSKRVILADANLDKVLSAYNKHRDKPIREQAENIIHLFTLTNLGAPAAFKYFDTTIDRKRYTSTKEVLDATLIHQSITGLYETRIDLSQLGGDGGGGGEAAAKGGMNPLQLLQPLPAEIKGTKLLAHWNSGATITCIPESFLEDEQPIKKTLIKTIHGEKQQNVYYVTFKVKGRKVEAEVIASPYEYILLSPTDVPWLTQQPLQLTILVPLQEYQEKILSKTALPEDQKQQLKTLFVKYDNLWQHWENQVGHRKIRPHNIATGDYPPRPQKQYPINPKAKPSIQIVIDDLLKQGVLTPQNSTMNTPVYPVPKPDGRWRMVLDYREVNKTIPLTAAQNQHSAGILATIVRQKYKTTLDLANGFWAHPITPESYWLTAFTWQGKQYCWTRLPQGFLNSPALFNADVVDLLKEIPNVQVYVDDIYLSHDDPKEHVQQLEKVFQILLQAGYVVSLKKSEIGQKTVEFLGFNITKEGRGLTDTFKTKLLNITPPKDLKQLQSILGKLNFARNFIPNFAELVQPLYNLIAPAKGKYIEWSEENTKQLNMVIEALNTASNLEERLPEQRLVIKVNTSPSAGYVRYYNETGKKPIMYLNYVFSKAELKFSMLEKLLTTMHKALIKAMDLAMGQEILVYSPIVSMTKIQKTPLPERKALPIRWITWMTYLEDPRIQFHYDKTLPELKHIPDVYTSSQSPVKHPSQYEGVFYTDGSAIKSPDPTKSNNAGMGIVHATYKPEYQVLNQWSIPLGNHTAQMAEIAAVEFACKKALKIPGPVLVITDSFYVAESANKELPYWKSNGFVNNKKKPLKHISKWKSIAECLSMKPDITIQHEKGISLQIPVFILKGNALADKLATQGSYVVNAGKRTADGSEFEKRTADGSEFESPKKKAKVE

SEQ ID NO: 1351 - protein, 2176 aa, synthetic construct
MPAAKRVKLDGGDKKYSIGLDIGTNSVGWAVITDEYKVPSKKFKVLGNTDRHSIKKNLIGALLFDSGETAEATRLKRTARRRYTRRKNRICYLQEIFSNEMAKVDDSFFHRLEESFLVEEDKKHERHPIFGNIVDEVAYHEKYPTIYHLRKKLVDSTDKADLRLIYLALAHMIKFRGHFLIEGDLNPDNSDVDKLFIQLVQTYNQLFEENPINASGVDAKAILSARLSKSRRLENLIAQLPGEKKNGLFGNLIALSLGLTPNFKSNFDLAEDAKLQLSKDTYDDDLDNLLAQIGDQYADLFLAAKNLSDAILLSDILRVNTEITKAPLSASMIKRYDEHHQDLTLLKALVRQQLPEKYKEIFFDQSKNGYAGYIDGGASQEEFYKFIKPILEKMDGTEELLVKLNREDLLRKQRTFDNGSIPHQIHLGELHAILRRQEDFYPFLKDNREKIEKILTFRIPYYVGPLARGNSRFAWMTRKSEETITPWNFEEVVDKGASAQSFIERMTNFDKNLPNEKVLPKHSLLYEYFTVYNELTKVKYVTEGMRKPAFLSGEQKKAIVDLLFKTNRKVTVKQLKEDYFKKIECFDSVEISGVEDRFNASLGTYHDLLKIIKDKDFLDNEENEDILEDIVLTLTLFEDREMIEERLKTYAHLFDDKVMKQLKRRRYTGWGRLSRKLINGIRDKQSGKTILDFLKSDGFANRNFMQLIHDDSLTFKEDIQKAQVSGQGDSLHEHIANLAGSPAIKKGILQTVKVVDELVKVMGRHKPENIVIEMARENQTTQKGQKNSRERMKRIEEGIKELGSQILKEHPVENTQLQNEKLYLYYLQNGRDMYVDQELDINRLSDYDVDHIVPQSFLKDDSIDNKVLTRSDKARGKSDNVPSEEVVKKMKNYWRQLLNAKLITQRKFDNLTKAERGGLSELDKAGFIKRQLVETRQITKHVAQILDSRMNTKYDENDKLIREVKVITLKSKLVSDFRKDFQFYKVREINNYHHAHDAYLNAVVGTALIKKYPKLESEFVYGDYKVYDVRKMIAKSEQEIGKATAKYFFYSNIMNFFKTEITLANGEIRKRPLIETNGETGEIVWDKGRDFATVRKVLSMPQVNIVKKTEVQTGGFSKESILPKRNSDKLIARKKDWDPKKYGGFDSPTVAYSVLVVAKVEKGKSKKLKSVKELLGITIMERSSFEKNPIDFLEAKGYKEVKKDLIIKLPKYSLFELENGRKRMLASAGELQKGNELALPSKYVNFLYLASHYEKLKGSPEDNEQKQLFVEQHKHYLDEIIEQISEFSKRVILADANLDKVLSAYNKHRDKPIREQAENIIHLFTLTNLGAPAAFKYFDTTIDRKRYTSTKEVLDATLIHQSITGLYETRIDLSQLGGDGGGSSGGSEAAAKGGMNPLQLLQPLPAEIKGTKLLAHWNSGATITCIPESFLEDEQPIKKTLIKTIHGEKQQNVYYVTFKVKGRKVEAEVIASPYEYILLSPTDVPWLTQQPLQLTILVPLQEYQEKILSKTALPEDQKQQLKTLFVKYDNLWQHWENQVGHRKIRPHNIATGDYPPRPQKQYPINPKAKPSIQIVIDDLLKQGVLTPQNSTMNTPVYPVPKPDGRWRMVLDYREVNKTIPLTAAQNQHSAGILATIVRQKYKTTLDLANGFWAHPITPESYWLTAFTWQGKQYCWTRLPQGFLNSPALFNADVVDLLKEIPNVQVYVDDIYLSHDDPKEHVQQLEKVFQILLQAGYVVSLKKSEIGQKTVEFLGFNITKEGRGLTDTFKTKLLNITPPKDLKQLQSILGKLNFARNFIPNFAELVQPLYNLIAPAKGKYIEWSEENTKQLNMVIEALNTASNLEERLPEQRLVIKVNTSPSAGYVRYYNETGKKPIMYLNYVFSKAELKFSMLEKLLTTMHKALIKAMDLAMGQEILVYSPIVSMTKIQKTPLPERKALPIRWITWMTYLEDPRIQFHYDKTLPELKHIPDVYTSSQSPVKHPSQYEGVFYTDGSAIKSPDPTKSNNAGMGIVHATYKPEYQVLNQWSIPLGNHTAQMAEIAAVEFACKKALKIPGPVLVITDSFYVAESANKELPYWKSNGFVNNKKKPLKHISKWKSIAECLSMKPDITIQHEKGISLQIPVFILKGNALADKLATQGSYVVNAGKRTADGSEFEKRTADGSEFESPKKKAKVE

SEQ ID NO: 1352 - protein, 2174 aa, synthetic construct
MPAAKRVKLDGGDKKYSIGLDIGTNSVGWAVITDEYKVPSKKFKVLGNTDRHSIKKNLIGALLFDSGETAEATRLKRTARRRYTRRKNRICYLQEIFSNEMAKVDDSFFHRLEESFLVEEDKKHERHPIFGNIVDEVAYHEKYPTIYHLRKKLVDSTDKADLRLIYLALAHMIKFRGHFLIEGDLNPDNSDVDKLFIQLVQTYNQLFEENPINASGVDAKAILSARLSKSRRLENLIAQLPGEKKNGLFGNLIALSLGLTPNFKSNFDLAEDAKLQLSKDTYDDDLDNLLAQIGDQYADLFLAAKNLSDAILLSDILRVNTEITKAPLSASMIKRYDEHHQDLTLLKALVRQQLPEKYKEIFFDQSKNGYAGYIDGGASQEEFYKFIKPILEKMDGTEELLVKLNREDLLRKQRTFDNGSIPHQIHLGELHAILRRQEDFYPFLKDNREKIEKILTFRIPYYVGPLARGNSRFAWMTRKSEETITPWNFEEVVDKGASAQSFIERMTNFDKNLPNEKVLPKHSLLYEYFTVYNELTKVKYVTEGMRKPAFLSGEQKKAIVDLLFKTNRKVTVKQLKEDYFKKIECFDSVEISGVEDRFNASLGTYHDLLKIIKDKDFLDNEENEDILEDIVLTLTLFEDREMIEERLKTYAHLFDDKVMKQLKRRRYTGWGRLSRKLINGIRDKQSGKTILDFLKSDGFANRNFMQLIHDDSLTFKEDIQKAQVSGQGDSLHEHIANLAGSPAIKKGILQTVKVVDELVKVMGRHKPENIVIEMARENQTTQKGQKNSRERMKRIEEGIKELGSQILKEHPVENTQLQNEKLYLYYLQNGRDMYVDQELDINRLSDYDVDHIVPQSFLKDDSIDNKVLTRSDKARGKSDNVPSEEVVKKMKNYWRQLLNAKLITQRKFDNLTKAERGGLSELDKAGFIKRQLVETRQITKHVAQILDSRMNTKYDENDKLIREVKVITLKSKLVSDFRKDFQFYKVREINNYHHAHDAYLNAVVGTALIKKYPKLESEFVYGDYKVYDVRKMIAKSEQEIGKATAKYFFYSNIMNFFKTEITLANGEIRKRPLIETNGETGEIVWDKGRDFATVRKVLSMPQVNIVKKTEVQTGGFSKESILPKRNSDKLIARKKDWDPKKYGGFDSPTVAYSVLVVAKVEKGKSKKLKSVKELLGITIMERSSFEKNPIDFLEAKGYKEVKKDLIIKLPKYSLFELENGRKRMLASAGELQKGNELALPSKYVNFLYLASHYEKLKGSPEDNEQKQLFVEQHKHYLDEIIEQISEFSKRVILADANLDKVLSAYNKHRDKPIREQAENIIHLFTLTNLGAPAAFKYFDTTIDRKRYTSTKEVLDATLIHQSITGLYETRIDLSQLGGDGGGSSPAPGGSGGMNPLQLLQPLPAEIKGTKLLAHWNSGATITCIPESFLEDEQPIKKTLIKTIHGEKQQNVYYVTFKVKGRKVEAEVIASPYEYILLSPTDVPWLTQQPLQLTILVPLQEYQEKILSKTALPEDQKQQLKTLFVKYDNLWQHWENQVGHRKIRPHNIATGDYPPRPQKQYPINPKAKPSIQIVIDDLLKQGVLTPQNSTMNTPVYPVPKPDGRWRMVLDYREVNKTIPLTAAQNQHSAGILATIVRQKYKTTLDLANGFWAHPITPESYWLTAFTWQGKQYCWTRLPQGFLNSPALFNADVVDLLKEIPNVQVYVDDIYLSHDDPKEHVQQLEKVFQILLQAGYVVSLKKSEIGQKTVEFLGFNITKEGRGLTDTFKTKLLNITPPKDLKQLQSILGKLNFARNFIPNFAELVQPLYNLIAPAKGKYIEWSEENTKQLNMVIEALNTASNLEERLPEQRLVIKVNTSPSAGYVRYYNETGKKPIMYLNYVFSKAELKFSMLEKLLTTMHKALIKAMDLAMGQEILVYSPIVSMTKIQKTPLPERKALPIRWITWMTYLEDPRIQFHYDKTLPELKHIPDVYTSSQSPVKHPSQYEGVFYTDGSAIKSPDPTKSNNAGMGIVHATYKPEYQVLNQWSIPLGNHTAQMAEIAAVEFACKKALKIPGPVLVITDSFYVAESANKELPYWKSNGFVNNKKKPLKHISKWKSIAECLSMKPDITIQHEKGISLQIPVFILKGNALADKLATQGSYVVNAGKRTADGSEFEKRTADGSEFESPKKKAKVE

SEQ ID NO: 1353 - protein, 2176 aa, synthetic construct
MPAAKRVKLDGGDKKYSIGLDIGTNSVGWAVITDEYKVPSKKFKVLGNTDRHSIKKNLIGALLFDSGETAEATRLKRTARRRYTRRKNRICYLQEIFSNEMAKVDDSFFHRLEESFLVEEDKKHERHPIFGNIVDEVAYHEKYPTIYHLRKKLVDSTDKADLRLIYLALAHMIKFRGHFLIEGDLNPDNSDVDKLFIQLVQTYNQLFEENPINASGVDAKAILSARLSKSRRLENLIAQLPGEKKNGLFGNLIALSLGLTPNFKSNFDLAEDAKLQLSKDTYDDDLDNLLAQIGDQYADLFLAAKNLSDAILLSDILRVNTEITKAPLSASMIKRYDEHHQDLTLLKALVRQQLPEKYKEIFFDQSKNGYAGYIDGGASQEEFYKFIKPILEKMDGTEELLVKLNREDLLRKQRTFDNGSIPHQIHLGELHAILRRQEDFYPFLKDNREKIEKILTFRIPYYVGPLARGNSRFAWMTRKSEETITPWNFEEVVDKGASAQSFIERMTNFDKNLPNEKVLPKHSLLYEYFTVYNELTKVKYVTEGMRKPAFLSGEQKKAIVDLLFKTNRKVTVKQLKEDYFKKIECFDSVEISGVEDRFNASLGTYHDLLKIIKDKDFLDNEENEDILEDIVLTLTLFEDREMIEERLKTYAHLFDDKVMKQLKRRRYTGWGRLSRKLINGIRDKQSGKTILDFLKSDGFANRNFMQLIHDDSLTFKEDIQKAQVSGQGDSLHEHIANLAGSPAIKKGILQTVKVVDELVKVMGRHKPENIVIEMARENQTTQKGQKNSRERMKRIEEGIKELGSQILKEHPVENTQLQNEKLYLYYLQNGRDMYVDQELDINRLSDYDVDHIVPQSFLKDDSIDNKVLTRSDKARGKSDNVPSEEVVKKMKNYWRQLLNAKLITQRKFDNLTKAERGGLSELDKAGFIKRQLVETRQITKHVAQILDSRMNTKYDENDKLIREVKVITLKSKLVSDFRKDFQFYKVREINNYHHAHDAYLNAVVGTALIKKYPKLESEFVYGDYKVYDVRKMIAKSEQEIGKATAKYFFYSNIMNFFKTEITLANGEIRKRPLIETNGETGEIVWDKGRDFATVRKVLSMPQVNIVKKTEVQTGGFSKESILPKRNSDKLIARKKDWDPKKYGGFDSPTVAYSVLVVAKVEKGKSKKLKSVKELLGITIMERSSFEKNPIDFLEAKGYKEVKKDLIIKLPKYSLFELENGRKRMLASAGELQKGNELALPSKYVNFLYLASHYEKLKGSPEDNEQKQLFVEQHKHYLDEIIEQISEFSKRVILADANLDKVLSAYNKHRDKPIREQAENIIHLFTLTNLGAPAAFKYFDTTIDRKRYTSTKEVLDATLIHQSITGLYETRIDLSQLGGDGGGSSPAPEAAAKGGMNPLQLLQPLPAEIKGTKLLAHWNSGATITCIPESFLEDEQPIKKTLIKTIHGEKQQNVYYVTFKVKGRKVEAEVIASPYEYILLSPTDVPWLTQQPLQLTILVPLQEYQEKILSKTALPEDQKQQLKTLFVKYDNLWQHWENQVGHRKIRPHNIATGDYPPRPQKQYPINPKAKPSIQIVIDDLLKQGVLTPQNSTMNTPVYPVPKPDGRWRMVLDYREVNKTIPLTAAQNQHSAGILATIVRQKYKTTLDLANGFWAHPITPESYWLTAFTWQGKQYCWTRLPQGFLNSPALFNADVVDLLKEIPNVQVYVDDIYLSHDDPKEHVQQLEKVFQILLQAGYVVSLKKSEIGQKTVEFLGFNITKEGRGLTDTFKTKLLNITPPKDLKQLQSILGKLNFARNFIPNFAELVQPLYNLIAPAKGKYIEWSEENTKQLNMVIEALNTASNLEERLPEQRLVIKVNTSPSAGYVRYYNETGKKPIMYLNYVFSKAELKFSMLEKLLTTMHKALIKAMDLAMGQEILVYSPIVSMTKIQKTPLPERKALPIRWITWMTYLEDPRIQFHYDKTLPELKHIPDVYTSSQSPVKHPSQYEGVFYTDGSAIKSPDPTKSNNAGMGIVHATYKPEYQVLNQWSIPLGNHTAQMAEIAAVEFACKKALKIPGPVLVITDSFYVAESANKELPYWKSNGFVNNKKKPLKHISKWKSIAECLSMKPDITIQHEKGISLQIPVFILKGNALADKLATQGSYVVNAGKRTADGSEFEKRTADGSEFESPKKKAKVE

SEQ ID NO: 1354 - protein, 2174 aa, synthetic construct
MPAAKRVKLDGGDKKYSIGLDIGTNSVGWAVITDEYKVPSKKFKVLGNTDRHSIKKNLIGALLFDSGETAEATRLKRTARRRYTRRKNRICYLQEIFSNEMAKVDDSFFHRLEESFLVEEDKKHERHPIFGNIVDEVAYHEKYPTIYHLRKKLVDSTDKADLRLIYLALAHMIKFRGHFLIEGDLNPDNSDVDKLFIQLVQTYNQLFEENPINASGVDAKAILSARLSKSRRLENLIAQLPGEKKNGLFGNLIALSLGLTPNFKSNFDLAEDAKLQLSKDTYDDDLDNLLAQIGDQYADLFLAAKNLSDAILLSDILRVNTEITKAPLSASMIKRYDEHHQDLTLLKALVRQQLPEKYKEIFFDQSKNGYAGYIDGGASQEEFYKFIKPILEKMDGTEELLVKLNREDLLRKQRTFDNGSIPHQIHLGELHAILRRQEDFYPFLKDNREKIEKILTFRIPYYVGPLARGNSRFAWMTRKSEETITPWNFEEVVDKGASAQSFIERMTNFDKNLPNEKVLPKHSLLYEYFTVYNELTKVKYVTEGMRKPAFLSGEQKKAIVDLLFKTNRKVTVKQLKEDYFKKIECFDSVEISGVEDRFNASLGTYHDLLKIIKDKDFLDNEENEDILEDIVLTLTLFEDREMIEERLKTYAHLFDDKVMKQLKRRRYTGWGRLSRKLINGIRDKQSGKTILDFLKSDGFANRNFMQLIHDDSLTFKEDIQKAQVSGQGDSLHEHIANLAGSPAIKKGILQTVKVVDELVKVMGRHKPENIVIEMARENQTTQKGQKNSRERMKRIEEGIKELGSQILKEHPVENTQLQNEKLYLYYLQNGRDMYVDQELDINRLSDYDVDHIVPQSFLKDDSIDNKVLTRSDKARGKSDNVPSEEVVKKMKNYWRQLLNAKLITQRKFDNLTKAERGGLSELDKAGFIKRQLVETRQITKHVAQILDSRMNTKYDENDKLIREVKVITLKSKLVSDFRKDFQFYKVREINNYHHAHDAYLNAVVGTALIKKYPKLESEFVYGDYKVYDVRKMIAKSEQEIGKATAKYFFYSNIMNFFKTEITLANGEIRKRPLIETNGETGEIVWDKGRDFATVRKVLSMPQVNIVKKTEVQTGGFSKESILPKRNSDKLIARKKDWDPKKYGGFDSPTVAYSVLVVAKVEKGKSKKLKSVKELLGITIMERSSFEKNPIDFLEAKGYKEVKKDLIIKLPKYSLFELENGRKRMLASAGELQKGNELALPSKYVNFLYLASHYEKLKGSPEDNEQKQLFVEQHKHYLDEIIEQISEFSKRVILADANLDKVLSAYNKHRDKPIREQAENIIHLFTLTNLGAPAAFKYFDTTIDRKRYTSTKEVLDATLIHQSITGLYETRIDLSQLGGDGGGGSGGGPAPGGMNPLQLLQPLPAEIKGTKLLAHWNSGATITCIPESFLEDEQPIKKTLIKTIHGEKQQNVYYVTFKVKGRKVEAEVIASPYEYILLSPTDVPWLTQQPLQLTILVPLQEYQEKILSKTALPEDQKQQLKTLFVKYDNLWQHWENQVGHRKIRPHNIATGDYPPRPQKQYPINPKAKPSIQIVIDDLLKQGVLTPQNSTMNTPVYPVPKPDGRWRMVLDYREVNKTIPLTAAQNQHSAGILATIVRQKYKTTLDLANGFWAHPITPESYWLTAFTWQGKQYCWTRLPQGFLNSPALFNADVVDLLKEIPNVQVYVDDIYLSHDDPKEHVQQLEKVFQILLQAGYVVSLKKSEIGQKTVEFLGFNITKEGRGLTDTFKTKLLNITPPKDLKQLQSILGKLNFARNFIPNFAELVQPLYNLIAPAKGKYIEWSEENTKQLNMVIEALNTASNLEERLPEQRLVIKVNTSPSAGYVRYYNETGKKPIMYLNYVFSKAELKFSMLEKLLTTMHKALIKAMDLAMGQEILVYSPIVSMTKIQKTPLPERKALPIRWITWMTYLEDPRIQFHYDKTLPELKHIPDVYTSSQSPVKHPSQYEGVFYTDGSAIKSPDPTKSNNAGMGIVHATYKPEYQVLNQWSIPLGNHTAQMAEIAAVEFACKKALKIPGPVLVITDSFYVAESANKELPYWKSNGFVNNKKKPLKHISKWKSIAECLSMKPDITIQHEKGISLQIPVFILKGNALADKLATQGSYVVNAGKRTADGSEFEKRTADGSEFESPKKKAKVE

SEQ ID NO: 1355 - protein, 2176 aa, synthetic construct
MPAAKRVKLDGGDKKYSIGLDIGTNSVGWAVITDEYKVPSKKFKVLGNTDRHSIKKNLIGALLFDSGETAEATRLKRTARRRYTRRKNRICYLQEIFSNEMAKVDDSFFHRLEESFLVEEDKKHERHPIFGNIVDEVAYHEKYPTIYHLRKKLVDSTDKADLRLIYLALAHMIKFRGHFLIEGDLNPDNSDVDKLFIQLVQTYNQLFEENPINASGVDAKAILSARLSKSRRLENLIAQLPGEKKNGLFGNLIALSLGLTPNFKSNFDLAEDAKLQLSKDTYDDDLDNLLAQIGDQYADLFLAAKNLSDAILLSDILRVNTEITKAPLSASMIKRYDEHHQDLTLLKALVRQQLPEKYKEIFFDQSKNGYAGYIDGGASQEEFYKFIKPILEKMDGTEELLVKLNREDLLRKQRTFDNGSIPHQIHLGELHAILRRQEDFYPFLKDNREKIEKILTFRIPYYVGPLARGNSRFAWMTRKSEETITPWNFEEVVDKGASAQSFIERMTNFDKNLPNEKVLPKHSLLYEYFTVYNELTKVKYVTEGMRKPAFLSGEQKKAIVDLLFKTNRKVTVKQLKEDYFKKIECFDSVEISGVEDRFNASLGTYHDLLKIIKDKDFLDNEENEDILEDIVLTLTLFEDREMIEERLKTYAHLFDDKVMKQLKRRRYTGWGRLSRKLINGIRDKQSGKTILDFLKSDGFANRNFMQLIHDDSLTFKEDIQKAQVSGQGDSLHEHIANLAGSPAIKKGILQTVKVVDELVKVMGRHKPENIVIEMARENQTTQKGQKNSRERMKRIEEGIKELGSQILKEHPVENTQLQNEKLYLYYLQNGRDMYVDQELDINRLSDYDVDHIVPQSFLKDDSIDNKVLTRSDKARGKSDNVPSEEVVKKMKNYWRQLLNAKLITQRKFDNLTKAERGGLSELDKAGFIKRQLVETRQITKHVAQILDSRMNTKYDENDKLIREVKVITLKSKLVSDFRKDFQFYKVREINNYHHAHDAYLNAVVGTALIKKYPKLESEFVYGDYKVYDVRKMIAKSEQEIGKATAKYFFYSNIMNFFKTEITLANGEIRKRPLIETNGETGEIVWDKGRDFATVRKVLSMPQVNIVKKTEVQTGGFSKESILPKRNSDKLIARKKDWDPKKYGGFDSPTVAYSVLVVAKVEKGKSKKLKSVKELLGITIMERSSFEKNPIDFLEAKGYKEVKKDLIIKLPKYSLFELENGRKRMLASAGELQKGNELALPSKYVNFLYLASHYEKLKGSPEDNEQKQLFVEQHKHYLDEIIEQISEFSKRVILADANLDKVLSAYNKHRDKPIREQAENIIHLFTLTNLGAPAAFKYFDTTIDRKRYTSTKEVLDATLIHQSITGLYETRIDLSQLGGDGGEAAAKGSSGGSGGMNPLQLLQPLPAEIKGTKLLAHWNSGATITCIPESFLEDEQPIKKTLIKTIHGEKQQNVYYVTFKVKGRKVEAEVIASPYEYILLSPTDVPWLTQQPLQLTILVPLQEYQEKILSKTALPEDQKQQLKTLFVKYDNLWQHWENQVGHRKIRPHNIATGDYPPRPQKQYPINPKAKPSIQIVIDDLLKQGVLTPQNSTMNTPVYPVPKPDGRWRMVLDYREVNKTIPLTAAQNQHSAGILATIVRQKYKTTLDLANGFWAHPITPESYWLTAFTWQGKQYCWTRLPQGFLNSPALFNADVVDLLKEIPNVQVYVDDIYLSHDDPKEHVQQLEKVFQILLQAGYVVSLKKSEIGQKTVEFLGFNITKEGRGLTDTFKTKLLNITPPKDLKQLQSILGKLNFARNFIPNFAELVQPLYNLIAPAKGKYIEWSEENTKQLNMVIEALNTASNLEERLPEQRLVIKVNTSPSAGYVRYYNETGKKPIMYLNYVFSKAELKFSMLEKLLTTMHKALIKAMDLAMGQEILVYSPIVSMTKIQKTPLPERKALPIRWITWMTYLEDPRIQFHYDKTLPELKHIPDVYTSSQSPVKHPSQYEGVFYTDGSAIKSPDPTKSNNAGMGIVHATYKPEYQVLNQWSIPLGNHTAQMAEIAAVEFACKKALKIPGPVLVITDSFYVAESANKELPYWKSNGFVNNKKKPLKHISKWKSIAECLSMKPDITIQHEKGISLQIPVFILKGNALADKLATQGSYVVNAGKRTADGSEFEKRTADGSEFESPKKKAKVE

SEQ ID NO: 1356 - protein, 2172 aa, synthetic construct
MPAAKRVKLDGGDKKYSIGLDIGTNSVGWAVITDEYKVPSKKFKVLGNTDRHSIKKNLIGALLFDSGETAEATRLKRTARRRYTRRKNRICYLQEIFSNEMAKVDDSFFHRLEESFLVEEDKKHERHPIFGNIVDEVAYHEKYPTIYHLRKKLVDSTDKADLRLIYLALAHMIKFRGHFLIEGDLNPDNSDVDKLFIQLVQTYNQLFEENPINASGVDAKAILSARLSKSRRLENLIAQLPGEKKNGLFGNLIALSLGLTPNFKSNFDLAEDAKLQLSKDTYDDDLDNLLAQIGDQYADLFLAAKNLSDAILLSDILRVNTEITKAPLSASMIKRYDEHHQDLTLLKALVRQQLPEKYKEIFFDQSKNGYAGYIDGGASQEEFYKFIKPILEKMDGTEELLVKLNREDLLRKQRTFDNGSIPHQIHLGELHAILRRQEDFYPFLKDNREKIEKILTFRIPYYVGPLARGNSRFAWMTRKSEETITPWNFEEVVDKGASAQSFIERMTNFDKNLPNEKVLPKHSLLYEYFTVYNELTKVKYVTEGMRKPAFLSGEQKKAIVDLLFKTNRKVTVKQLKEDYFKKIECFDSVEISGVEDRFNASLGTYHDLLKIIKDKDFLDNEENEDILEDIVLTLTLFEDREMIEERLKTYAHLFDDKVMKQLKRRRYTGWGRLSRKLINGIRDKQSGKTILDFLKSDGFANRNFMQLIHDDSLTFKEDIQKAQVSGQGDSLHEHIANLAGSPAIKKGILQTVKVVDELVKVMGRHKPENIVIEMARENQTTQKGQKNSRERMKRIEEGIKELGSQILKEHPVENTQLQNEKLYLYYLQNGRDMYVDQELDINRLSDYDVDHIVPQSFLKDDSIDNKVLTRSDKARGKSDNVPSEEVVKKMKNYWRQLLNAKLITQRKFDNLTKAERGGLSELDKAGFIKRQLVETRQITKHVAQILDSRMNTKYDENDKLIREVKVITLKSKLVSDFRKDFQFYKVREINNYHHAHDAYLNAVVGTALIKKYPKLESEFVYGDYKVYDVRKMIAKSEQEIGKATAKYFFYSNIMNFFKTEITLANGEIRKRPLIETNGETGEIVWDKGRDFATVRKVLSMPQVNIVKKTEVQTGGFSKESILPKRNSDKLIARKKDWDPKKYGGFDSPTVAYSVLVVAKVEKGKSKKLKSVKELLGITIMERSSFEKNPIDFLEAKGYKEVKKDLIIKLPKYSLFELENGRKRMLASAGELQKGNELALPSKYVNFLYLASHYEKLKGSPEDNEQKQLFVEQHKHYLDEIIEQISEFSKRVILADANLDKVLSAYNKHRDKPIREQAENIIHLFTLTNLGAPAAFKYFDTTIDRKRYTSTKEVLDATLIHQSITGLYETRIDLSQLGGDGGGGGGGGGGGMNPLQLLQPLPAEIKGTKLLAHWNSGATITCIPESFLEDEQPIKKTLIKTIHGEKQQNVYYVTFKVKGRKVEAEVIASPYEYILLSPTDVPWLTQQPLQLTILVPLQEYQEKILSKTALPEDQKQQLKTLFVKYDNLWQHWENQVGHRKIRPHNIATGDYPPRPQKQYPINPKAKPSIQIVIDDLLKQGVLTPQNSTMNTPVYPVPKPDGRWRMVLDYREVNKTIPLTAAQNQHSAGILATIVRQKYKTTLDLANGFWAHPITPESYWLTAFTWQGKQYCWTRLPQGFLNSPALFNADVVDLLKEIPNVQVYVDDIYLSHDDPKEHVQQLEKVFQILLQAGYVVSLKKSEIGQKTVEFLGFNITKEGRGLTDTFKTKLLNITPPKDLKQLQSILGKLNFARNFIPNFAELVQPLYNLIAPAKGKYIEWSEENTKQLNMVIEALNTASNLEERLPEQRLVIKVNTSPSAGYVRYYNETGKKPIMYLNYVFSKAELKFSMLEKLLTTMHKALIKAMDLAMGQEILVYSPIVSMTKIQKTPLPERKALPIRWITWMTYLEDPRIQFHYDKTLPELKHIPDVYTSSQSPVKHPSQYEGVFYTDGSAIKSPDPTKSNNAGMGIVHATYKPEYQVLNQWSIPLGNHTAQMAEIAAVEFACKKALKIPGPVLVITDSFYVAESANKELPYWKSNGFVNNKKKPLKHISKWKSIAECLSMKPDITIQHEKGISLQIPVFILKGNALADKLATQGSYVVNAGKRTADGSEFEKRTADGSEFESPKKKAKVE

SEQ ID NO: 1357 - protein, 2176 aa, synthetic construct
MPAAKRVKLDGGDKKYSIGLDIGTNSVGWAVITDEYKVPSKKFKVLGNTDRHSIKKNLIGALLFDSGETAEATRLKRTARRRYTRRKNRICYLQEIFSNEMAKVDDSFFHRLEESFLVEEDKKHERHPIFGNIVDEVAYHEKYPTIYHLRKKLVDSTDKADLRLIYLALAHMIKFRGHFLIEGDLNPDNSDVDKLFIQLVQTYNQLFEENPINASGVDAKAILSARLSKSRRLENLIAQLPGEKKNGLFGNLIALSLGLTPNFKSNFDLAEDAKLQLSKDTYDDDLDNLLAQIGDQYADLFLAAKNLSDAILLSDILRVNTEITKAPLSASMIKRYDEHHQDLTLLKALVRQQLPEKYKEIFFDQSKNGYAGYIDGGASQEEFYKFIKPILEKMDGTEELLVKLNREDLLRKQRTFDNGSIPHQIHLGELHAILRRQEDFYPFLKDNREKIEKILTFRIPYYVGPLARGNSRFAWMTRKSEETITPWNFEEVVDKGASAQSFIERMTNFDKNLPNEKVLPKHSLLYEYFTVYNELTKVKYVTEGMRKPAFLSGEQKKAIVDLLFKTNRKVTVKQLKEDYFKKIECFDSVEISGVEDRFNASLGTYHDLLKIIKDKDFLDNEENEDILEDIVLTLTLFEDREMIEERLKTYAHLFDDKVMKQLKRRRYTGWGRLSRKLINGIRDKQSGKTILDFLKSDGFANRNFMQLIHDDSLTFKEDIQKAQVSGQGDSLHEHIANLAGSPAIKKGILQTVKVVDELVKVMGRHKPENIVIEMARENQTTQKGQKNSRERMKRIEEGIKELGSQILKEHPVENTQLQNEKLYLYYLQNGRDMYVDQELDINRLSDYDVDHIVPQSFLKDDSIDNKVLTRSDKARGKSDNVPSEEVVKKMKNYWRQLLNAKLITQRKFDNLTKAERGGLSELDKAGFIKRQLVETRQITKHVAQILDSRMNTKYDENDKLIREVKVITLKSKLVSDFRKDFQFYKVREINNYHHAHDAYLNAVVGTALIKKYPKLESEFVYGDYKVYDVRKMIAKSEQEIGKATAKYFFYSNIMNFFKTEITLANGEIRKRPLIETNGETGEIVWDKGRDFATVRKVLSMPQVNIVKKTEVQTGGFSKESILPKRNSDKLIARKKDWDPKKYGGFDSPTVAYSVLVVAKVEKGKSKKLKSVKELLGITIMERSSFEKNPIDFLEAKGYKEVKKDLIIKLPKYSLFELENGRKRMLASAGELQKGNELALPSKYVNFLYLASHYEKLKGSPEDNEQKQLFVEQHKHYLDEIIEQISEFSKRVILADANLDKVLSAYNKHRDKPIREQAENIIHLFTLTNLGAPAAFKYFDTTIDRKRYTSTKEVLDATLIHQSITGLYETRIDLSQLGGDGGGSSEAAAKGGSGGMNPLQLLQPLPAEIKGTKLLAHWNSGATITCIPESFLEDEQPIKKTLIKTIHGEKQQNVYYVTFKVKGRKVEAEVIASPYEYILLSPTDVPWLTQQPLQLTILVPLQEYQEKILSKTALPEDQKQQLKTLFVKYDNLWQHWENQVGHRKIRPHNIATGDYPPRPQKQYPINPKAKPSIQIVIDDLLKQGVLTPQNSTMNTPVYPVPKPDGRWRMVLDYREVNKTIPLTAAQNQHSAGILATIVRQKYKTTLDLANGFWAHPITPESYWLTAFTWQGKQYCWTRLPQGFLNSPALFNADVVDLLKEIPNVQVYVDDIYLSHDDPKEHVQQLEKVFQILLQAGYVVSLKKSEIGQKTVEFLGFNITKEGRGLTDTFKTKLLNITPPKDLKQLQSILGKLNFARNFIPNFAELVQPLYNLIAPAKGKYIEWSEENTKQLNMVIEALNTASNLEERLPEQRLVIKVNTSPSAGYVRYYNETGKKPIMYLNYVFSKAELKFSMLEKLLTTMHKALIKAMDLAMGQEILVYSPIVSMTKIQKTPLPERKALPIRWITWMTYLEDPRIQFHYDKTLPELKHIPDVYTSSQSPVKHPSQYEGVFYTDGSAIKSPDPTKSNNAGMGIVHATYKPEYQVLNQWSIPLGNHTAQMAEIAAVEFACKKALKIPGPVLVITDSFYVAESANKELPYWKSNGFVNNKKKPLKHISKWKSIAECLSMKPDITIQHEKGISLQIPVFILKGNALADKLATQGSYVVNAGKRTADGSEFEKRTADGSEFESPKKKAKVE

SEQ ID NO: 1358 - protein, 2171 aa, synthetic construct
MPAAKRVKLDGGDKKYSIGLDIGTNSVGWAVITDEYKVPSKKFKVLGNTDRHSIKKNLIGALLFDSGETAEATRLKRTARRRYTRRKNRICYLQEIFSNEMAKVDDSFFHRLEESFLVEEDKKHERHPIFGNIVDEVAYHEKYPTIYHLRKKLVDSTDKADLRLIYLALAHMIKFRGHFLIEGDLNPDNSDVDKLFIQLVQTYNQLFEENPINASGVDAKAILSARLSKSRRLENLIAQLPGEKKNGLFGNLIALSLGLTPNFKSNFDLAEDAKLQLSKDTYDDDLDNLLAQIGDQYADLFLAAKNLSDAILLSDILRVNTEITKAPLSASMIKRYDEHHQDLTLLKALVRQQLPEKYKEIFFDQSKNGYAGYIDGGASQEEFYKFIKPILEKMDGTEELLVKLNREDLLRKQRTFDNGSIPHQIHLGELHAILRRQEDFYPFLKDNREKIEKILTFRIPYYVGPLARGNSRFAWMTRKSEETITPWNFEEVVDKGASAQSFIERMTNFDKNLPNEKVLPKHSLLYEYFTVYNELTKVKYVTEGMRKPAFLSGEQKKAIVDLLFKTNRKVTVKQLKEDYFKKIECFDSVEISGVEDRFNASLGTYHDLLKIIKDKDFLDNEENEDILEDIVLTLTLFEDREMIEERLKTYAHLFDDKVMKQLKRRRYTGWGRLSRKLINGIRDKQSGKTILDFLKSDGFANRNFMQLIHDDSLTFKEDIQKAQVSGQGDSLHEHIANLAGSPAIKKGILQTVKVVDELVKVMGRHKPENIVIEMARENQTTQKGQKNSRERMKRIEEGIKELGSQILKEHPVENTQLQNEKLYLYYLQNGRDMYVDQELDINRLSDYDVDHIVPQSFLKDDSIDNKVLTRSDKARGKSDNVPSEEVVKKMKNYWRQLLNAKLITQRKFDNLTKAERGGLSELDKAGFIKRQLVETRQITKHVAQILDSRMNTKYDENDKLIREVKVITLKSKLVSDFRKDFQFYKVREINNYHHAHDAYLNAVVGTALIKKYPKLESEFVYGDYKVYDVRKMIAKSEQEIGKATAKYFFYSNIMNFFKTEITLANGEIRKRPLIETNGETGEIVWDKGRDFATVRKVLSMPQVNIVKKTEVQTGGFSKESILPKRNSDKLIARKKDWDPKKYGGFDSPTVAYSVLVVAKVEKGKSKKLKSVKELLGITIMERSSFEKNPIDFLEAKGYKEVKKDLIIKLPKYSLFELENGRKRMLASAGELQKGNELALPSKYVNFLYLASHYEKLKGSPEDNEQKQLFVEQHKHYLDEIIEQISEFSKRVILADANLDKVLSAYNKHRDKPIREQAENIIHLFTLTNLGAPAAFKYFDTTIDRKRYTSTKEVLDATLIHQSITGLYETRIDLSQLGGDGGPAPGSSGGMNPLQLLQPLPAEIKGTKLLAHWNSGATITCIPESFLEDEQPIKKTLIKTIHGEKQQNVYYVTFKVKGRKVEAEVIASPYEYILLSPTDVPWLTQQPLQLTILVPLQEYQEKILSKTALPEDQKQQLKTLFVKYDNLWQHWENQVGHRKIRPHNIATGDYPPRPQKQYPINPKAKPSIQIVIDDLLKQGVLTPQNSTMNTPVYPVPKPDGRWRMVLDYREVNKTIPLTAAQNQHSAGILATIVRQKYKTTLDLANGFWAHPITPESYWLTAFTWQGKQYCWTRLPQGFLNSPALFNADVVDLLKEIPNVQVYVDDIYLSHDDPKEHVQQLEKVFQILLQAGYVVSLKKSEIGQKTVEFLGFNITKEGRGLTDTFKTKLLNITPPKDLKQLQSILGKLNFARNFIPNFAELVQPLYNLIAPAKGKYIEWSEENTKQLNMVIEALNTASNLEERLPEQRLVIKVNTSPSAGYVRYYNETGKKPIMYLNYVFSKAELKFSMLEKLLTTMHKALIKAMDLAMGQEILVYSPIVSMTKIQKTPLPERKALPIRWITWMTYLEDPRIQFHYDKTLPELKHIPDVYTSSQSPVKHPSQYEGVFYTDGSAIKSPDPTKSNNAGMGIVHATYKPEYQVLNQWSIPLGNHTAQMAEIAAVEFACKKALKIPGPVLVITDSFYVAESANKELPYWKSNGFVNNKKKPLKHISKWKSIAECLSMKPDITIQHEKGISLQIPVFILKGNALADKLATQGSYVVNAGKRTADGSEFEKRTADGSEFESPKKKAKVE

SEQ ID NO: 1359 - protein, 2176 aa, synthetic construct
MPAAKRVKLDGGDKKYSIGLDIGTNSVGWAVITDEYKVPSKKFKVLGNTDRHSIKKNLIGALLFDSGETAEATRLKRTARRRYTRRKNRICYLQEIFSNEMAKVDDSFFHRLEESFLVEEDKKHERHPIFGNIVDEVAYHEKYPTIYHLRKKLVDSTDKADLRLIYLALAHMIKFRGHFLIEGDLNPDNSDVDKLFIQLVQTYNQLFEENPINASGVDAKAILSARLSKSRRLENLIAQLPGEKKNGLFGNLIALSLGLTPNFKSNFDLAEDAKLQLSKDTYDDDLDNLLAQIGDQYADLFLAAKNLSDAILLSDILRVNTEITKAPLSASMIKRYDEHHQDLTLLKALVRQQLPEKYKEIFFDQSKNGYAGYIDGGASQEEFYKFIKPILEKMDGTEELLVKLNREDLLRKQRTFDNGSIPHQIHLGELHAILRRQEDFYPFLKDNREKIEKILTFRIPYYVGPLARGNSRFAWMTRKSEETITPWNFEEVVDKGASAQSFIERMTNFDKNLPNEKVLPKHSLLYEYFTVYNELTKVKYVTEGMRKPAFLSGEQKKAIVDLLFKTNRKVTVKQLKEDYFKKIECFDSVEISGVEDRFNASLGTYHDLLKIIKDKDFLDNEENEDILEDIVLTLTLFEDREMIEERLKTYAHLFDDKVMKQLKRRRYTGWGRLSRKLINGIRDKQSGKTILDFLKSDGFANRNFMQLIHDDSLTFKEDIQKAQVSGQGDSLHEHIANLAGSPAIKKGILQTVKVVDELVKVMGRHKPENIVIEMARENQTTQKGQKNSRERMKRIEEGIKELGSQILKEHPVENTQLQNEKLYLYYLQNGRDMYVDQELDINRLSDYDVDHIVPQSFLKDDSIDNKVLTRSDKARGKSDNVPSEEVVKKMKNYWRQLLNAKLITQRKFDNLTKAERGGLSELDKAGFIKRQLVETRQITKHVAQILDSRMNTKYDENDKLIREVKVITLKSKLVSDFRKDFQFYKVREINNYHHAHDAYLNAVVGTALIKKYPKLESEFVYGDYKVYDVRKMIAKSEQEIGKATAKYFFYSNIMNFFKTEITLANGEIRKRPLIETNGETGEIVWDKGRDFATVRKVLSMPQVNIVKKTEVQTGGFSKESILPKRNSDKLIARKKDWDPKKYGGFDSPTVAYSVLVVAKVEKGKSKKLKSVKELLGITIMERSSFEKNPIDFLEAKGYKEVKKDLIIKLPKYSLFELENGRKRMLASAGELQKGNELALPSKYVNFLYLASHYEKLKGSPEDNEQKQLFVEQHKHYLDEIIEQISEFSKRVILADANLDKVLSAYNKHRDKPIREQAENIIHLFTLTNLGAPAAFKYFDTTIDRKRYTSTKEVLDATLIHQSITGLYETRIDLSQLGGDGGPAPEAAAKGGSGGMNPLQLLQPLPAEIKGTKLLAHWNSGATITCIPESFLEDEQPIKKTLIKTIHGEKQQNVYYVTFKVKGRKVEAEVIASPYEYILLSPTDVPWLTQQPLQLTILVPLQEYQEKILSKTALPEDQKQQLKTLFVKYDNLWQHWENQVGHRKIRPHNIATGDYPPRPQKQYPINPKAKPSIQIVIDDLLKQGVLTPQNSTMNTPVYPVPKPDGRWRMVLDYREVNKTIPLTAAQNQHSAGILATIVRQKYKTTLDLANGFWAHPITPESYWLTAFTWQGKQYCWTRLPQGFLNSPALFNADVVDLLKEIPNVQVYVDDIYLSHDDPKEHVQQLEKVFQILLQAGYVVSLKKSEIGQKTVEFLGFNITKEGRGLTDTFKTKLLNITPPKDLKQLQSILGKLNFARNFIPNFAELVQPLYNLIAPAKGKYIEWSEENTKQLNMVIEALNTASNLEERLPEQRLVIKVNTSPSAGYVRYYNETGKKPIMYLNYVFSKAELKFSMLEKLLTTMHKALIKAMDLAMGQEILVYSPIVSMTKIQKTPLPERKALPIRWITWMTYLEDPRIQFHYDKTLPELKHIPDVYTSSQSPVKHPSQYEGVFYTDGSAIKSPDPTKSNNAGMGIVHATYKPEYQVLNQWSIPLGNHTAQMAEIAAVEFACKKALKIPGPVLVITDSFYVAESANKELPYWKSNGFVNNKKKPLKHISKWKSIAECLSMKPDITIQHEKGISLQIPVFILKGNALADKLATQGSYVVNAGKRTADGSEFEKRTADGSEFESPKKKAKVE

SEQ ID NO: 1360 - protein, 2176 aa, synthetic construct
MPAAKRVKLDGGDKKYSIGLDIGTNSVGWAVITDEYKVPSKKFKVLGNTDRHSIKKNLIGALLFDSGETAEATRLKRTARRRYTRRKNRICYLQEIFSNEMAKVDDSFFHRLEESFLVEEDKKHERHPIFGNIVDEVAYHEKYPTIYHLRKKLVDSTDKADLRLIYLALAHMIKFRGHFLIEGDLNPDNSDVDKLFIQLVQTYNQLFEENPINASGVDAKAILSARLSKSRRLENLIAQLPGEKKNGLFGNLIALSLGLTPNFKSNFDLAEDAKLQLSKDTYDDDLDNLLAQIGDQYADLFLAAKNLSDAILLSDILRVNTEITKAPLSASMIKRYDEHHQDLTLLKALVRQQLPEKYKEIFFDQSKNGYAGYIDGGASQEEFYKFIKPILEKMDGTEELLVKLNREDLLRKQRTFDNGSIPHQIHLGELHAILRRQEDFYPFLKDNREKIEKILTFRIPYYVGPLARGNSRFAWMTRKSEETITPWNFEEVVDKGASAQSFIERMTNFDKNLPNEKVLPKHSLLYEYFTVYNELTKVKYVTEGMRKPAFLSGEQKKAIVDLLFKTNRKVTVKQLKEDYFKKIECFDSVEISGVEDRFNASLGTYHDLLKIIKDKDFLDNEENEDILEDIVLTLTLFEDREMIEERLKTYAHLFDDKVMKQLKRRRYTGWGRLSRKLINGIRDKQSGKTILDFLKSDGFANRNFMQLIHDDSLTFKEDIQKAQVSGQGDSLHEHIANLAGSPAIKKGILQTVKVVDELVKVMGRHKPENIVIEMARENQTTQKGQKNSRERMKRIEEGIKELGSQILKEHPVENTQLQNEKLYLYYLQNGRDMYVDQELDINRLSDYDVDHIVPQSFLKDDSIDNKVLTRSDKARGKSDNVPSEEVVKKMKNYWRQLLNAKLITQRKFDNLTKAERGGLSELDKAGFIKRQLVETRQITKHVAQILDSRMNTKYDENDKLIREVKVITLKSKLVSDFRKDFQFYKVREINNYHHAHDAYLNAVVGTALIKKYPKLESEFVYGDYKVYDVRKMIAKSEQEIGKATAKYFFYSNIMNFFKTEITLANGEIRKRPLIETNGETGEIVWDKGRDFATVRKVLSMPQVNIVKKTEVQTGGFSKESILPKRNSDKLIARKKDWDPKKYGGFDSPTVAYSVLVVAKVEKGKSKKLKSVKELLGITIMERSSFEKNPIDFLEAKGYKEVKKDLIIKLPKYSLFELENGRKRMLASAGELQKGNELALPSKYVNFLYLASHYEKLKGSPEDNEQKQLFVEQHKHYLDEIIEQISEFSKRVILADANLDKVLSAYNKHRDKPIREQAENIIHLFTLTNLGAPAAFKYFDTTIDRKRYTSTKEVLDATLIHQSITGLYETRIDLSQLGGDGGEAAAKGGGPAPGGMNPLQLLQPLPAEIKGTKLLAHWNSGATITCIPESFLEDEQPIKKTLIKTIHGEKQQNVYYVTFKVKGRKVEAEVIASPYEYILLSPTDVPWLTQQPLQLTILVPLQEYQEKILSKTALPEDQKQQLKTLFVKYDNLWQHWENQVGHRKIRPHNIATGDYPPRPQKQYPINPKAKPSIQIVIDDLLKQGVLTPQNSTMNTPVYPVPKPDGRWRMVLDYREVNKTIPLTAAQNQHSAGILATIVRQKYKTTLDLANGFWAHPITPESYWLTAFTWQGKQYCWTRLPQGFLNSPALFNADVVDLLKEIPNVQVYVDDIYLSHDDPKEHVQQLEKVFQILLQAGYVVSLKKSEIGQKTVEFLGFNITKEGRGLTDTFKTKLLNITPPKDLKQLQSILGKLNFARNFIPNFAELVQPLYNLIAPAKGKYIEWSEENTKQLNMVIEALNTASNLEERLPEQRLVIKVNTSPSAGYVRYYNETGKKPIMYLNYVFSKAELKFSMLEKLLTTMHKALIKAMDLAMGQEILVYSPIVSMTKIQKTPLPERKALPIRWITWMTYLEDPRIQFHYDKTLPELKHIPDVYTSSQSPVKHPSQYEGVFYTDGSAIKSPDPTKSNNAGMGIVHATYKPEYQVLNQWSIPLGNHTAQMAEIAAVEFACKKALKIPGPVLVITDSFYVAESANKELPYWKSNGFVNNKKKPLKHISKWKSIAECLSMKPDITIQHEKGISLQIPVFILKGNALADKLATQGSYVVNAGKRTADGSEFEKRTADGSEFESPKKKAKVE

SEQ ID NO: 1361 - protein, 2176 aa, synthetic construct
MPAAKRVKLDGGDKKYSIGLDIGTNSVGWAVITDEYKVPSKKFKVLGNTDRHSIKKNLIGALLFDSGETAEATRLKRTARRRYTRRKNRICYLQEIFSNEMAKVDDSFFHRLEESFLVEEDKKHERHPIFGNIVDEVAYHEKYPTIYHLRKKLVDSTDKADLRLIYLALAHMIKFRGHFLIEGDLNPDNSDVDKLFIQLVQTYNQLFEENPINASGVDAKAILSARLSKSRRLENLIAQLPGEKKNGLFGNLIALSLGLTPNFKSNFDLAEDAKLQLSKDTYDDDLDNLLAQIGDQYADLFLAAKNLSDAILLSDILRVNTEITKAPLSASMIKRYDEHHQDLTLLKALVRQQLPEKYKEIFFDQSKNGYAGYIDGGASQEEFYKFIKPILEKMDGTEELLVKLNREDLLRKQRTFDNGSIPHQIHLGELHAILRRQEDFYPFLKDNREKIEKILTFRIPYYVGPLARGNSRFAWMTRKSEETITPWNFEEVVDKGASAQSFIERMTNFDKNLPNEKVLPKHSLLYEYFTVYNELTKVKYVTEGMRKPAFLSGEQKKAIVDLLFKTNRKVTVKQLKEDYFKKIECFDSVEISGVEDRFNASLGTYHDLLKIIKDKDFLDNEENEDILEDIVLTLTLFEDREMIEERLKTYAHLFDDKVMKQLKRRRYTGWGRLSRKLINGIRDKQSGKTILDFLKSDGFANRNFMQLIHDDSLTFKEDIQKAQVSGQGDSLHEHIANLAGSPAIKKGILQTVKVVDELVKVMGRHKPENIVIEMARENQTTQKGQKNSRERMKRIEEGIKELGSQILKEHPVENTQLQNEKLYLYYLQNGRDMYVDQELDINRLSDYDVDHIVPQSFLKDDSIDNKVLTRSDKARGKSDNVPSEEVVKKMKNYWRQLLNAKLITQRKFDNLTKAERGGLSELDKAGFIKRQLVETRQITKHVAQILDSRMNTKYDENDKLIREVKVITLKSKLVSDFRKDFQFYKVREINNYHHAHDAYLNAVVGTALIKKYPKLESEFVYGDYKVYDVRKMIAKSEQEIGKATAKYFFYSNIMNFFKTEITLANGEIRKRPLIETNGETGEIVWDKGRDFATVRKVLSMPQVNIVKKTEVQTGGFSKESILPKRNSDKLIARKKDWDPKKYGGFDSPTVAYSVLVVAKVEKGKSKKLKSVKELLGITIMERSSFEKNPIDFLEAKGYKEVKKDLIIKLPKYSLFELENGRKRMLASAGELQKGNELALPSKYVNFLYLASHYEKLKGSPEDNEQKQLFVEQHKHYLDEIIEQISEFSKRVILADANLDKVLSAYNKHRDKPIREQAENIIHLFTLTNLGAPAAFKYFDTTIDRKRYTSTKEVLDATLIHQSITGLYETRIDLSQLGGDGGGSSEAAAKGGGGGMNPLQLLQPLPAEIKGTKLLAHWNSGATITCIPESFLEDEQPIKKTLIKTIHGEKQQNVYYVTFKVKGRKVEAEVIASPYEYILLSPTDVPWLTQQPLQLTILVPLQEYQEKILSKTALPEDQKQQLKTLFVKYDNLWQHWENQVGHRKIRPHNIATGDYPPRPQKQYPINPKAKPSIQIVIDDLLKQGVLTPQNSTMNTPVYPVPKPDGRWRMVLDYREVNKTIPLTAAQNQHSAGILATIVRQKYKTTLDLANGFWAHPITPESYWLTAFTWQGKQYCWTRLPQGFLNSPALFNADVVDLLKEIPNVQVYVDDIYLSHDDPKEHVQQLEKVFQILLQAGYVVSLKKSEIGQKTVEFLGFNITKEGRGLTDTFKTKLLNITPPKDLKQLQSILGKLNFARNFIPNFAELVQPLYNLIAPAKGKYIEWSEENTKQLNMVIEALNTASNLEERLPEQRLVIKVNTSPSAGYVRYYNETGKKPIMYLNYVFSKAELKFSMLEKLLTTMHKALIKAMDLAMGQEILVYSPIVSMTKIQKTPLPERKALPIRWITWMTYLEDPRIQFHYDKTLPELKHIPDVYTSSQSPVKHPSQYEGVFYTDGSAIKSPDPTKSNNAGMGIVHATYKPEYQVLNQWSIPLGNHTAQMAEIAAVEFACKKALKIPGPVLVITDSFYVAESANKELPYWKSNGFVNNKKKPLKHISKWKSIAECLSMKPDITIQHEKGISLQIPVFILKGNALADKLATQGSYVVNAGKRTADGSEFEKRTADGSEFESPKKKAKVE

SEQ ID NO: 1362 - protein, 2176 aa, synthetic construct
MPAAKRVKLDGGDKKYSIGLDIGTNSVGWAVITDEYKVPSKKFKVLGNTDRHSIKKNLIGALLFDSGETAEATRLKRTARRRYTRRKNRICYLQEIFSNEMAKVDDSFFHRLEESFLVEEDKKHERHPIFGNIVDEVAYHEKYPTIYHLRKKLVDSTDKADLRLIYLALAHMIKFRGHFLIEGDLNPDNSDVDKLFIQLVQTYNQLFEENPINASGVDAKAILSARLSKSRRLENLIAQLPGEKKNGLFGNLIALSLGLTPNFKSNFDLAEDAKLQLSKDTYDDDLDNLLAQIGDQYADLFLAAKNLSDAILLSDILRVNTEITKAPLSASMIKRYDEHHQDLTLLKALVRQQLPEKYKEIFFDQSKNGYAGYIDGGASQEEFYKFIKPILEKMDGTEELLVKLNREDLLRKQRTFDNGSIPHQIHLGELHAILRRQEDFYPFLKDNREKIEKILTFRIPYYVGPLARGNSRFAWMTRKSEETITPWNFEEVVDKGASAQSFIERMTNFDKNLPNEKVLPKHSLLYEYFTVYNELTKVKYVTEGMRKPAFLSGEQKKAIVDLLFKTNRKVTVKQLKEDYFKKIECFDSVEISGVEDRFNASLGTYHDLLKIIKDKDFLDNEENEDILEDIVLTLTLFEDREMIEERLKTYAHLFDDKVMKQLKRRRYTGWGRLSRKLINGIRDKQSGKTILDFLKSDGFANRNFMQLIHDDSLTFKEDIQKAQVSGQGDSLHEHIANLAGSPAIKKGILQTVKVVDELVKVMGRHKPENIVIEMARENQTTQKGQKNSRERMKRIEEGIKELGSQILKEHPVENTQLQNEKLYLYYLQNGRDMYVDQELDINRLSDYDVDHIVPQSFLKDDSIDNKVLTRSDKARGKSDNVPSEEVVKKMKNYWRQLLNAKLITQRKFDNLTKAERGGLSELDKAGFIKRQLVETRQITKHVAQILDSRMNTKYDENDKLIREVKVITLKSKLVSDFRKDFQFYKVREINNYHHAHDAYLNAVVGTALIKKYPKLESEFVYGDYKVYDVRKMIAKSEQEIGKATAKYFFYSNIMNFFKTEITLANGEIRKRPLIETNGETGEIVWDKGRDFATVRKVLSMPQVNIVKKTEVQTGGFSKESILPKRNSDKLIARKKDWDPKKYGGFDSPTVAYSVLVVAKVEKGKSKKLKSVKELLGITIMERSSFEKNPIDFLEAKGYKEVKKDLIIKLPKYSLFELENGRKRMLASAGELQKGNELALPSKYVNFLYLASHYEKLKGSPEDNEQKQLFVEQHKHYLDEIIEQISEFSKRVILADANLDKVLSAYNKHRDKPIREQAENIIHLFTLTNLGAPAAFKYFDTTIDRKRYTSTKEVLDATLIHQSITGLYETRIDLSQLGGDGGEAAAKGGGGSSGGMNPLQLLQPLPAEIKGTKLLAHWNSGATITCIPESFLEDEQPIKKTLIKTIHGEKQQNVYYVTFKVKGRKVEAEVIASPYEYILLSPTDVPWLTQQPLQLTILVPLQEYQEKILSKTALPEDQKQQLKTLFVKYDNLWQHWENQVGHRKIRPHNIATGDYPPRPQKQYPINPKAKPSIQIVIDDLLKQGVLTPQNSTMNTPVYPVPKPDGRWRMVLDYREVNKTIPLTAAQNQHSAGILATIVRQKYKTTLDLANGFWAHPITPESYWLTAFTWQGKQYCWTRLPQGFLNSPALFNADVVDLLKEIPNVQVYVDDIYLSHDDPKEHVQQLEKVFQILLQAGYVVSLKKSEIGQKTVEFLGFNITKEGRGLTDTFKTKLLNITPPKDLKQLQSILGKLNFARNFIPNFAELVQPLYNLIAPAKGKYIEWSEENTKQLNMVIEALNTASNLEERLPEQRLVIKVNTSPSAGYVRYYNETGKKPIMYLNYVFSKAELKFSMLEKLLTTMHKALIKAMDLAMGQEILVYSPIVSMTKIQKTPLPERKALPIRWITWMTYLEDPRIQFHYDKTLPELKHIPDVYTSSQSPVKHPSQYEGVFYTDGSAIKSPDPTKSNNAGMGIVHATYKPEYQVLNQWSIPLGNHTAQMAEIAAVEFACKKALKIPGPVLVITDSFYVAESANKELPYWKSNGFVNNKKKPLKHISKWKSIAECLSMKPDITIQHEKGISLQIPVFILKGNALADKLATQGSYVVNAGKRTADGSEFEKRTADGSEFESPKKKAKVE

SEQ ID NO: 1363 - protein, 2172 aa, synthetic construct
MPAAKRVKLDGGDKKYSIGLDIGTNSVGWAVITDEYKVPSKKFKVLGNTDRHSIKKNLIGALLFDSGETAEATRLKRTARRRYTRRKNRICYLQEIFSNEMAKVDDSFFHRLEESFLVEEDKKHERHPIFGNIVDEVAYHEKYPTIYHLRKKLVDSTDKADLRLIYLALAHMIKFRGHFLIEGDLNPDNSDVDKLFIQLVQTYNQLFEENPINASGVDAKAILSARLSKSRRLENLIAQLPGEKKNGLFGNLIALSLGLTPNFKSNFDLAEDAKLQLSKDTYDDDLDNLLAQIGDQYADLFLAAKNLSDAILLSDILRVNTEITKAPLSASMIKRYDEHHQDLTLLKALVRQQLPEKYKEIFFDQSKNGYAGYIDGGASQEEFYKFIKPILEKMDGTEELLVKLNREDLLRKQRTFDNGSIPHQIHLGELHAILRRQEDFYPFLKDNREKIEKILTFRIPYYVGPLARGNSRFAWMTRKSEETITPWNFEEVVDKGASAQSFIERMTNFDKNLPNEKVLPKHSLLYEYFTVYNELTKVKYVTEGMRKPAFLSGEQKKAIVDLLFKTNRKVTVKQLKEDYFKKIECFDSVEISGVEDRFNASLGTYHDLLKIIKDKDFLDNEENEDILEDIVLTLTLFEDREMIEERLKTYAHLFDDKVMKQLKRRRYTGWGRLSRKLINGIRDKQSGKTILDFLKSDGFANRNFMQLIHDDSLTFKEDIQKAQVSGQGDSLHEHIANLAGSPAIKKGILQTVKVVDELVKVMGRHKPENIVIEMARENQTTQKGQKNSRERMKRIEEGIKELGSQILKEHPVENTQLQNEKLYLYYLQNGRDMYVDQELDINRLSDYDVDHIVPQSFLKDDSIDNKVLTRSDKARGKSDNVPSEEVVKKMKNYWRQLLNAKLITQRKFDNLTKAERGGLSELDKAGFIKRQLVETRQITKHVAQILDSRMNTKYDENDKLIREVKVITLKSKLVSDFRKDFQFYKVREINNYHHAHDAYLNAVVGTALIKKYPKLESEFVYGDYKVYDVRKMIAKSEQEIGKATAKYFFYSNIMNFFKTEITLANGEIRKRPLIETNGETGEIVWDKGRDFATVRKVLSMPQVNIVKKTEVQTGGFSKESILPKRNSDKLIARKKDWDPKKYGGFDSPTVAYSVLVVAKVEKGKSKKLKSVKELLGITIMERSSFEKNPIDFLEAKGYKEVKKDLIIKLPKYSLFELENGRKRMLASAGELQKGNELALPSKYVNFLYLASHYEKLKGSPEDNEQKQLFVEQHKHYLDEIIEQISEFSKRVILADANLDKVLSAYNKHRDKPIREQAENIIHLFTLTNLGAPAAFKYFDTTIDRKRYTSTKEVLDATLIHQSITGLYETRIDLSQLGGDGGPAPAPAPGGMNPLQLLQPLPAEIKGTKLLAHWNSGATITCIPESFLEDEQPIKKTLIKTIHGEKQQNVYYVTFKVKGRKVEAEVIASPYEYILLSPTDVPWLTQQPLQLTILVPLQEYQEKILSKTALPEDQKQQLKTLFVKYDNLWQHWENQVGHRKIRPHNIATGDYPPRPQKQYPINPKAKPSIQIVIDDLLKQGVLTPQNSTMNTPVYPVPKPDGRWRMVLDYREVNKTIPLTAAQNQHSAGILATIVRQKYKTTLDLANGFWAHPITPESYWLTAFTWQGKQYCWTRLPQGFLNSPALFNADVVDLLKEIPNVQVYVDDIYLSHDDPKEHVQQLEKVFQILLQAGYVVSLKKSEIGQKTVEFLGFNITKEGRGLTDTFKTKLLNITPPKDLKQLQSILGKLNFARNFIPNFAELVQPLYNLIAPAKGKYIEWSEENTKQLNMVIEALNTASNLEERLPEQRLVIKVNTSPSAGYVRYYNETGKKPIMYLNYVFSKAELKFSMLEKLLTTMHKALIKAMDLAMGQEILVYSPIVSMTKIQKTPLPERKALPIRWITWMTYLEDPRIQFHYDKTLPELKHIPDVYTSSQSPVKHPSQYEGVFYTDGSAIKSPDPTKSNNAGMGIVHATYKPEYQVLNQWSIPLGNHTAQMAEIAAVEFACKKALKIPGPVLVITDSFYVAESANKELPYWKSNGFVNNKKKPLKHISKWKSIAECLSMKPDITIQHEKGISLQIPVFILKGNALADKLATQGSYVVNAGKRTADGSEFEKRTADGSEFESPKKKAKVE

SEQ ID NO: 1364 - protein, 2174 aa, synthetic construct
MPAAKRVKLDGGDKKYSIGLDIGTNSVGWAVITDEYKVPSKKFKVLGNTDRHSIKKNLIGALLFDSGETAEATRLKRTARRRYTRRKNRICYLQEIFSNEMAKVDDSFFHRLEESFLVEEDKKHERHPIFGNIVDEVAYHEKYPTIYHLRKKLVDSTDKADLRLIYLALAHMIKFRGHFLIEGDLNPDNSDVDKLFIQLVQTYNQLFEENPINASGVDAKAILSARLSKSRRLENLIAQLPGEKKNGLFGNLIALSLGLTPNFKSNFDLAEDAKLQLSKDTYDDDLDNLLAQIGDQYADLFLAAKNLSDAILLSDILRVNTEITKAPLSASMIKRYDEHHQDLTLLKALVRQQLPEKYKEIFFDQSKNGYAGYIDGGASQEEFYKFIKPILEKMDGTEELLVKLNREDLLRKQRTFDNGSIPHQIHLGELHAILRRQEDFYPFLKDNREKIEKILTFRIPYYVGPLARGNSRFAWMTRKSEETITPWNFEEVVDKGASAQSFIERMTNFDKNLPNEKVLPKHSLLYEYFTVYNELTKVKYVTEGMRKPAFLSGEQKKAIVDLLFKTNRKVTVKQLKEDYFKKIECFDSVEISGVEDRFNASLGTYHDLLKIIKDKDFLDNEENEDILEDIVLTLTLFEDREMIEERLKTYAHLFDDKVMKQLKRRRYTGWGRLSRKLINGIRDKQSGKTILDFLKSDGFANRNFMQLIHDDSLTFKEDIQKAQVSGQGDSLHEHIANLAGSPAIKKGILQTVKVVDELVKVMGRHKPENIVIEMARENQTTQKGQKNSRERMKRIEEGIKELGSQILKEHPVENTQLQNEKLYLYYLQNGRDMYVDQELDINRLSDYDVDHIVPQSFLKDDSIDNKVLTRSDKARGKSDNVPSEEVVKKMKNYWRQLLNAKLITQRKFDNLTKAERGGLSELDKAGFIKRQLVETRQITKHVAQILDSRMNTKYDENDKLIREVKVITLKSKLVSDFRKDFQFYKVREINNYHHAHDAYLNAVVGTALIKKYPKLESEFVYGDYKVYDVRKMIAKSEQEIGKATAKYFFYSNIMNFFKTEITLANGEIRKRPLIETNGETGEIVWDKGRDFATVRKVLSMPQVNIVKKTEVQTGGFSKESILPKRNSDKLIARKKDWDPKKYGGFDSPTVAYSVLVVAKVEKGKSKKLKSVKELLGITIMERSSFEKNPIDFLEAKGYKEVKKDLIIKLPKYSLFELENGRKRMLASAGELQKGNELALPSKYVNFLYLASHYEKLKGSPEDNEQKQLFVEQHKHYLDEIIEQISEFSKRVILADANLDKVLSAYNKHRDKPIREQAENIIHLFTLTNLGAPAAFKYFDTTIDRKRYTSTKEVLDATLIHQSITGLYETRIDLSQLGGDGGPAPAPAPAPGGMNPLQLLQPLPAEIKGTKLLAHWNSGATITCIPESFLEDEQPIKKTLIKTIHGEKQQNVYYVTFKVKGRKVEAEVIASPYEYILLSPTDVPWLTQQPLQLTILVPLQEYQEKILSKTALPEDQKQQLKTLFVKYDNLWQHWENQVGHRKIRPHNIATGDYPPRPQKQYPINPKAKPSIQIVIDDLLKQGVLTPQNSTMNTPVYPVPKPDGRWRMVLDYREVNKTIPLTAAQNQHSAGILATIVRQKYKTTLDLANGFWAHPITPESYWLTAFTWQGKQYCWTRLPQGFLNSPALFNADVVDLLKEIPNVQVYVDDIYLSHDDPKEHVQQLEKVFQILLQAGYVVSLKKSEIGQKTVEFLGFNITKEGRGLTDTFKTKLLNITPPKDLKQLQSILGKLNFARNFIPNFAELVQPLYNLIAPAKGKYIEWSEENTKQLNMVIEALNTASNLEERLPEQRLVIKVNTSPSAGYVRYYNETGKKPIMYLNYVFSKAELKFSMLEKLLTTMHKALIKAMDLAMGQEILVYSPIVSMTKIQKTPLPERKALPIRWITWMTYLEDPRIQFHYDKTLPELKHIPDVYTSSQSPVKHPSQYEGVFYTDGSAIKSPDPTKSNNAGMGIVHATYKPEYQVLNQWSIPLGNHTAQMAEIAAVEFACKKALKIPGPVLVITDSFYVAESANKELPYWKSNGFVNNKKKPLKHISKWKSIAECLSMKPDITIQHEKGISLQIPVFILKGNALADKLATQGSYVVNAGKRTADGSEFEKRTADGSEFESPKKKAKVE

SEQ ID NO: 1365 - protein, 2094 aa, synthetic construct
MPAAKRVKLDGGDKKYSIGLDIGTNSVGWAVITDEYKVPSKKFKVLGNTDRHSIKKNLIGALLFDSGETAEATRLKRTARRRYTRRKNRICYLQEIFSNEMAKVDDSFFHRLEESFLVEEDKKHERHPIFGNIVDEVAYHEKYPTIYHLRKKLVDSTDKADLRLIYLALAHMIKFRGHFLIEGDLNPDNSDVDKLFIQLVQTYNQLFEENPINASGVDAKAILSARLSKSRRLENLIAQLPGEKKNGLFGNLIALSLGLTPNFKSNFDLAEDAKLQLSKDTYDDDLDNLLAQIGDQYADLFLAAKNLSDAILLSDILRVNTEITKAPLSASMIKRYDEHHQDLTLLKALVRQQLPEKYKEIFFDQSKNGYAGYIDGGASQEEFYKFIKPILEKMDGTEELLVKLNREDLLRKQRTFDNGSIPHQIHLGELHAILRRQEDFYPFLKDNREKIEKILTFRIPYYVGPLARGNSRFAWMTRKSEETITPWNFEEVVDKGASAQSFIERMTNFDKNLPNEKVLPKHSLLYEYFTVYNELTKVKYVTEGMRKPAFLSGEQKKAIVDLLFKTNRKVTVKQLKEDYFKKIECFDSVEISGVEDRFNASLGTYHDLLKIIKDKDFLDNEENEDILEDIVLTLTLFEDREMIEERLKTYAHLFDDKVMKQLKRRRYTGWGRLSRKLINGIRDKQSGKTILDFLKSDGFANRNFMQLIHDDSLTFKEDIQKAQVSGQGDSLHEHIANLAGSPAIKKGILQTVKVVDELVKVMGRHKPENIVIEMARENQTTQKGQKNSRERMKRIEEGIKELGSQILKEHPVENTQLQNEKLYLYYLQNGRDMYVDQELDINRLSDYDVDHIVPQSFLKDDSIDNKVLTRSDKARGKSDNVPSEEVVKKMKNYWRQLLNAKLITQRKFDNLTKAERGGLSELDKAGFIKRQLVETRQITKHVAQILDSRMNTKYDENDKLIREVKVITLKSKLVSDFRKDFQFYKVREINNYHHAHDAYLNAVVGTALIKKYPKLESEFVYGDYKVYDVRKMIAKSEQEIGKATAKYFFYSNIMNFFKTEITLANGEIRKRPLIETNGETGEIVWDKGRDFATVRKVLSMPQVNIVKKTEVQTGGFSKESILPKRNSDKLIARKKDWDPKKYGGFDSPTVAYSVLVVAKVEKGKSKKLKSVKELLGITIMERSSFEKNPIDFLEAKGYKEVKKDLIIKLPKYSLFELENGRKRMLASAGELQKGNELALPSKYVNFLYLASHYEKLKGSPEDNEQKQLFVEQHKHYLDEIIEQISEFSKRVILADANLDKVLSAYNKHRDKPIREQAENIIHLFTLTNLGAPAAFKYFDTTIDRKRYTSTKEVLDATLIHQSITGLYETRIDLSQLGGDGGEAAAKGGSPAPGGVLNLEEEYRLHEKPVPSSIDPSWLQLFPTVWAERAGMGLANQVPPVVVELRSGASPVAVRQYPMSKEAREGIRPHIQKFLDLGVLVPCRSPWNTPLLPVKKPGTNDYRPVQDLREINKRVQDIHPTVPNPYNLLSSLPPSYTWYSVLDLKDAFFCLRLHPNSQPLFAFEWKDPEKGNTGQLTWTRLPQGFKNSPTLFDEALHRDLAPFRALNPQVVLLQYVDDLLVAAPTYEDCKKGTQKLLQELSKLGYRVSAKKAQLCQREVTYLGYLLKEGKRWLTPARKATVMKIPVPTTPRQVREFLGTAGFCRLWIPGFASLAAPLYPLTKESIPFIWTEEHQQAFDHIKKALLSAPALALPDLTKPFTLYIDERAGVARGVLTQTLGPWRRPVAYLSKKLDPVASGWPTCLKAVAAVALLLKDADKLTLGQNVTVIASHSLESIVRQPPDRWMTNARMTHYQSLLLNERVSFAPPAVLNPATLLPVESEATPVHRCSEILAEETGTRRDLEDQPLPGVPTWYTDGSSFITEGKRRAGAPIVDGKRTVWASSLPEGTSAQKAELVALTQALRLAEGKNINIYTDSRYAFATAHIHGAIYKQRGLLTSAGKDIKNKEEILALLEAIHLPRRVAIIHCPGHQRGSNPVATGNRRADEAAKQAALSTRVLAGTTKPAGKRTADGSEFEKRTADGSEFESPKKKAKVE

SEQ ID NO: 1366 - protein, 2101 aa, synthetic construct
MPAAKRVKLDGGDKKYSIGLDIGTNSVGWAVITDEYKVPSKKFKVLGNTDRHSIKKNLIGALLFDSGETAEATRLKRTARRRYTRRKNRICYLQEIFSNEMAKVDDSFFHRLEESFLVEEDKKHERHPIFGNIVDEVAYHEKYPTIYHLRKKLVDSTDKADLRLIYLALAHMIKFRGHFLIEGDLNPDNSDVDKLFIQLVQTYNQLFEENPINASGVDAKAILSARLSKSRRLENLIAQLPGEKKNGLFGNLIALSLGLTPNFKSNFDLAEDAKLQLSKDTYDDDLDNLLAQIGDQYADLFLAAKNLSDAILLSDILRVNTEITKAPLSASMIKRYDEHHQDLTLLKALVRQQLPEKYKEIFFDQSKNGYAGYIDGGASQEEFYKFIKPILEKMDGTEELLVKLNREDLLRKQRTFDNGSIPHQIHLGELHAILRRQEDFYPFLKDNREKIEKILTFRIPYYVGPLARGNSRFAWMTRKSEETITPWNFEEVVDKGASAQSFIERMTNFDKNLPNEKVLPKHSLLYEYFTVYNELTKVKYVTEGMRKPAFLSGEQKKAIVDLLFKTNRKVTVKQLKEDYFKKIECFDSVEISGVEDRFNASLGTYHDLLKIIKDKDFLDNEENEDILEDIVLTLTLFEDREMIEERLKTYAHLFDDKVMKQLKRRRYTGWGRLSRKLINGIRDKQSGKTILDFLKSDGFANRNFMQLIHDDSLTFKEDIQKAQVSGQGDSLHEHIANLAGSPAIKKGILQTVKVVDELVKVMGRHKPENIVIEMARENQTTQKGQKNSRERMKRIEEGIKELGSQILKEHPVENTQLQNEKLYLYYLQNGRDMYVDQELDINRLSDYDVDHIVPQSFLKDDSIDNKVLTRSDKARGKSDNVPSEEVVKKMKNYWRQLLNAKLITQRKFDNLTKAERGGLSELDKAGFIKRQLVETRQITKHVAQILDSRMNTKYDENDKLIREVKVITLKSKLVSDFRKDFQFYKVREINNYHHAHDAYLNAVVGTALIKKYPKLESEFVYGDYKVYDVRKMIAKSEQEIGKATAKYFFYSNIMNFFKTEITLANGEIRKRPLIETNGETGEIVWDKGRDFATVRKVLSMPQVNIVKKTEVQTGGFSKESILPKRNSDKLIARKKDWDPKKYGGFDSPTVAYSVLVVAKVEKGKSKKLKSVKELLGITIMERSSFEKNPIDFLEAKGYKEVKKDLIIKLPKYSLFELENGRKRMLASAGELQKGNELALPSKYVNFLYLASHYEKLKGSPEDNEQKQLFVEQHKHYLDEIIEQISEFSKRVILADANLDKVLSAYNKHRDKPIREQAENIIHLFTLTNLGAPAAFKYFDTTIDRKRYTSTKEVLDATLIHQSITGLYETRIDLSQLGGDGGGSSGSSGSSGSSGSSGSSGGVLNLEEEYRLHEKPVPSSIDPSWLQLFPTVWAERAGMGLANQVPPVVVELRSGASPVAVRQYPMSKEAREGIRPHIQKFLDLGVLVPCRSPWNTPLLPVKKPGTNDYRPVQDLREINKRVQDIHPTVPNPYNLLSSLPPSYTWYSVLDLKDAFFCLRLHPNSQPLFAFEWKDPEKGNTGQLTWTRLPQGFKNSPTLFDEALHRDLAPFRALNPQVVLLQYVDDLLVAAPTYEDCKKGTQKLLQELSKLGYRVSAKKAQLCQREVTYLGYLLKEGKRWLTPARKATVMKIPVPTTPRQVREFLGTAGFCRLWIPGFASLAAPLYPLTKESIPFIWTEEHQQAFDHIKKALLSAPALALPDLTKPFTLYIDERAGVARGVLTQTLGPWRRPVAYLSKKLDPVASGWPTCLKAVAAVALLLKDADKLTLGQNVTVIASHSLESIVRQPPDRWMTNARMTHYQSLLLNERVSFAPPAVLNPATLLPVESEATPVHRCSEILAEETGTRRDLEDQPLPGVPTWYTDGSSFITEGKRRAGAPIVDGKRTVWASSLPEGTSAQKAELVALTQALRLAEGKNINIYTDSRYAFATAHIHGAIYKQRGLLTSAGKDIKNKEEILALLEAIHLPRRVAIIHCPGHQRGSNPVATGNRRADEAAKQAALSTRVLAGTTKPAGKRTADGSEFEKRTADGSEFESPKKKAKVE

SEQ ID NO: 1367 - protein, 2103 aa, synthetic construct
MPAAKRVKLDGGDKKYSIGLDIGTNSVGWAVITDEYKVPSKKFKVLGNTDRHSIKKNLIGALLFDSGETAEATRLKRTARRRYTRRKNRICYLQEIFSNEMAKVDDSFFHRLEESFLVEEDKKHERHPIFGNIVDEVAYHEKYPTIYHLRKKLVDSTDKADLRLIYLALAHMIKFRGHFLIEGDLNPDNSDVDKLFIQLVQTYNQLFEENPINASGVDAKAILSARLSKSRRLENLIAQLPGEKKNGLFGNLIALSLGLTPNFKSNFDLAEDAKLQLSKDTYDDDLDNLLAQIGDQYADLFLAAKNLSDAILLSDILRVNTEITKAPLSASMIKRYDEHHQDLTLLKALVRQQLPEKYKEIFFDQSKNGYAGYIDGGASQEEFYKFIKPILEKMDGTEELLVKLNREDLLRKQRTFDNGSIPHQIHLGELHAILRRQEDFYPFLKDNREKIEKILTFRIPYYVGPLARGNSRFAWMTRKSEETITPWNFEEVVDKGASAQSFIERMTNFDKNLPNEKVLPKHSLLYEYFTVYNELTKVKYVTEGMRKPAFLSGEQKKAIVDLLFKTNRKVTVKQLKEDYFKKIECFDSVEISGVEDRFNASLGTYHDLLKIIKDKDFLDNEENEDILEDIVLTLTLFEDREMIEERLKTYAHLFDDKVMKQLKRRRYTGWGRLSRKLINGIRDKQSGKTILDFLKSDGFANRNFMQLIHDDSLTFKEDIQKAQVSGQGDSLHEHIANLAGSPAIKKGILQTVKVVDELVKVMGRHKPENIVIEMARENQTTQKGQKNSRERMKRIEEGIKELGSQILKEHPVENTQLQNEKLYLYYLQNGRDMYVDQELDINRLSDYDVDHIVPQSFLKDDSIDNKVLTRSDKARGKSDNVPSEEVVKKMKNYWRQLLNAKLITQRKFDNLTKAERGGLSELDKAGFIKRQLVETRQITKHVAQILDSRMNTKYDENDKLIREVKVITLKSKLVSDFRKDFQFYKVREINNYHHAHDAYLNAVVGTALIKKYPKLESEFVYGDYKVYDVRKMIAKSEQEIGKATAKYFFYSNIMNFFKTEITLANGEIRKRPLIETNGETGEIVWDKGRDFATVRKVLSMPQVNIVKKTEVQTGGFSKESILPKRNSDKLIARKKDWDPKKYGGFDSPTVAYSVLVVAKVEKGKSKKLKSVKELLGITIMERSSFEKNPIDFLEAKGYKEVKKDLIIKLPKYSLFELENGRKRMLASAGELQKGNELALPSKYVNFLYLASHYEKLKGSPEDNEQKQLFVEQHKHYLDEIIEQISEFSKRVILADANLDKVLSAYNKHRDKPIREQAENIIHLFTLTNLGAPAAFKYFDTTIDRKRYTSTKEVLDATLIHQSITGLYETRIDLSQLGGDGGEAAAKEAAAKEAAAKEAAAKGGVLNLEEEYRLHEKPVPSSIDPSWLQLFPTVWAERAGMGLANQVPPVVVELRSGASPVAVRQYPMSKEAREGIRPHIQKFLDLGVLVPCRSPWNTPLLPVKKPGTNDYRPVQDLREINKRVQDIHPTVPNPYNLLSSLPPSYTWYSVLDLKDAFFCLRLHPNSQPLFAFEWKDPEKGNTGQLTWTRLPQGFKNSPTLFDEALHRDLAPFRALNPQVVLLQYVDDLLVAAPTYEDCKKGTQKLLQELSKLGYRVSAKKAQLCQREVTYLGYLLKEGKRWLTPARKATVMKIPVPTTPRQVREFLGTAGFCRLWIPGFASLAAPLYPLTKESIPFIWTEEHQQAFDHIKKALLSAPALALPDLTKPFTLYIDERAGVARGVLTQTLGPWRRPVAYLSKKLDPVASGWPTCLKAVAAVALLLKDADKLTLGQNVTVIASHSLESIVRQPPDRWMTNARMTHYQSLLLNERVSFAPPAVLNPATLLPVESEATPVHRCSEILAEETGTRRDLEDQPLPGVPTWYTDGSSFITEGKRRAGAPIVDGKRTVWASSLPEGTSAQKAELVALTQALRLAEGKNINIYTDSRYAFATAHIHGAIYKQRGLLTSAGKDIKNKEEILALLEAIHLPRRVAIIHCPGHQRGSNPVATGNRRADEAAKQAALSTRVLAGTTKPAGKRTADGSEFEKRTADGSEFESPKKKAKVE

SEQ ID NO: 1368 - protein, 2098 aa, synthetic construct
MPAAKRVKLDGGDKKYSIGLDIGTNSVGWAVITDEYKVPSKKFKVLGNTDRHSIKKNLIGALLFDSGETAEATRLKRTARRRYTRRKNRICYLQEIFSNEMAKVDDSFFHRLEESFLVEEDKKHERHPIFGNIVDEVAYHEKYPTIYHLRKKLVDSTDKADLRLIYLALAHMIKFRGHFLIEGDLNPDNSDVDKLFIQLVQTYNQLFEENPINASGVDAKAILSARLSKSRRLENLIAQLPGEKKNGLFGNLIALSLGLTPNFKSNFDLAEDAKLQLSKDTYDDDLDNLLAQIGDQYADLFLAAKNLSDAILLSDILRVNTEITKAPLSASMIKRYDEHHQDLTLLKALVRQQLPEKYKEIFFDQSKNGYAGYIDGGASQEEFYKFIKPILEKMDGTEELLVKLNREDLLRKQRTFDNGSIPHQIHLGELHAILRRQEDFYPFLKDNREKIEKILTFRIPYYVGPLARGNSRFAWMTRKSEETITPWNFEEVVDKGASAQSFIERMTNFDKNLPNEKVLPKHSLLYEYFTVYNELTKVKYVTEGMRKPAFLSGEQKKAIVDLLFKTNRKVTVKQLKEDYFKKIECFDSVEISGVEDRFNASLGTYHDLLKIIKDKDFLDNEENEDILEDIVLTLTLFEDREMIEERLKTYAHLFDDKVMKQLKRRRYTGWGRLSRKLINGIRDKQSGKTILDFLKSDGFANRNFMQLIHDDSLTFKEDIQKAQVSGQGDSLHEHIANLAGSPAIKKGILQTVKVVDELVKVMGRHKPENIVIEMARENQTTQKGQKNSRERMKRIEEGIKELGSQILKEHPVENTQLQNEKLYLYYLQNGRDMYVDQELDINRLSDYDVDHIVPQSFLKDDSIDNKVLTRSDKARGKSDNVPSEEVVKKMKNYWRQLLNAKLITQRKFDNLTKAERGGLSELDKAGFIKRQLVETRQITKHVAQILDSRMNTKYDENDKLIREVKVITLKSKLVSDFRKDFQFYKVREINNYHHAHDAYLNAVVGTALIKKYPKLESEFVYGDYKVYDVRKMIAKSEQEIGKATAKYFFYSNIMNFFKTEITLANGEIRKRPLIETNGETGEIVWDKGRDFATVRKVLSMPQVNIVKKTEVQTGGFSKESILPKRNSDKLIARKKDWDPKKYGGFDSPTVAYSVLVVAKVEKGKSKKLKSVKELLGITIMERSSFEKNPIDFLEAKGYKEVKKDLIIKLPKYSLFELENGRKRMLASAGELQKGNELALPSKYVNFLYLASHYEKLKGSPEDNEQKQLFVEQHKHYLDEIIEQISEFSKRVILADANLDKVLSAYNKHRDKPIREQAENIIHLFTLTNLGAPAAFKYFDTTIDRKRYTSTKEVLDATLIHQSITGLYETRIDLSQLGGDGGGSSGSSGSSGSSGSSGGVLNLEEEYRLHEKPVPSSIDPSWLQLFPTVWAERAGMGLANQVPPVVVELRSGASPVAVRQYPMSKEAREGIRPHIQKFLDLGVLVPCRSPWNTPLLPVKKPGTNDYRPVQDLREINKRVQDIHPTVPNPYNLLSSLPPSYTWYSVLDLKDAFFCLRLHPNSQPLFAFEWKDPEKGNTGQLTWTRLPQGFKNSPTLFDEALHRDLAPFRALNPQVVLLQYVDDLLVAAPTYEDCKKGTQKLLQELSKLGYRVSAKKAQLCQREVTYLGYLLKEGKRWLTPARKATVMKIPVPTTPRQVREFLGTAGFCRLWIPGFASLAAPLYPLTKESIPFIWTEEHQQAFDHIKKALLSAPALALPDLTKPFTLYIDERAGVARGVLTQTLGPWRRPVAYLSKKLDPVASGWPTCLKAVAAVALLLKDADKLTLGQNVTVIASHSLESIVRQPPDRWMTNARMTHYQSLLLNERVSFAPPAVLNPATLLPVESEATPVHRCSEILAEETGTRRDLEDQPLPGVPTWYTDGSSFITEGKRRAGAPIVDGKRTVWASSLPEGTSAQKAELVALTQALRLAEGKNINIYTDSRYAFATAHIHGAIYKQRGLLTSAGKDIKNKEEILALLEAIHLPRRVAIIHCPGHQRGSNPVATGNRRADEAAKQAALSTRVLAGTTKPAGKRTADGSEFEKRTADGSEFESPKKKAKVE

SEQ ID NO: 1369 - protein, 2094 aa, synthetic construct
MPAAKRVKLDGGDKKYSIGLDIGTNSVGWAVITDEYKVPSKKFKVLGNTDRHSIKKNLIGALLFDSGETAEATRLKRTARRRYTRRKNRICYLQEIFSNEMAKVDDSFFHRLEESFLVEEDKKHERHPIFGNIVDEVAYHEKYPTIYHLRKKLVDSTDKADLRLIYLALAHMIKFRGHFLIEGDLNPDNSDVDKLFIQLVQTYNQLFEENPINASGVDAKAILSARLSKSRRLENLIAQLPGEKKNGLFGNLIALSLGLTPNFKSNFDLAEDAKLQLSKDTYDDDLDNLLAQIGDQYADLFLAAKNLSDAILLSDILRVNTEITKAPLSASMIKRYDEHHQDLTLLKALVRQQLPEKYKEIFFDQSKNGYAGYIDGGASQEEFYKFIKPILEKMDGTEELLVKLNREDLLRKQRTFDNGSIPHQIHLGELHAILRRQEDFYPFLKDNREKIEKILTFRIPYYVGPLARGNSRFAWMTRKSEETITPWNFEEVVDKGASAQSFIERMTNFDKNLPNEKVLPKHSLLYEYFTVYNELTKVKYVTEGMRKPAFLSGEQKKAIVDLLFKTNRKVTVKQLKEDYFKKIECFDSVEISGVEDRFNASLGTYHDLLKIIKDKDFLDNEENEDILEDIVLTLTLFEDREMIEERLKTYAHLFDDKVMKQLKRRRYTGWGRLSRKLINGIRDKQSGKTILDFLKSDGFANRNFMQLIHDDSLTFKEDIQKAQVSGQGDSLHEHIANLAGSPAIKKGILQTVKVVDELVKVMGRHKPENIVIEMARENQTTQKGQKNSRERMKRIEEGIKELGSQILKEHPVENTQLQNEKLYLYYLQNGRDMYVDQELDINRLSDYDVDHIVPQSFLKDDSIDNKVLTRSDKARGKSDNVPSEEVVKKMKNYWRQLLNAKLITQRKFDNLTKAERGGLSELDKAGFIKRQLVETRQITKHVAQILDSRMNTKYDENDKLIREVKVITLKSKLVSDFRKDFQFYKVREINNYHHAHDAYLNAVVGTALIKKYPKLESEFVYGDYKVYDVRKMIAKSEQEIGKATAKYFFYSNIMNFFKTEITLANGEIRKRPLIETNGETGEIVWDKGRDFATVRKVLSMPQVNIVKKTEVQTGGFSKESILPKRNSDKLIARKKDWDPKKYGGFDSPTVAYSVLVVAKVEKGKSKKLKSVKELLGITIMERSSFEKNPIDFLEAKGYKEVKKDLIIKLPKYSLFELENGRKRMLASAGELQKGNELALPSKYVNFLYLASHYEKLKGSPEDNEQKQLFVEQHKHYLDEIIEQISEFSKRVILADANLDKVLSAYNKHRDKPIREQAENIIHLFTLTNLGAPAAFKYFDTTIDRKRYTSTKEVLDATLIHQSITGLYETRIDLSQLGGDGGEAAAKGSSGGSGGVLNLEEEYRLHEKPVPSSIDPSWLQLFPTVWAERAGMGLANQVPPVVVELRSGASPVAVRQYPMSKEAREGIRPHIQKFLDLGVLVPCRSPWNTPLLPVKKPGTNDYRPVQDLREINKRVQDIHPTVPNPYNLLSSLPPSYTWYSVLDLKDAFFCLRLHPNSQPLFAFEWKDPEKGNTGQLTWTRLPQGFKNSPTLFDEALHRDLAPFRALNPQVVLLQYVDDLLVAAPTYEDCKKGTQKLLQELSKLGYRVSAKKAQLCQREVTYLGYLLKEGKRWLTPARKATVMKIPVPTTPRQVREFLGTAGFCRLWIPGFASLAAPLYPLTKESIPFIWTEEHQQAFDHIKKALLSAPALALPDLTKPFTLYIDERAGVARGVLTQTLGPWRRPVAYLSKKLDPVASGWPTCLKAVAAVALLLKDADKLTLGQNVTVIASHSLESIVRQPPDRWMTNARMTHYQSLLLNERVSFAPPAVLNPATLLPVESEATPVHRCSEILAEETGTRRDLEDQPLPGVPTWYTDGSSFITEGKRRAGAPIVDGKRTVWASSLPEGTSAQKAELVALTQALRLAEGKNINIYTDSRYAFATAHIHGAIYKQRGLLTSAGKDIKNKEEILALLEAIHLPRRVAIIHCPGHQRGSNPVATGNRRADEAAKQAALSTRVLAGTTKPAGKRTADGSEFEKRTADGSEFESPKKKAKVE

SEQ ID NO: 1370 - protein, 2129 aa, synthetic construct
MPAAKRVKLDGGDKKYSIGLDIGTNSVGWAVITDEYKVPSKKFKVLGNTDRHSIKKNLIGALLFDSGETAEATRLKRTARRRYTRRKNRICYLQEIFSNEMAKVDDSFFHRLEESFLVEEDKKHERHPIFGNIVDEVAYHEKYPTIYHLRKKLVDSTDKADLRLIYLALAHMIKFRGHFLIEGDLNPDNSDVDKLFIQLVQTYNQLFEENPINASGVDAKAILSARLSKSRRLENLIAQLPGEKKNGLFGNLIALSLGLTPNFKSNFDLAEDAKLQLSKDTYDDDLDNLLAQIGDQYADLFLAAKNLSDAILLSDILRVNTEITKAPLSASMIKRYDEHHQDLTLLKALVRQQLPEKYKEIFFDQSKNGYAGYIDGGASQEEFYKFIKPILEKMDGTEELLVKLNREDLLRKQRTFDNGSIPHQIHLGELHAILRRQEDFYPFLKDNREKIEKILTFRIPYYVGPLARGNSRFAWMTRKSEETITPWNFEEVVDKGASAQSFIERMTNFDKNLPNEKVLPKHSLLYEYFTVYNELTKVKYVTEGMRKPAFLSGEQKKAIVDLLFKTNRKVTVKQLKEDYFKKIECFDSVEISGVEDRFNASLGTYHDLLKIIKDKDFLDNEENEDILEDIVLTLTLFEDREMIEERLKTYAHLFDDKVMKQLKRRRYTGWGRLSRKLINGIRDKQSGKTILDFLKSDGFANRNFMQLIHDDSLTFKEDIQKAQVSGQGDSLHEHIANLAGSPAIKKGILQTVKVVDELVKVMGRHKPENIVIEMARENQTTQKGQKNSRERMKRIEEGIKELGSQILKEHPVENTQLQNEKLYLYYLQNGRDMYVDQELDINRLSDYDVDHIVPQSFLKDDSIDNKVLTRSDKARGKSDNVPSEEVVKKMKNYWRQLLNAKLITQRKFDNLTKAERGGLSELDKAGFIKRQLVETRQITKHVAQILDSRMNTKYDENDKLIREVKVITLKSKLVSDFRKDFQFYKVREINNYHHAHDAYLNAVVGTALIKKYPKLESEFVYGDYKVYDVRKMIAKSEQEIGKATAKYFFYSNIMNFFKTEITLANGEIRKRPLIETNGETGEIVWDKGRDFATVRKVLSMPQVNIVKKTEVQTGGFSKESILPKRNSDKLIARKKDWDPKKYGGFDSPTVAYSVLVVAKVEKGKSKKLKSVKELLGITIMERSSFEKNPIDFLEAKGYKEVKKDLIIKLPKYSLFELENGRKRMLASAGELQKGNELALPSKYVNFLYLASHYEKLKGSPEDNEQKQLFVEQHKHYLDEIIEQISEFSKRVILADANLDKVLSAYNKHRDKPIREQAENIIHLFTLTNLGAPAAFKYFDTTIDRKRYTSTKEVLDATLIHQSITGLYETRIDLSQLGGDGGAEAAAKEAAAKEAAAKEAAAKALEAEAAAKEAAAKEAAAKEAAAKAGGVLNLEEEYRLHEKPVPSSIDPSWLQLFPTVWAERAGMGLANQVPPVVVELRSGASPVAVRQYPMSKEAREGIRPHIQKFLDLGVLVPCRSPWNTPLLPVKKPGTNDYRPVQDLREINKRVQDIHPTVPNPYNLLSSLPPSYTWYSVLDLKDAFFCLRLHPNSQPLFAFEWKDPEKGNTGQLTWTRLPQGFKNSPTLFNEALHRDLAPFRALNPQVVLLQYVDDLLVAAPTYEDCKKGTQKLLQELSKLGYRVSAKKAQLCQREVTYLGYLLKEGKRWLTPARKATVMKIPVPTTPRQVREFLGTAGFCRLWIPGFASLAAPLYPLTKPSIPFIWTEEHQQAFDHIKKALLSAPALALPDLTKPFTLYIDERAGVARGVLTQTLGPWRRPVAYLSKKLDPVASGWPTCLKAVAAVALLLKDADKLTLGQNVTVIASHSLESIVRQPPDRWMTNARMTHYQSLLLNERVSFAPPAVLNPATLLPVESEATPVHRCSEILAEETGTRRDLEDQPLPGVPTWYTDGSSFITEGKRRAGAPIVDGKRTVWASSLPEGTSAQKAELVALTQALRLAEGKNINIYTDSRYAFATAHIHGAIYKQRGWLTSAGKDIKNKEEILALLEAIHLPRRVAIIHCPGHQRGSNPVATGNRRADEAAKQAALSTRVLAGTTKPAGKRTADGSEFEKRTADGSEFESPKKKAKVE

SEQ ID NO: 1371 - protein, 2098 aa, synthetic construct
MPAAKRVKLDGGDKKYSIGLDIGTNSVGWAVITDEYKVPSKKFKVLGNTDRHSIKKNLIGALLFDSGETAEATRLKRTARRRYTRRKNRICYLQEIFSNEMAKVDDSFFHRLEESFLVEEDKKHERHPIFGNIVDEVAYHEKYPTIYHLRKKLVDSTDKADLRLIYLALAHMIKFRGHFLIEGDLNPDNSDVDKLFIQLVQTYNQLFEENPINASGVDAKAILSARLSKSRRLENLIAQLPGEKKNGLFGNLIALSLGLTPNFKSNFDLAEDAKLQLSKDTYDDDLDNLLAQIGDQYADLFLAAKNLSDAILLSDILRVNTEITKAPLSASMIKRYDEHHQDLTLLKALVRQQLPEKYKEIFFDQSKNGYAGYIDGGASQEEFYKFIKPILEKMDGTEELLVKLNREDLLRKQRTFDNGSIPHQIHLGELHAILRRQEDFYPFLKDNREKIEKILTFRIPYYVGPLARGNSRFAWMTRKSEETITPWNFEEVVDKGASAQSFIERMTNFDKNLPNEKVLPKHSLLYEYFTVYNELTKVKYVTEGMRKPAFLSGEQKKAIVDLLFKTNRKVTVKQLKEDYFKKIECFDSVEISGVEDRFNASLGTYHDLLKIIKDKDFLDNEENEDILEDIVLTLTLFEDREMIEERLKTYAHLFDDKVMKQLKRRRYTGWGRLSRKLINGIRDKQSGKTILDFLKSDGFANRNFMQLIHDDSLTFKEDIQKAQVSGQGDSLHEHIANLAGSPAIKKGILQTVKVVDELVKVMGRHKPENIVIEMARENQTTQKGQKNSRERMKRIEEGIKELGSQILKEHPVENTQLQNEKLYLYYLQNGRDMYVDQELDINRLSDYDVDHIVPQSFLKDDSIDNKVLTRSDKARGKSDNVPSEEVVKKMKNYWRQLLNAKLITQRKFDNLTKAERGGLSELDKAGFIKRQLVETRQITKHVAQILDSRMNTKYDENDKLIREVKVITLKSKLVSDFRKDFQFYKVREINNYHHAHDAYLNAVVGTALIKKYPKLESEFVYGDYKVYDVRKMIAKSEQEIGKATAKYFFYSNIMNFFKTEITLANGEIRKRPLIETNGETGEIVWDKGRDFATVRKVLSMPQVNIVKKTEVQTGGFSKESILPKRNSDKLIARKKDWDPKKYGGFDSPTVAYSVLVVAKVEKGKSKKLKSVKELLGITIMERSSFEKNPIDFLEAKGYKEVKKDLIIKLPKYSLFELENGRKRMLASAGELQKGNELALPSKYVNFLYLASHYEKLKGSPEDNEQKQLFVEQHKHYLDEIIEQISEFSKRVILADANLDKVLSAYNKHRDKPIREQAENIIHLFTLTNLGAPAAFKYFDTTIDRKRYTSTKEVLDATLIHQSITGLYETRIDLSQLGGDGGPAPGGSEAAAKGGTAPLEEEYRLFLEAPIQNVTLLEQWKREIPKVWAEINPPGLASTQAPIHVQLLSTALPVRVRQYPITLEAKRSLRETIRKFRAAGILRPVHSPWNTPLLPVRKSGTSEYRMVQDLREVNKRVETIHPTVPNPYTLLSLLPPDRIWYSVLDLKDAFFCIPLAPESQLIFAFEWADAEEGESGQLTWTRLPQGFKNSPTLFNEALNRDLQGFRLDHPSVSLLQYVDDLLIAADTQAACLSATRDLLMTLAELGYRVSGKKAQLCQEEVTYLGFKIHKGSRSLSNSRTQAILQIPVPKTKRQVREFLGKIGYCRLFIPGFAELAQPLYAATRPGNDPLVWGEKEEEAFQSLKLALTQPPALALPSLDKPFQLFVEETSGAAKGVLTQALGPWKRPVAYLSKRLDPVAAGWPRCLRAIAAAALLTREASKLTFGQDIEITSSHNLESLLRSPPDKWLTNARITQYQVLLLDPPRVRFKQTAALNPATLLPETDDTLPIHHCLDTLDSLTSTRPDLTDQPLAQAEATLFTDGSSYIRDGKRYAGAAVVTLDSVIWAEPLPIGTSAQKAELIALTKALEWSKDKSVNIYTDSRYAFATLHVHGMIYRERGWLTAGGKAIKNAPEILALLTAVWLPKRVAVMHCKGHQKDDAPTSTGNRRADEVAREVAIRPLSTQATISAGKRTADGSEFEKRTADGSEFESPKKKAKVE

SEQ ID NO: 1372 - protein, 2133 aa, synthetic construct
MPAAKRVKLDGGDKKYSIGLDIGTNSVGWAVITDEYKVPSKKFKVLGNTDRHSIKKNLIGALLFDSGETAEATRLKRTARRRYTRRKNRICYLQEIFSNEMAKVDDSFFHRLEESFLVEEDKKHERHPIFGNIVDEVAYHEKYPTIYHLRKKLVDSTDKADLRLIYLALAHMIKFRGHFLIEGDLNPDNSDVDKLFIQLVQTYNQLFEENPINASGVDAKAILSARLSKSRRLENLIAQLPGEKKNGLFGNLIALSLGLTPNFKSNFDLAEDAKLQLSKDTYDDDLDNLLAQIGDQYADLFLAAKNLSDAILLSDILRVNTEITKAPLSASMIKRYDEHHQDLTLLKALVRQQLPEKYKEIFFDQSKNGYAGYIDGGASQEEFYKFIKPILEKMDGTEELLVKLNREDLLRKQRTFDNGSIPHQIHLGELHAILRRQEDFYPFLKDNREKIEKILTFRIPYYVGPLARGNSRFAWMTRKSEETITPWNFEEVVDKGASAQSFIERMTNFDKNLPNEKVLPKHSLLYEYFTVYNELTKVKYVTEGMRKPAFLSGEQKKAIVDLLFKTNRKVTVKQLKEDYFKKIECFDSVEISGVEDRFNASLGTYHDLLKIIKDKDFLDNEENEDILEDIVLTLTLFEDREMIEERLKTYAHLFDDKVMKQLKRRRYTGWGRLSRKLINGIRDKQSGKTILDFLKSDGFANRNFMQLIHDDSLTFKEDIQKAQVSGQGDSLHEHIANLAGSPAIKKGILQTVKVVDELVKVMGRHKPENIVIEMARENQTTQKGQKNSRERMKRIEEGIKELGSQILKEHPVENTQLQNEKLYLYYLQNGRDMYVDQELDINRLSDYDVDHIVPQSFLKDDSIDNKVLTRSDKARGKSDNVPSEEVVKKMKNYWRQLLNAKLITQRKFDNLTKAERGGLSELDKAGFIKRQLVETRQITKHVAQILDSRMNTKYDENDKLIREVKVITLKSKLVSDFRKDFQFYKVREINNYHHAHDAYLNAVVGTALIKKYPKLESEFVYGDYKVYDVRKMIAKSEQEIGKATAKYFFYSNIMNFFKTEITLANGEIRKRPLIETNGETGEIVWDKGRDFATVRKVLSMPQVNIVKKTEVQTGGFSKESILPKRNSDKLIARKKDWDPKKYGGFDSPTVAYSVLVVAKVEKGKSKKLKSVKELLGITIMERSSFEKNPIDFLEAKGYKEVKKDLIIKLPKYSLFELENGRKRMLASAGELQKGNELALPSKYVNFLYLASHYEKLKGSPEDNEQKQLFVEQHKHYLDEIIEQISEFSKRVILADANLDKVLSAYNKHRDKPIREQAENIIHLFTLTNLGAPAAFKYFDTTIDRKRYTSTKEVLDATLIHQSITGLYETRIDLSQLGGDGGAEAAAKEAAAKEAAAKEAAAKALEAEAAAKEAAAKEAAAKEAAAKAGGTAPLEEEYRLFLEAPIQNVTLLEQWKREIPKVWAEINPPGLASTQAPIHVQLLSTALPVRVRQYPITLEAKRSLRETIRKFRAAGILRPVHSPWNTPLLPVRKSGTSEYRMVQDLREVNKRVETIHPTVPNPYTLLSLLPPDRIWYSVLDLKDAFFCIPLAPESQLIFAFEWADAEEGESGQLTWTRLPQGFKNSPTLFNEALNRDLQGFRLDHPSVSLLQYVDDLLIAADTQAACLSATRDLLMTLAELGYRVSGKKAQLCQEEVTYLGFKIHKGSRSLSNSRTQAILQIPVPKTKRQVREFLGKIGYCRLFIPGFAELAQPLYAATRPGNDPLVWGEKEEEAFQSLKLALTQPPALALPSLDKPFQLFVEETSGAAKGVLTQALGPWKRPVAYLSKRLDPVAAGWPRCLRAIAAAALLTREASKLTFGQDIEITSSHNLESLLRSPPDKWLTNARITQYQVLLLDPPRVRFKQTAALNPATLLPETDDTLPIHHCLDTLDSLTSTRPDLTDQPLAQAEATLFTDGSSYIRDGKRYAGAAVVTLDSVIWAEPLPIGTSAQKAELIALTKALEWSKDKSVNIYTDSRYAFATLHVHGMIYRERGWLTAGGKAIKNAPEILALLTAVWLPKRVAVMHCKGHQKDDAPTSTGNRRADEVAREVAIRPLSTQATISAGKRTADGSEFEKRTADGSEFESPKKKAKVE

SEQ ID NO: 1373 - protein, 2117 aa, synthetic construct
MPAAKRVKLDGGDKKYSIGLDIGTNSVGWAVITDEYKVPSKKFKVLGNTDRHSIKKNLIGALLFDSGETAEATRLKRTARRRYTRRKNRICYLQEIFSNEMAKVDDSFFHRLEESFLVEEDKKHERHPIFGNIVDEVAYHEKYPTIYHLRKKLVDSTDKADLRLIYLALAHMIKFRGHFLIEGDLNPDNSDVDKLFIQLVQTYNQLFEENPINASGVDAKAILSARLSKSRRLENLIAQLPGEKKNGLFGNLIALSLGLTPNFKSNFDLAEDAKLQLSKDTYDDDLDNLLAQIGDQYADLFLAAKNLSDAILLSDILRVNTEITKAPLSASMIKRYDEHHQDLTLLKALVRQQLPEKYKEIFFDQSKNGYAGYIDGGASQEEFYKFIKPILEKMDGTEELLVKLNREDLLRKQRTFDNGSIPHQIHLGELHAILRRQEDFYPFLKDNREKIEKILTFRIPYYVGPLARGNSRFAWMTRKSEETITPWNFEEVVDKGASAQSFIERMTNFDKNLPNEKVLPKHSLLYEYFTVYNELTKVKYVTEGMRKPAFLSGEQKKAIVDLLFKTNRKVTVKQLKEDYFKKIECFDSVEISGVEDRFNASLGTYHDLLKIIKDKDFLDNEENEDILEDIVLTLTLFEDREMIEERLKTYAHLFDDKVMKQLKRRRYTGWGRLSRKLINGIRDKQSGKTILDFLKSDGFANRNFMQLIHDDSLTFKEDIQKAQVSGQGDSLHEHIANLAGSPAIKKGILQTVKVVDELVKVMGRHKPENIVIEMARENQTTQKGQKNSRERMKRIEEGIKELGSQILKEHPVENTQLQNEKLYLYYLQNGRDMYVDQELDINRLSDYDVDHIVPQSFLKDDSIDNKVLTRSDKARGKSDNVPSEEVVKKMKNYWRQLLNAKLITQRKFDNLTKAERGGLSELDKAGFIKRQLVETRQITKHVAQILDSRMNTKYDENDKLIREVKVITLKSKLVSDFRKDFQFYKVREINNYHHAHDAYLNAVVGTALIKKYPKLESEFVYGDYKVYDVRKMIAKSEQEIGKATAKYFFYSNIMNFFKTEITLANGEIRKRPLIETNGETGEIVWDKGRDFATVRKVLSMPQVNIVKKTEVQTGGFSKESILPKRNSDKLIARKKDWDPKKYGGFDSPTVAYSVLVVAKVEKGKSKKLKSVKELLGITIMERSSFEKNPIDFLEAKGYKEVKKDLIIKLPKYSLFELENGRKRMLASAGELQKGNELALPSKYVNFLYLASHYEKLKGSPEDNEQKQLFVEQHKHYLDEIIEQISEFSKRVILADANLDKVLSAYNKHRDKPIREQAENIIHLFTLTNLGAPAAFKYFDTTIDRKRYTSTKEVLDATLIHQSITGLYETRIDLSQLGGDGGGGGGSGGGGSGGGGSGGGGSGGGGSGGGGSGGTAPLEEEYRLFLEAPIQNVTLLEQWKREIPKVWAEINPPGLASTQAPIHVQLLSTALPVRVRQYPITLEAKRSLRETIRKFRAAGILRPVHSPWNTPLLPVRKSGTSEYRMVQDLREVNKRVETIHPTVPNPYTLLSLLPPDRIWYSVLDLKDAFFCIPLAPESQLIFAFEWADAEEGESGQLTWTRLPQGFKNSPTLFNEALNRDLQGFRLDHPSVSLLQYVDDLLIAADTQAACLSATRDLLMTLAELGYRVSGKKAQLCQEEVTYLGFKIHKGSRSLSNSRTQAILQIPVPKTKRQVREFLGKIGYCRLFIPGFAELAQPLYAATRPGNDPLVWGEKEEEAFQSLKLALTQPPALALPSLDKPFQLFVEETSGAAKGVLTQALGPWKRPVAYLSKRLDPVAAGWPRCLRAIAAAALLTREASKLTFGQDIEITSSHNLESLLRSPPDKWLTNARITQYQVLLLDPPRVRFKQTAALNPATLLPETDDTLPIHHCLDTLDSLTSTRPDLTDQPLAQAEATLFTDGSSYIRDGKRYAGAAVVTLDSVIWAEPLPIGTSAQKAELIALTKALEWSKDKSVNIYTDSRYAFATLHVHGMIYRERGWLTAGGKAIKNAPEILALLTAVWLPKRVAVMHCKGHQKDDAPTSTGNRRADEVAREVAIRPLSTQATISAGKRTADGSEFEKRTADGSEFESPKKKAKVE

SEQ ID NO: 1374 - protein, 2107 aa, synthetic construct
MPAAKRVKLDGGDKKYSIGLDIGTNSVGWAVITDEYKVPSKKFKVLGNTDRHSIKKNLIGALLFDSGETAEATRLKRTARRRYTRRKNRICYLQEIFSNEMAKVDDSFFHRLEESFLVEEDKKHERHPIFGNIVDEVAYHEKYPTIYHLRKKLVDSTDKADLRLIYLALAHMIKFRGHFLIEGDLNPDNSDVDKLFIQLVQTYNQLFEENPINASGVDAKAILSARLSKSRRLENLIAQLPGEKKNGLFGNLIALSLGLTPNFKSNFDLAEDAKLQLSKDTYDDDLDNLLAQIGDQYADLFLAAKNLSDAILLSDILRVNTEITKAPLSASMIKRYDEHHQDLTLLKALVRQQLPEKYKEIFFDQSKNGYAGYIDGGASQEEFYKFIKPILEKMDGTEELLVKLNREDLLRKQRTFDNGSIPHQIHLGELHAILRRQEDFYPFLKDNREKIEKILTFRIPYYVGPLARGNSRFAWMTRKSEETITPWNFEEVVDKGASAQSFIERMTNFDKNLPNEKVLPKHSLLYEYFTVYNELTKVKYVTEGMRKPAFLSGEQKKAIVDLLFKTNRKVTVKQLKEDYFKKIECFDSVEISGVEDRFNASLGTYHDLLKIIKDKDFLDNEENEDILEDIVLTLTLFEDREMIEERLKTYAHLFDDKVMKQLKRRRYTGWGRLSRKLINGIRDKQSGKTILDFLKSDGFANRNFMQLIHDDSLTFKEDIQKAQVSGQGDSLHEHIANLAGSPAIKKGILQTVKVVDELVKVMGRHKPENIVIEMARENQTTQKGQKNSRERMKRIEEGIKELGSQILKEHPVENTQLQNEKLYLYYLQNGRDMYVDQELDINRLSDYDVDHIVPQSFLKDDSIDNKVLTRSDKARGKSDNVPSEEVVKKMKNYWRQLLNAKLITQRKFDNLTKAERGGLSELDKAGFIKRQLVETRQITKHVAQILDSRMNTKYDENDKLIREVKVITLKSKLVSDFRKDFQFYKVREINNYHHAHDAYLNAVVGTALIKKYPKLESEFVYGDYKVYDVRKMIAKSEQEIGKATAKYFFYSNIMNFFKTEITLANGEIRKRPLIETNGETGEIVWDKGRDFATVRKVLSMPQVNIVKKTEVQTGGFSKESILPKRNSDKLIARKKDWDPKKYGGFDSPTVAYSVLVVAKVEKGKSKKLKSVKELLGITIMERSSFEKNPIDFLEAKGYKEVKKDLIIKLPKYSLFELENGRKRMLASAGELQKGNELALPSKYVNFLYLASHYEKLKGSPEDNEQKQLFVEQHKHYLDEIIEQISEFSKRVILADANLDKVLSAYNKHRDKPIREQAENIIHLFTLTNLGAPAAFKYFDTTIDRKRYTSTKEVLDATLIHQSITGLYETRIDLSQLGGDGGGGGGSGGGGSGGGGSGGGGSGGTAPLEEEYRLFLEAPIQNVTLLEQWKREIPKVWAEINPPGLASTQAPIHVQLLSTALPVRVRQYPITLEAKRSLRETIRKFRAAGILRPVHSPWNTPLLPVRKSGTSEYRMVQDLREVNKRVETIHPTVPNPYTLLSLLPPDRIWYSVLDLKDAFFCIPLAPESQLIFAFEWADAEEGESGQLTWTRLPQGFKNSPTLFNEALNRDLQGFRLDHPSVSLLQYVDDLLIAADTQAACLSATRDLLMTLAELGYRVSGKKAQLCQEEVTYLGFKIHKGSRSLSNSRTQAILQIPVPKTKRQVREFLGKIGYCRLFIPGFAELAQPLYAATRPGNDPLVWGEKEEEAFQSLKLALTQPPALALPSLDKPFQLFVEETSGAAKGVLTQALGPWKRPVAYLSKRLDPVAAGWPRCLRAIAAAALLTREASKLTFGQDIEITSSHNLESLLRSPPDKWLTNARITQYQVLLLDPPRVRFKQTAALNPATLLPETDDTLPIHHCLDTLDSLTSTRPDLTDQPLAQAEATLFTDGSSYIRDGKRYAGAAVVTLDSVIWAEPLPIGTSAQKAELIALTKALEWSKDKSVNIYTDSRYAFATLHVHGMIYRERGWLTAGGKAIKNAPEILALLTAVWLPKRVAVMHCKGHQKDDAPTSTGNRRADEVAREVAIRPLSTQATISAGKRTADGSEFEKRTADGSEFESPKKKAKVE

SEQ ID NO: 1375 - protein, 2093 aa, synthetic construct
MPAAKRVKLDGGDKKYSIGLDIGTNSVGWAVITDEYKVPSKKFKVLGNTDRHSIKKNLIGALLFDSGETAEATRLKRTARRRYTRRKNRICYLQEIFSNEMAKVDDSFFHRLEESFLVEEDKKHERHPIFGNIVDEVAYHEKYPTIYHLRKKLVDSTDKADLRLIYLALAHMIKFRGHFLIEGDLNPDNSDVDKLFIQLVQTYNQLFEENPINASGVDAKAILSARLSKSRRLENLIAQLPGEKKNGLFGNLIALSLGLTPNFKSNFDLAEDAKLQLSKDTYDDDLDNLLAQIGDQYADLFLAAKNLSDAILLSDILRVNTEITKAPLSASMIKRYDEHHQDLTLLKALVRQQLPEKYKEIFFDQSKNGYAGYIDGGASQEEFYKFIKPILEKMDGTEELLVKLNREDLLRKQRTFDNGSIPHQIHLGELHAILRRQEDFYPFLKDNREKIEKILTFRIPYYVGPLARGNSRFAWMTRKSEETITPWNFEEVVDKGASAQSFIERMTNFDKNLPNEKVLPKHSLLYEYFTVYNELTKVKYVTEGMRKPAFLSGEQKKAIVDLLFKTNRKVTVKQLKEDYFKKIECFDSVEISGVEDRFNASLGTYHDLLKIIKDKDFLDNEENEDILEDIVLTLTLFEDREMIEERLKTYAHLFDDKVMKQLKRRRYTGWGRLSRKLINGIRDKQSGKTILDFLKSDGFANRNFMQLIHDDSLTFKEDIQKAQVSGQGDSLHEHIANLAGSPAIKKGILQTVKVVDELVKVMGRHKPENIVIEMARENQTTQKGQKNSRERMKRIEEGIKELGSQILKEHPVENTQLQNEKLYLYYLQNGRDMYVDQELDINRLSDYDVDHIVPQSFLKDDSIDNKVLTRSDKARGKSDNVPSEEVVKKMKNYWRQLLNAKLITQRKFDNLTKAERGGLSELDKAGFIKRQLVETRQITKHVAQILDSRMNTKYDENDKLIREVKVITLKSKLVSDFRKDFQFYKVREINNYHHAHDAYLNAVVGTALIKKYPKLESEFVYGDYKVYDVRKMIAKSEQEIGKATAKYFFYSNIMNFFKTEITLANGEIRKRPLIETNGETGEIVWDKGRDFATVRKVLSMPQVNIVKKTEVQTGGFSKESILPKRNSDKLIARKKDWDPKKYGGFDSPTVAYSVLVVAKVEKGKSKKLKSVKELLGITIMERSSFEKNPIDFLEAKGYKEVKKDLIIKLPKYSLFELENGRKRMLASAGELQKGNELALPSKYVNFLYLASHYEKLKGSPEDNEQKQLFVEQHKHYLDEIIEQISEFSKRVILADANLDKVLSAYNKHRDKPIREQAENIIHLFTLTNLGAPAAFKYFDTTIDRKRYTSTKEVLDATLIHQSITGLYETRIDLSQLGGDGGGSSPAPGGTAPLEEEYRLFLEAPIQNVTLLEQWKREIPKVWAEINPPGLASTQAPIHVQLLSTALPVRVRQYPITLEAKRSLRETIRKFRAAGILRPVHSPWNTPLLPVRKSGTSEYRMVQDLREVNKRVETIHPTVPNPYTLLSLLPPDRIWYSVLDLKDAFFCIPLAPESQLIFAFEWADAEEGESGQLTWTRLPQGFKNSPTLFNEALNRDLQGFRLDHPSVSLLQYVDDLLIAADTQAACLSATRDLLMTLAELGYRVSGKKAQLCQEEVTYLGFKIHKGSRSLSNSRTQAILQIPVPKTKRQVREFLGKIGYCRLFIPGFAELAQPLYAATRPGNDPLVWGEKEEEAFQSLKLALTQPPALALPSLDKPFQLFVEETSGAAKGVLTQALGPWKRPVAYLSKRLDPVAAGWPRCLRAIAAAALLTREASKLTFGQDIEITSSHNLESLLRSPPDKWLTNARITQYQVLLLDPPRVRFKQTAALNPATLLPETDDTLPIHHCLDTLDSLTSTRPDLTDQPLAQAEATLFTDGSSYIRDGKRYAGAAVVTLDSVIWAEPLPIGTSAQKAELIALTKALEWSKDKSVNIYTDSRYAFATLHVHGMIYRERGWLTAGGKAIKNAPEILALLTAVWLPKRVAVMHCKGHQKDDAPTSTGNRRADEVAREVAIRPLSTQATISAGKRTADGSEFEKRTADGSEFESPKKKAKVE

SEQ ID NO: 1376 - protein, 2103 aa, synthetic construct
MPAAKRVKLDGGDKKYSIGLDIGTNSVGWAVITDEYKVPSKKFKVLGNTDRHSIKKNLIGALLFDSGETAEATRLKRTARRRYTRRKNRICYLQEIFSNEMAKVDDSFFHRLEESFLVEEDKKHERHPIFGNIVDEVAYHEKYPTIYHLRKKLVDSTDKADLRLIYLALAHMIKFRGHFLIEGDLNPDNSDVDKLFIQLVQTYNQLFEENPINASGVDAKAILSARLSKSRRLENLIAQLPGEKKNGLFGNLIALSLGLTPNFKSNFDLAEDAKLQLSKDTYDDDLDNLLAQIGDQYADLFLAAKNLSDAILLSDILRVNTEITKAPLSASMIKRYDEHHQDLTLLKALVRQQLPEKYKEIFFDQSKNGYAGYIDGGASQEEFYKFIKPILEKMDGTEELLVKLNREDLLRKQRTFDNGSIPHQIHLGELHAILRRQEDFYPFLKDNREKIEKILTFRIPYYVGPLARGNSRFAWMTRKSEETITPWNFEEVVDKGASAQSFIERMTNFDKNLPNEKVLPKHSLLYEYFTVYNELTKVKYVTEGMRKPAFLSGEQKKAIVDLLFKTNRKVTVKQLKEDYFKKIECFDSVEISGVEDRFNASLGTYHDLLKIIKDKDFLDNEENEDILEDIVLTLTLFEDREMIEERLKTYAHLFDDKVMKQLKRRRYTGWGRLSRKLINGIRDKQSGKTILDFLKSDGFANRNFMQLIHDDSLTFKEDIQKAQVSGQGDSLHEHIANLAGSPAIKKGILQTVKVVDELVKVMGRHKPENIVIEMARENQTTQKGQKNSRERMKRIEEGIKELGSQILKEHPVENTQLQNEKLYLYYLQNGRDMYVDQELDINRLSDYDVDHIVPQSFLKDDSIDNKVLTRSDKARGKSDNVPSEEVVKKMKNYWRQLLNAKLITQRKFDNLTKAERGGLSELDKAGFIKRQLVETRQITKHVAQILDSRMNTKYDENDKLIREVKVITLKSKLVSDFRKDFQFYKVREINNYHHAHDAYLNAVVGTALIKKYPKLESEFVYGDYKVYDVRKMIAKSEQEIGKATAKYFFYSNIMNFFKTEITLANGEIRKRPLIETNGETGEIVWDKGRDFATVRKVLSMPQVNIVKKTEVQTGGFSKESILPKRNSDKLIARKKDWDPKKYGGFDSPTVAYSVLVVAKVEKGKSKKLKSVKELLGITIMERSSFEKNPIDFLEAKGYKEVKKDLIIKLPKYSLFELENGRKRMLASAGELQKGNELALPSKYVNFLYLASHYEKLKGSPEDNEQKQLFVEQHKHYLDEIIEQISEFSKRVILADANLDKVLSAYNKHRDKPIREQAENIIHLFTLTNLGAPAAFKYFDTTIDRKRYTSTKEVLDATLIHQSITGLYETRIDLSQLGGDGGSGSETPGTSESATPESGGTAPLEEEYRLFLEAPIQNVTLLEQWKREIPKVWAEINPPGLASTQAPIHVQLLSTALPVRVRQYPITLEAKRSLRETIRKFRAAGILRPVHSPWNTPLLPVRKSGTSEYRMVQDLREVNKRVETIHPTVPNPYTLLSLLPPDRIWYSVLDLKDAFFCIPLAPESQLIFAFEWADAEEGESGQLTWTRLPQGFKNSPTLFNEALNRDLQGFRLDHPSVSLLQYVDDLLIAADTQAACLSATRDLLMTLAELGYRVSGKKAQLCQEEVTYLGFKIHKGSRSLSNSRTQAILQIPVPKTKRQVREFLGKIGYCRLFIPGFAELAQPLYAATRPGNDPLVWGEKEEEAFQSLKLALTQPPALALPSLDKPFQLFVEETSGAAKGVLTQALGPWKRPVAYLSKRLDPVAAGWPRCLRAIAAAALLTREASKLTFGQDIEITSSHNLESLLRSPPDKWLTNARITQYQVLLLDPPRVRFKQTAALNPATLLPETDDTLPIHHCLDTLDSLTSTRPDLTDQPLAQAEATLFTDGSSYIRDGKRYAGAAVVTLDSVIWAEPLPIGTSAQKAELIALTKALEWSKDKSVNIYTDSRYAFATLHVHGMIYRERGWLTAGGKAIKNAPEILALLTAVWLPKRVAVMHCKGHQKDDAPTSTGNRRADEVAREVAIRPLSTQATISAGKRTADGSEFEKRTADGSEFESPKKKAKVE

SEQ ID NO: 1377 - protein, 2098 aa, synthetic construct
MPAAKRVKLDGGDKKYSIGLDIGTNSVGWAVITDEYKVPSKKFKVLGNTDRHSIKKNLIGALLFDSGETAEATRLKRTARRRYTRRKNRICYLQEIFSNEMAKVDDSFFHRLEESFLVEEDKKHERHPIFGNIVDEVAYHEKYPTIYHLRKKLVDSTDKADLRLIYLALAHMIKFRGHFLIEGDLNPDNSDVDKLFIQLVQTYNQLFEENPINASGVDAKAILSARLSKSRRLENLIAQLPGEKKNGLFGNLIALSLGLTPNFKSNFDLAEDAKLQLSKDTYDDDLDNLLAQIGDQYADLFLAAKNLSDAILLSDILRVNTEITKAPLSASMIKRYDEHHQDLTLLKALVRQQLPEKYKEIFFDQSKNGYAGYIDGGASQEEFYKFIKPILEKMDGTEELLVKLNREDLLRKQRTFDNGSIPHQIHLGELHAILRRQEDFYPFLKDNREKIEKILTFRIPYYVGPLARGNSRFAWMTRKSEETITPWNFEEVVDKGASAQSFIERMTNFDKNLPNEKVLPKHSLLYEYFTVYNELTKVKYVTEGMRKPAFLSGEQKKAIVDLLFKTNRKVTVKQLKEDYFKKIECFDSVEISGVEDRFNASLGTYHDLLKIIKDKDFLDNEENEDILEDIVLTLTLFEDREMIEERLKTYAHLFDDKVMKQLKRRRYTGWGRLSRKLINGIRDKQSGKTILDFLKSDGFANRNFMQLIHDDSLTFKEDIQKAQVSGQGDSLHEHIANLAGSPAIKKGILQTVKVVDELVKVMGRHKPENIVIEMARENQTTQKGQKNSRERMKRIEEGIKELGSQILKEHPVENTQLQNEKLYLYYLQNGRDMYVDQELDINRLSDYDVDHIVPQSFLKDDSIDNKVLTRSDKARGKSDNVPSEEVVKKMKNYWRQLLNAKLITQRKFDNLTKAERGGLSELDKAGFIKRQLVETRQITKHVAQILDSRMNTKYDENDKLIREVKVITLKSKLVSDFRKDFQFYKVREINNYHHAHDAYLNAVVGTALIKKYPKLESEFVYGDYKVYDVRKMIAKSEQEIGKATAKYFFYSNIMNFFKTEITLANGEIRKRPLIETNGETGEIVWDKGRDFATVRKVLSMPQVNIVKKTEVQTGGFSKESILPKRNSDKLIARKKDWDPKKYGGFDSPTVAYSVLVVAKVEKGKSKKLKSVKELLGITIMERSSFEKNPIDFLEAKGYKEVKKDLIIKLPKYSLFELENGRKRMLASAGELQKGNELALPSKYVNFLYLASHYEKLKGSPEDNEQKQLFVEQHKHYLDEIIEQISEFSKRVILADANLDKVLSAYNKHRDKPIREQAENIIHLFTLTNLGAPAAFKYFDTTIDRKRYTSTKEVLDATLIHQSITGLYETRIDLSQLGGDGGPAPEAAAKGGSGGTAPLEEEYRLFLEAPIQNVTLLEQWKREIPKVWAEINPPGLASTQAPIHVQLLSTALPVRVRQYPITLEAKRSLRETIRKFRAAGILRPVHSPWNTPLLPVRKSGTSEYRMVQDLREVNKRVETIHPTVPNPYTLLSLLPPDRIWYSVLDLKDAFFCIPLAPESQLIFAFEWADAEEGESGQLTWTRLPQGFKNSPTLFNEALNRDLQGFRLDHPSVSLLQYVDDLLIAADTQAACLSATRDLLMTLAELGYRVSGKKAQLCQEEVTYLGFKIHKGSRSLSNSRTQAILQIPVPKTKRQVREFLGKIGYCRLFIPGFAELAQPLYAATRPGNDPLVWGEKEEEAFQSLKLALTQPPALALPSLDKPFQLFVEETSGAAKGVLTQALGPWKRPVAYLSKRLDPVAAGWPRCLRAIAAAALLTREASKLTFGQDIEITSSHNLESLLRSPPDKWLTNARITQYQVLLLDPPRVRFKQTAALNPATLLPETDDTLPIHHCLDTLDSLTSTRPDLTDQPLAQAEATLFTDGSSYIRDGKRYAGAAVVTLDSVIWAEPLPIGTSAQKAELIALTKALEWSKDKSVNIYTDSRYAFATLHVHGMIYRERGWLTAGGKAIKNAPEILALLTAVWLPKRVAVMHCKGHQKDDAPTSTGNRRADEVAREVAIRPLSTQATISAGKRTADGSEFEKRTADGSEFESPKKKAKVE

SEQ ID NO: 1378 - protein, 2092 aa, synthetic construct
MPAAKRVKLDGGDKKYSIGLDIGTNSVGWAVITDEYKVPSKKFKVLGNTDRHSIKKNLIGALLFDSGETAEATRLKRTARRRYTRRKNRICYLQEIFSNEMAKVDDSFFHRLEESFLVEEDKKHERHPIFGNIVDEVAYHEKYPTIYHLRKKLVDSTDKADLRLIYLALAHMIKFRGHFLIEGDLNPDNSDVDKLFIQLVQTYNQLFEENPINASGVDAKAILSARLSKSRRLENLIAQLPGEKKNGLFGNLIALSLGLTPNFKSNFDLAEDAKLQLSKDTYDDDLDNLLAQIGDQYADLFLAAKNLSDAILLSDILRVNTEITKAPLSASMIKRYDEHHQDLTLLKALVRQQLPEKYKEIFFDQSKNGYAGYIDGGASQEEFYKFIKPILEKMDGTEELLVKLNREDLLRKQRTFDNGSIPHQIHLGELHAILRRQEDFYPFLKDNREKIEKILTFRIPYYVGPLARGNSRFAWMTRKSEETITPWNFEEVVDKGASAQSFIERMTNFDKNLPNEKVLPKHSLLYEYFTVYNELTKVKYVTEGMRKPAFLSGEQKKAIVDLLFKTNRKVTVKQLKEDYFKKIECFDSVEISGVEDRFNASLGTYHDLLKIIKDKDFLDNEENEDILEDIVLTLTLFEDREMIEERLKTYAHLFDDKVMKQLKRRRYTGWGRLSRKLINGIRDKQSGKTILDFLKSDGFANRNFMQLIHDDSLTFKEDIQKAQVSGQGDSLHEHIANLAGSPAIKKGILQTVKVVDELVKVMGRHKPENIVIEMARENQTTQKGQKNSRERMKRIEEGIKELGSQILKEHPVENTQLQNEKLYLYYLQNGRDMYVDQELDINRLSDYDVDHIVPQSFLKDDSIDNKVLTRSDKARGKSDNVPSEEVVKKMKNYWRQLLNAKLITQRKFDNLTKAERGGLSELDKAGFIKRQLVETRQITKHVAQILDSRMNTKYDENDKLIREVKVITLKSKLVSDFRKDFQFYKVREINNYHHAHDAYLNAVVGTALIKKYPKLESEFVYGDYKVYDVRKMIAKSEQEIGKATAKYFFYSNIMNFFKTEITLANGEIRKRPLIETNGETGEIVWDKGRDFATVRKVLSMPQVNIVKKTEVQTGGFSKESILPKRNSDKLIARKKDWDPKKYGGFDSPTVAYSVLVVAKVEKGKSKKLKSVKELLGITIMERSSFEKNPIDFLEAKGYKEVKKDLIIKLPKYSLFELENGRKRMLASAGELQKGNELALPSKYVNFLYLASHYEKLKGSPEDNEQKQLFVEQHKHYLDEIIEQISEFSKRVILADANLDKVLSAYNKHRDKPIREQAENIIHLFTLTNLGAPAAFKYFDTTIDRKRYTSTKEVLDATLIHQSITGLYETRIDLSQLGGDGGPAPAPGGTAPLEEEYRLFLEAPIQNVTLLEQWKREIPKVWAEINPPGLASTQAPIHVQLLSTALPVRVRQYPITLEAKRSLRETIRKFRAAGILRPVHSPWNTPLLPVRKSGTSEYRMVQDLREVNKRVETIHPTVPNPYTLLSLLPPDRIWYSVLDLKDAFFCIPLAPESQLIFAFEWADAEEGESGQLTWTRLPQGFKNSPTLFNEALNRDLQGFRLDHPSVSLLQYVDDLLIAADTQAACLSATRDLLMTLAELGYRVSGKKAQLCQEEVTYLGFKIHKGSRSLSNSRTQAILQIPVPKTKRQVREFLGKIGYCRLFIPGFAELAQPLYAATRPGNDPLVWGEKEEEAFQSLKLALTQPPALALPSLDKPFQLFVEETSGAAKGVLTQALGPWKRPVAYLSKRLDPVAAGWPRCLRAIAAAALLTREASKLTFGQDIEITSSHNLESLLRSPPDKWLTNARITQYQVLLLDPPRVRFKQTAALNPATLLPETDDTLPIHHCLDTLDSLTSTRPDLTDQPLAQAEATLFTDGSSYIRDGKRYAGAAVVTLDSVIWAEPLPIGTSAQKAELIALTKALEWSKDKSVNIYTDSRYAFATLHVHGMIYRERGWLTAGGKAIKNAPEILALLTAVWLPKRVAVMHCKGHQKDDAPTSTGNRRADEVAREVAIRPLSTQATISAGKRTADGSEFEKRTADGSEFESPKKKAKVE

SEQ ID NO: 1379 - protein, 2098 aa, synthetic construct
MPAAKRVKLDGGDKKYSIGLDIGTNSVGWAVITDEYKVPSKKFKVLGNTDRHSIKKNLIGALLFDSGETAEATRLKRTARRRYTRRKNRICYLQEIFSNEMAKVDDSFFHRLEESFLVEEDKKHERHPIFGNIVDEVAYHEKYPTIYHLRKKLVDSTDKADLRLIYLALAHMIKFRGHFLIEGDLNPDNSDVDKLFIQLVQTYNQLFEENPINASGVDAKAILSARLSKSRRLENLIAQLPGEKKNGLFGNLIALSLGLTPNFKSNFDLAEDAKLQLSKDTYDDDLDNLLAQIGDQYADLFLAAKNLSDAILLSDILRVNTEITKAPLSASMIKRYDEHHQDLTLLKALVRQQLPEKYKEIFFDQSKNGYAGYIDGGASQEEFYKFIKPILEKMDGTEELLVKLNREDLLRKQRTFDNGSIPHQIHLGELHAILRRQEDFYPFLKDNREKIEKILTFRIPYYVGPLARGNSRFAWMTRKSEETITPWNFEEVVDKGASAQSFIERMTNFDKNLPNEKVLPKHSLLYEYFTVYNELTKVKYVTEGMRKPAFLSGEQKKAIVDLLFKTNRKVTVKQLKEDYFKKIECFDSVEISGVEDRFNASLGTYHDLLKIIKDKDFLDNEENEDILEDIVLTLTLFEDREMIEERLKTYAHLFDDKVMKQLKRRRYTGWGRLSRKLINGIRDKQSGKTILDFLKSDGFANRNFMQLIHDDSLTFKEDIQKAQVSGQGDSLHEHIANLAGSPAIKKGILQTVKVVDELVKVMGRHKPENIVIEMARENQTTQKGQKNSRERMKRIEEGIKELGSQILKEHPVENTQLQNEKLYLYYLQNGRDMYVDQELDINRLSDYDVDHIVPQSFLKDDSIDNKVLTRSDKARGKSDNVPSEEVVKKMKNYWRQLLNAKLITQRKFDNLTKAERGGLSELDKAGFIKRQLVETRQITKHVAQILDSRMNTKYDENDKLIREVKVITLKSKLVSDFRKDFQFYKVREINNYHHAHDAYLNAVVGTALIKKYPKLESEFVYGDYKVYDVRKMIAKSEQEIGKATAKYFFYSNIMNFFKTEITLANGEIRKRPLIETNGETGEIVWDKGRDFATVRKVLSMPQVNIVKKTEVQTGGFSKESILPKRNSDKLIARKKDWDPKKYGGFDSPTVAYSVLVVAKVEKGKSKKLKSVKELLGITIMERSSFEKNPIDFLEAKGYKEVKKDLIIKLPKYSLFELENGRKRMLASAGELQKGNELALPSKYVNFLYLASHYEKLKGSPEDNEQKQLFVEQHKHYLDEIIEQISEFSKRVILADANLDKVLSAYNKHRDKPIREQAENIIHLFTLTNLGAPAAFKYFDTTIDRKRYTSTKEVLDATLIHQSITGLYETRIDLSQLGGDGGGGGEAAAKGGSGGTAPLEEEYRLFLEAPIQNVTLLEQWKREIPKVWAEINPPGLASTQAPIHVQLLSTALPVRVRQYPITLEAKRSLRETIRKFRAAGILRPVHSPWNTPLLPVRKSGTSEYRMVQDLREVNKRVETIHPTVPNPYTLLSLLPPDRIWYSVLDLKDAFFCIPLAPESQLIFAFEWADAEEGESGQLTWTRLPQGFKNSPTLFNEALNRDLQGFRLDHPSVSLLQYVDDLLIAADTQAACLSATRDLLMTLAELGYRVSGKKAQLCQEEVTYLGFKIHKGSRSLSNSRTQAILQIPVPKTKRQVREFLGKIGYCRLFIPGFAELAQPLYAATRPGNDPLVWGEKEEEAFQSLKLALTQPPALALPSLDKPFQLFVEETSGAAKGVLTQALGPWKRPVAYLSKRLDPVAAGWPRCLRAIAAAALLTREASKLTFGQDIEITSSHNLESLLRSPPDKWLTNARITQYQVLLLDPPRVRFKQTAALNPATLLPETDDTLPIHHCLDTLDSLTSTRPDLTDQPLAQAEATLFTDGSSYIRDGKRYAGAAVVTLDSVIWAEPLPIGTSAQKAELIALTKALEWSKDKSVNIYTDSRYAFATLHVHGMIYRERGWLTAGGKAIKNAPEILALLTAVWLPKRVAVMHCKGHQKDDAPTSTGNRRADEVAREVAIRPLSTQATISAGKRTADGSEFEKRTADGSEFESPKKKAKVE

SEQ ID NO: 1380 - protein, 2092 aa, synthetic construct
MPAAKRVKLDGGDKKYSIGLDIGTNSVGWAVITDEYKVPSKKFKVLGNTDRHSIKKNLIGALLFDSGETAEATRLKRTARRRYTRRKNRICYLQEIFSNEMAKVDDSFFHRLEESFLVEEDKKHERHPIFGNIVDEVAYHEKYPTIYHLRKKLVDSTDKADLRLIYLALAHMIKFRGHFLIEGDLNPDNSDVDKLFIQLVQTYNQLFEENPINASGVDAKAILSARLSKSRRLENLIAQLPGEKKNGLFGNLIALSLGLTPNFKSNFDLAEDAKLQLSKDTYDDDLDNLLAQIGDQYADLFLAAKNLSDAILLSDILRVNTEITKAPLSASMIKRYDEHHQDLTLLKALVRQQLPEKYKEIFFDQSKNGYAGYIDGGASQEEFYKFIKPILEKMDGTEELLVKLNREDLLRKQRTFDNGSIPHQIHLGELHAILRRQEDFYPFLKDNREKIEKILTFRIPYYVGPLARGNSRFAWMTRKSEETITPWNFEEVVDKGASAQSFIERMTNFDKNLPNEKVLPKHSLLYEYFTVYNELTKVKYVTEGMRKPAFLSGEQKKAIVDLLFKTNRKVTVKQLKEDYFKKIECFDSVEISGVEDRFNASLGTYHDLLKIIKDKDFLDNEENEDILEDIVLTLTLFEDREMIEERLKTYAHLFDDKVMKQLKRRRYTGWGRLSRKLINGIRDKQSGKTILDFLKSDGFANRNFMQLIHDDSLTFKEDIQKAQVSGQGDSLHEHIANLAGSPAIKKGILQTVKVVDELVKVMGRHKPENIVIEMARENQTTQKGQKNSRERMKRIEEGIKELGSQILKEHPVENTQLQNEKLYLYYLQNGRDMYVDQELDINRLSDYDVDHIVPQSFLKDDSIDNKVLTRSDKARGKSDNVPSEEVVKKMKNYWRQLLNAKLITQRKFDNLTKAERGGLSELDKAGFIKRQLVETRQITKHVAQILDSRMNTKYDENDKLIREVKVITLKSKLVSDFRKDFQFYKVREINNYHHAHDAYLNAVVGTALIKKYPKLESEFVYGDYKVYDVRKMIAKSEQEIGKATAKYFFYSNIMNFFKTEITLANGEIRKRPLIETNGETGEIVWDKGRDFATVRKVLSMPQVNIVKKTEVQTGGFSKESILPKRNSDKLIARKKDWDPKKYGGFDSPTVAYSVLVVAKVEKGKSKKLKSVKELLGITIMERSSFEKNPIDFLEAKGYKEVKKDLIIKLPKYSLFELENGRKRMLASAGELQKGNELALPSKYVNFLYLASHYEKLKGSPEDNEQKQLFVEQHKHYLDEIIEQISEFSKRVILADANLDKVLSAYNKHRDKPIREQAENIIHLFTLTNLGAPAAFKYFDTTIDRKRYTSTKEVLDATLIHQSITGLYETRIDLSQLGGDGGEAAAKGGTAPLEEEYRLFLEAPIQNVTLLEQWKREIPKVWAEINPPGLASTQAPIHVQLLSTALPVRVRQYPITLEAKRSLRETIRKFRAAGILRPVHSPWNTPLLPVRKSGTSEYRMVQDLREVNKRVETIHPTVPNPYTLLSLLPPDRIWYSVLDLKDAFFCIPLAPESQLIFAFEWADAEEGESGQLTWTRLPQGFKNSPTLFNEALNRDLQGFRLDHPSVSLLQYVDDLLIAADTQAACLSATRDLLMTLAELGYRVSGKKAQLCQEEVTYLGFKIHKGSRSLSNSRTQAILQIPVPKTKRQVREFLGKIGYCRLFIPGFAELAQPLYAATRPGNDPLVWGEKEEEAFQSLKLALTQPPALALPSLDKPFQLFVEETSGAAKGVLTQALGPWKRPVAYLSKRLDPVAAGWPRCLRAIAAAALLTREASKLTFGQDIEITSSHNLESLLRSPPDKWLTNARITQYQVLLLDPPRVRFKQTAALNPATLLPETDDTLPIHHCLDTLDSLTSTRPDLTDQPLAQAEATLFTDGSSYIRDGKRYAGAAVVTLDSVIWAEPLPIGTSAQKAELIALTKALEWSKDKSVNIYTDSRYAFATLHVHGMIYRERGWLTAGGKAIKNAPEILALLTAVWLPKRVAVMHCKGHQKDDAPTSTGNRRADEVAREVAIRPLSTQATISAGKRTADGSEFEKRTADGSEFESPKKKAKVE

SEQ ID NO: 1381 - protein, 2098 aa, synthetic construct
MPAAKRVKLDGGDKKYSIGLDIGTNSVGWAVITDEYKVPSKKFKVLGNTDRHSIKKNLIGALLFDSGETAEATRLKRTARRRYTRRKNRICYLQEIFSNEMAKVDDSFFHRLEESFLVEEDKKHERHPIFGNIVDEVAYHEKYPTIYHLRKKLVDSTDKADLRLIYLALAHMIKFRGHFLIEGDLNPDNSDVDKLFIQLVQTYNQLFEENPINASGVDAKAILSARLSKSRRLENLIAQLPGEKKNGLFGNLIALSLGLTPNFKSNFDLAEDAKLQLSKDTYDDDLDNLLAQIGDQYADLFLAAKNLSDAILLSDILRVNTEITKAPLSASMIKRYDEHHQDLTLLKALVRQQLPEKYKEIFFDQSKNGYAGYIDGGASQEEFYKFIKPILEKMDGTEELLVKLNREDLLRKQRTFDNGSIPHQIHLGELHAILRRQEDFYPFLKDNREKIEKILTFRIPYYVGPLARGNSRFAWMTRKSEETITPWNFEEVVDKGASAQSFIERMTNFDKNLPNEKVLPKHSLLYEYFTVYNELTKVKYVTEGMRKPAFLSGEQKKAIVDLLFKTNRKVTVKQLKEDYFKKIECFDSVEISGVEDRFNASLGTYHDLLKIIKDKDFLDNEENEDILEDIVLTLTLFEDREMIEERLKTYAHLFDDKVMKQLKRRRYTGWGRLSRKLINGIRDKQSGKTILDFLKSDGFANRNFMQLIHDDSLTFKEDIQKAQVSGQGDSLHEHIANLAGSPAIKKGILQTVKVVDELVKVMGRHKPENIVIEMARENQTTQKGQKNSRERMKRIEEGIKELGSQILKEHPVENTQLQNEKLYLYYLQNGRDMYVDQELDINRLSDYDVDHIVPQSFLKDDSIDNKVLTRSDKARGKSDNVPSEEVVKKMKNYWRQLLNAKLITQRKFDNLTKAERGGLSELDKAGFIKRQLVETRQITKHVAQILDSRMNTKYDENDKLIREVKVITLKSKLVSDFRKDFQFYKVREINNYHHAHDAYLNAVVGTALIKKYPKLESEFVYGDYKVYDVRKMIAKSEQEIGKATAKYFFYSNIMNFFKTEITLANGEIRKRPLIETNGETGEIVWDKGRDFATVRKVLSMPQVNIVKKTEVQTGGFSKESILPKRNSDKLIARKKDWDPKKYGGFDSPTVAYSVLVVAKVEKGKSKKLKSVKELLGITIMERSSFEKNPIDFLEAKGYKEVKKDLIIKLPKYSLFELENGRKRMLASAGELQKGNELALPSKYVNFLYLASHYEKLKGSPEDNEQKQLFVEQHKHYLDEIIEQISEFSKRVILADANLDKVLSAYNKHRDKPIREQAENIIHLFTLTNLGAPAAFKYFDTTIDRKRYTSTKEVLDATLIHQSITGLYETRIDLSQLGGDGGGSSEAAAKPAPGGTAPLEEEYRLFLEAPIQNVTLLEQWKREIPKVWAEINPPGLASTQAPIHVQLLSTALPVRVRQYPITLEAKRSLRETIRKFRAAGILRPVHSPWNTPLLPVRKSGTSEYRMVQDLREVNKRVETIHPTVPNPYTLLSLLPPDRIWYSVLDLKDAFFCIPLAPESQLIFAFEWADAEEGESGQLTWTRLPQGFKNSPTLFNEALNRDLQGFRLDHPSVSLLQYVDDLLIAADTQAACLSATRDLLMTLAELGYRVSGKKAQLCQEEVTYLGFKIHKGSRSLSNSRTQAILQIPVPKTKRQVREFLGKIGYCRLFIPGFAELAQPLYAATRPGNDPLVWGEKEEEAFQSLKLALTQPPALALPSLDKPFQLFVEETSGAAKGVLTQALGPWKRPVAYLSKRLDPVAAGWPRCLRAIAAAALLTREASKLTFGQDIEITSSHNLESLLRSPPDKWLTNARITQYQVLLLDPPRVRFKQTAALNPATLLPETDDTLPIHHCLDTLDSLTSTRPDLTDQPLAQAEATLFTDGSSYIRDGKRYAGAAVVTLDSVIWAEPLPIGTSAQKAELIALTKALEWSKDKSVNIYTDSRYAFATLHVHGMIYRERGWLTAGGKAIKNAPEILALLTAVWLPKRVAVMHCKGHQKDDAPTSTGNRRADEVAREVAIRPLSTQATISAGKRTADGSEFEKRTADGSEFESPKKKAKVE

SEQ ID NO: 1382 - protein, 2105 aa, synthetic construct
MPAAKRVKLDGGDKKYSIGLDIGTNSVGWAVITDEYKVPSKKFKVLGNTDRHSIKKNLIGALLFDSGETAEATRLKRTARRRYTRRKNRICYLQEIFSNEMAKVDDSFFHRLEESFLVEEDKKHERHPIFGNIVDEVAYHEKYPTIYHLRKKLVDSTDKADLRLIYLALAHMIKFRGHFLIEGDLNPDNSDVDKLFIQLVQTYNQLFEENPINASGVDAKAILSARLSKSRRLENLIAQLPGEKKNGLFGNLIALSLGLTPNFKSNFDLAEDAKLQLSKDTYDDDLDNLLAQIGDQYADLFLAAKNLSDAILLSDILRVNTEITKAPLSASMIKRYDEHHQDLTLLKALVRQQLPEKYKEIFFDQSKNGYAGYIDGGASQEEFYKFIKPILEKMDGTEELLVKLNREDLLRKQRTFDNGSIPHQIHLGELHAILRRQEDFYPFLKDNREKIEKILTFRIPYYVGPLARGNSRFAWMTRKSEETITPWNFEEVVDKGASAQSFIERMTNFDKNLPNEKVLPKHSLLYEYFTVYNELTKVKYVTEGMRKPAFLSGEQKKAIVDLLFKTNRKVTVKQLKEDYFKKIECFDSVEISGVEDRFNASLGTYHDLLKIIKDKDFLDNEENEDILEDIVLTLTLFEDREMIEERLKTYAHLFDDKVMKQLKRRRYTGWGRLSRKLINGIRDKQSGKTILDFLKSDGFANRNFMQLIHDDSLTFKEDIQKAQVSGQGDSLHEHIANLAGSPAIKKGILQTVKVVDELVKVMGRHKPENIVIEMARENQTTQKGQKNSRERMKRIEEGIKELGSQILKEHPVENTQLQNEKLYLYYLQNGRDMYVDQELDINRLSDYDVDHIVPQSFLKDDSIDNKVLTRSDKARGKSDNVPSEEVVKKMKNYWRQLLNAKLITQRKFDNLTKAERGGLSELDKAGFIKRQLVETRQITKHVAQILDSRMNTKYDENDKLIREVKVITLKSKLVSDFRKDFQFYKVREINNYHHAHDAYLNAVVGTALIKKYPKLESEFVYGDYKVYDVRKMIAKSEQEIGKATAKYFFYSNIMNFFKTEITLANGEIRKRPLIETNGETGEIVWDKGRDFATVRKVLSMPQVNIVKKTEVQTGGFSKESILPKRNSDKLIARKKDWDPKKYGGFDSPTVAYSVLVVAKVEKGKSKKLKSVKELLGITIMERSSFEKNPIDFLEAKGYKEVKKDLIIKLPKYSLFELENGRKRMLASAGELQKGNELALPSKYVNFLYLASHYEKLKGSPEDNEQKQLFVEQHKHYLDEIIEQISEFSKRVILADANLDKVLSAYNKHRDKPIREQAENIIHLFTLTNLGAPAAFKYFDTTIDRKRYTSTKEVLDATLIHQSITGLYETRIDLSQLGGDGGGSSGSSGSSGSSGSSGSSGGTAPLEEEYRLFLEAPIQNVTLLEQWKREIPKVWAEINPPGLASTQAPIHVQLLSTALPVRVRQYPITLEAKRSLRETIRKFRAAGILRPVHSPWNTPLLPVRKSGTSEYRMVQDLREVNKRVETIHPTVPNPYTLLSLLPPDRIWYSVLDLKDAFFCIPLAPESQLIFAFEWADAEEGESGQLTWTRLPQGFKNSPTLFNEALNRDLQGFRLDHPSVSLLQYVDDLLIAADTQAACLSATRDLLMTLAELGYRVSGKKAQLCQEEVTYLGFKIHKGSRSLSNSRTQAILQIPVPKTKRQVREFLGKIGYCRLFIPGFAELAQPLYAATRPGNDPLVWGEKEEEAFQSLKLALTQPPALALPSLDKPFQLFVEETSGAAKGVLTQALGPWKRPVAYLSKRLDPVAAGWPRCLRAIAAAALLTREASKLTFGQDIEITSSHNLESLLRSPPDKWLTNARITQYQVLLLDPPRVRFKQTAALNPATLLPETDDTLPIHHCLDTLDSLTSTRPDLTDQPLAQAEATLFTDGSSYIRDGKRYAGAAVVTLDSVIWAEPLPIGTSAQKAELIALTKALEWSKDKSVNIYTDSRYAFATLHVHGMIYRERGWLTAGGKAIKNAPEILALLTAVWLPKRVAVMHCKGHQKDDAPTSTGNRRADEVAREVAIRPLSTQATISAGKRTADGSEFEKRTADGSEFESPKKKAKVE

SEQ ID NO: 1383 - protein, 2096 aa, synthetic construct
MPAAKRVKLDGGDKKYSIGLDIGTNSVGWAVITDEYKVPSKKFKVLGNTDRHSIKKNLIGALLFDSGETAEATRLKRTARRRYTRRKNRICYLQEIFSNEMAKVDDSFFHRLEESFLVEEDKKHERHPIFGNIVDEVAYHEKYPTIYHLRKKLVDSTDKADLRLIYLALAHMIKFRGHFLIEGDLNPDNSDVDKLFIQLVQTYNQLFEENPINASGVDAKAILSARLSKSRRLENLIAQLPGEKKNGLFGNLIALSLGLTPNFKSNFDLAEDAKLQLSKDTYDDDLDNLLAQIGDQYADLFLAAKNLSDAILLSDILRVNTEITKAPLSASMIKRYDEHHQDLTLLKALVRQQLPEKYKEIFFDQSKNGYAGYIDGGASQEEFYKFIKPILEKMDGTEELLVKLNREDLLRKQRTFDNGSIPHQIHLGELHAILRRQEDFYPFLKDNREKIEKILTFRIPYYVGPLARGNSRFAWMTRKSEETITPWNFEEVVDKGASAQSFIERMTNFDKNLPNEKVLPKHSLLYEYFTVYNELTKVKYVTEGMRKPAFLSGEQKKAIVDLLFKTNRKVTVKQLKEDYFKKIECFDSVEISGVEDRFNASLGTYHDLLKIIKDKDFLDNEENEDILEDIVLTLTLFEDREMIEERLKTYAHLFDDKVMKQLKRRRYTGWGRLSRKLINGIRDKQSGKTILDFLKSDGFANRNFMQLIHDDSLTFKEDIQKAQVSGQGDSLHEHIANLAGSPAIKKGILQTVKVVDELVKVMGRHKPENIVIEMARENQTTQKGQKNSRERMKRIEEGIKELGSQILKEHPVENTQLQNEKLYLYYLQNGRDMYVDQELDINRLSDYDVDHIVPQSFLKDDSIDNKVLTRSDKARGKSDNVPSEEVVKKMKNYWRQLLNAKLITQRKFDNLTKAERGGLSELDKAGFIKRQLVETRQITKHVAQILDSRMNTKYDENDKLIREVKVITLKSKLVSDFRKDFQFYKVREINNYHHAHDAYLNAVVGTALIKKYPKLESEFVYGDYKVYDVRKMIAKSEQEIGKATAKYFFYSNIMNFFKTEITLANGEIRKRPLIETNGETGEIVWDKGRDFATVRKVLSMPQVNIVKKTEVQTGGFSKESILPKRNSDKLIARKKDWDPKKYGGFDSPTVAYSVLVVAKVEKGKSKKLKSVKELLGITIMERSSFEKNPIDFLEAKGYKEVKKDLIIKLPKYSLFELENGRKRMLASAGELQKGNELALPSKYVNFLYLASHYEKLKGSPEDNEQKQLFVEQHKHYLDEIIEQISEFSKRVILADANLDKVLSAYNKHRDKPIREQAENIIHLFTLTNLGAPAAFKYFDTTIDRKRYTSTKEVLDATLIHQSITGLYETRIDLSQLGGDGGGGSPAPGGGGGTAPLEEEYRLFLEAPIQNVTLLEQWKREIPKVWAEINPPGLASTQAPIHVQLLSTALPVRVRQYPITLEAKRSLRETIRKFRAAGILRPVHSPWNTPLLPVRKSGTSEYRMVQDLREVNKRVETIHPTVPNPYTLLSLLPPDRIWYSVLDLKDAFFCIPLAPESQLIFAFEWADAEEGESGQLTWTRLPQGFKNSPTLFNEALNRDLQGFRLDHPSVSLLQYVDDLLIAADTQAACLSATRDLLMTLAELGYRVSGKKAQLCQEEVTYLGFKIHKGSRSLSNSRTQAILQIPVPKTKRQVREFLGKIGYCRLFIPGFAELAQPLYAATRPGNDPLVWGEKEEEAFQSLKLALTQPPALALPSLDKPFQLFVEETSGAAKGVLTQALGPWKRPVAYLSKRLDPVAAGWPRCLRAIAAAALLTREASKLTFGQDIEITSSHNLESLLRSPPDKWLTNARITQYQVLLLDPPRVRFKQTAALNPATLLPETDDTLPIHHCLDTLDSLTSTRPDLTDQPLAQAEATLFTDGSSYIRDGKRYAGAAVVTLDSVIWAEPLPIGTSAQKAELIALTKALEWSKDKSVNIYTDSRYAFATLHVHGMIYRERGWLTAGGKAIKNAPEILALLTAVWLPKRVAVMHCKGHQKDDAPTSTGNRRADEVAREVAIRPLSTQATISAGKRTADGSEFEKRTADGSEFESPKKKAKVE

SEQ ID NO: 1384 - protein, 2098 aa, synthetic construct
MPAAKRVKLDGGDKKYSIGLDIGTNSVGWAVITDEYKVPSKKFKVLGNTDRHSIKKNLIGALLFDSGETAEATRLKRTARRRYTRRKNRICYLQEIFSNEMAKVDDSFFHRLEESFLVEEDKKHERHPIFGNIVDEVAYHEKYPTIYHLRKKLVDSTDKADLRLIYLALAHMIKFRGHFLIEGDLNPDNSDVDKLFIQLVQTYNQLFEENPINASGVDAKAILSARLSKSRRLENLIAQLPGEKKNGLFGNLIALSLGLTPNFKSNFDLAEDAKLQLSKDTYDDDLDNLLAQIGDQYADLFLAAKNLSDAILLSDILRVNTEITKAPLSASMIKRYDEHHQDLTLLKALVRQQLPEKYKEIFFDQSKNGYAGYIDGGASQEEFYKFIKPILEKMDGTEELLVKLNREDLLRKQRTFDNGSIPHQIHLGELHAILRRQEDFYPFLKDNREKIEKILTFRIPYYVGPLARGNSRFAWMTRKSEETITPWNFEEVVDKGASAQSFIERMTNFDKNLPNEKVLPKHSLLYEYFTVYNELTKVKYVTEGMRKPAFLSGEQKKAIVDLLFKTNRKVTVKQLKEDYFKKIECFDSVEISGVEDRFNASLGTYHDLLKIIKDKDFLDNEENEDILEDIVLTLTLFEDREMIEERLKTYAHLFDDKVMKQLKRRRYTGWGRLSRKLINGIRDKQSGKTILDFLKSDGFANRNFMQLIHDDSLTFKEDIQKAQVSGQGDSLHEHIANLAGSPAIKKGILQTVKVVDELVKVMGRHKPENIVIEMARENQTTQKGQKNSRERMKRIEEGIKELGSQILKEHPVENTQLQNEKLYLYYLQNGRDMYVDQELDINRLSDYDVDHIVPQSFLKDDSIDNKVLTRSDKARGKSDNVPSEEVVKKMKNYWRQLLNAKLITQRKFDNLTKAERGGLSELDKAGFIKRQLVETRQITKHVAQILDSRMNTKYDENDKLIREVKVITLKSKLVSDFRKDFQFYKVREINNYHHAHDAYLNAVVGTALIKKYPKLESEFVYGDYKVYDVRKMIAKSEQEIGKATAKYFFYSNIMNFFKTEITLANGEIRKRPLIETNGETGEIVWDKGRDFATVRKVLSMPQVNIVKKTEVQTGGFSKESILPKRNSDKLIARKKDWDPKKYGGFDSPTVAYSVLVVAKVEKGKSKKLKSVKELLGITIMERSSFEKNPIDFLEAKGYKEVKKDLIIKLPKYSLFELENGRKRMLASAGELQKGNELALPSKYVNFLYLASHYEKLKGSPEDNEQKQLFVEQHKHYLDEIIEQISEFSKRVILADANLDKVLSAYNKHRDKPIREQAENIIHLFTLTNLGAPAAFKYFDTTIDRKRYTSTKEVLDATLIHQSITGLYETRIDLSQLGGDGGGGGEAAAKPAPGGTAPLEEEYRLFLEAPIQNVTLLEQWKREIPKVWAEINPPGLASTQAPIHVQLLSTALPVRVRQYPITLEAKRSLRETIRKFRAAGILRPVHSPWNTPLLPVRKSGTSEYRMVQDLREVNKRVETIHPTVPNPYTLLSLLPPDRIWYSVLDLKDAFFCIPLAPESQLIFAFEWADAEEGESGQLTWTRLPQGFKNSPTLFNEALNRDLQGFRLDHPSVSLLQYVDDLLIAADTQAACLSATRDLLMTLAELGYRVSGKKAQLCQEEVTYLGFKIHKGSRSLSNSRTQAILQIPVPKTKRQVREFLGKIGYCRLFIPGFAELAQPLYAATRPGNDPLVWGEKEEEAFQSLKLALTQPPALALPSLDKPFQLFVEETSGAAKGVLTQALGPWKRPVAYLSKRLDPVAAGWPRCLRAIAAAALLTREASKLTFGQDIEITSSHNLESLLRSPPDKWLTNARITQYQVLLLDPPRVRFKQTAALNPATLLPETDDTLPIHHCLDTLDSLTSTRPDLTDQPLAQAEATLFTDGSSYIRDGKRYAGAAVVTLDSVIWAEPLPIGTSAQKAELIALTKALEWSKDKSVNIYTDSRYAFATLHVHGMIYRERGWLTAGGKAIKNAPEILALLTAVWLPKRVAVMHCKGHQKDDAPTSTGNRRADEVAREVAIRPLSTQATISAGKRTADGSEFEKRTADGSEFESPKKKAKVE

SEQ ID NO: 1385 - protein, 2096 aa, synthetic construct
MPAAKRVKLDGGDKKYSIGLDIGTNSVGWAVITDEYKVPSKKFKVLGNTDRHSIKKNLIGALLFDSGETAEATRLKRTARRRYTRRKNRICYLQEIFSNEMAKVDDSFFHRLEESFLVEEDKKHERHPIFGNIVDEVAYHEKYPTIYHLRKKLVDSTDKADLRLIYLALAHMIKFRGHFLIEGDLNPDNSDVDKLFIQLVQTYNQLFEENPINASGVDAKAILSARLSKSRRLENLIAQLPGEKKNGLFGNLIALSLGLTPNFKSNFDLAEDAKLQLSKDTYDDDLDNLLAQIGDQYADLFLAAKNLSDAILLSDILRVNTEITKAPLSASMIKRYDEHHQDLTLLKALVRQQLPEKYKEIFFDQSKNGYAGYIDGGASQEEFYKFIKPILEKMDGTEELLVKLNREDLLRKQRTFDNGSIPHQIHLGELHAILRRQEDFYPFLKDNREKIEKILTFRIPYYVGPLARGNSRFAWMTRKSEETITPWNFEEVVDKGASAQSFIERMTNFDKNLPNEKVLPKHSLLYEYFTVYNELTKVKYVTEGMRKPAFLSGEQKKAIVDLLFKTNRKVTVKQLKEDYFKKIECFDSVEISGVEDRFNASLGTYHDLLKIIKDKDFLDNEENEDILEDIVLTLTLFEDREMIEERLKTYAHLFDDKVMKQLKRRRYTGWGRLSRKLINGIRDKQSGKTILDFLKSDGFANRNFMQLIHDDSLTFKEDIQKAQVSGQGDSLHEHIANLAGSPAIKKGILQTVKVVDELVKVMGRHKPENIVIEMARENQTTQKGQKNSRERMKRIEEGIKELGSQILKEHPVENTQLQNEKLYLYYLQNGRDMYVDQELDINRLSDYDVDHIVPQSFLKDDSIDNKVLTRSDKARGKSDNVPSEEVVKKMKNYWRQLLNAKLITQRKFDNLTKAERGGLSELDKAGFIKRQLVETRQITKHVAQILDSRMNTKYDENDKLIREVKVITLKSKLVSDFRKDFQFYKVREINNYHHAHDAYLNAVVGTALIKKYPKLESEFVYGDYKVYDVRKMIAKSEQEIGKATAKYFFYSNIMNFFKTEITLANGEIRKRPLIETNGETGEIVWDKGRDFATVRKVLSMPQVNIVKKTEVQTGGFSKESILPKRNSDKLIARKKDWDPKKYGGFDSPTVAYSVLVVAKVEKGKSKKLKSVKELLGITIMERSSFEKNPIDFLEAKGYKEVKKDLIIKLPKYSLFELENGRKRMLASAGELQKGNELALPSKYVNFLYLASHYEKLKGSPEDNEQKQLFVEQHKHYLDEIIEQISEFSKRVILADANLDKVLSAYNKHRDKPIREQAENIIHLFTLTNLGAPAAFKYFDTTIDRKRYTSTKEVLDATLIHQSITGLYETRIDLSQLGGDGGPAPGGSGSSGGTAPLEEEYRLFLEAPIQNVTLLEQWKREIPKVWAEINPPGLASTQAPIHVQLLSTALPVRVRQYPITLEAKRSLRETIRKFRAAGILRPVHSPWNTPLLPVRKSGTSEYRMVQDLREVNKRVETIHPTVPNPYTLLSLLPPDRIWYSVLDLKDAFFCIPLAPESQLIFAFEWADAEEGESGQLTWTRLPQGFKNSPTLFNEALNRDLQGFRLDHPSVSLLQYVDDLLIAADTQAACLSATRDLLMTLAELGYRVSGKKAQLCQEEVTYLGFKIHKGSRSLSNSRTQAILQIPVPKTKRQVREFLGKIGYCRLFIPGFAELAQPLYAATRPGNDPLVWGEKEEEAFQSLKLALTQPPALALPSLDKPFQLFVEETSGAAKGVLTQALGPWKRPVAYLSKRLDPVAAGWPRCLRAIAAAALLTREASKLTFGQDIEITSSHNLESLLRSPPDKWLTNARITQYQVLLLDPPRVRFKQTAALNPATLLPETDDTLPIHHCLDTLDSLTSTRPDLTDQPLAQAEATLFTDGSSYIRDGKRYAGAAVVTLDSVIWAEPLPIGTSAQKAELIALTKALEWSKDKSVNIYTDSRYAFATLHVHGMIYRERGWLTAGGKAIKNAPEILALLTAVWLPKRVAVMHCKGHQKDDAPTSTGNRRADEVAREVAIRPLSTQATISAGKRTADGSEFEKRTADGSEFESPKKKAKVE

SEQ ID NO: 1386 - protein, 2099 aa, synthetic construct
MPAAKRVKLDGGDKKYSIGLDIGTNSVGWAVITDEYKVPSKKFKVLGNTDRHSIKKNLIGALLFDSGETAEATRLKRTARRRYTRRKNRICYLQEIFSNEMAKVDDSFFHRLEESFLVEEDKKHERHPIFGNIVDEVAYHEKYPTIYHLRKKLVDSTDKADLRLIYLALAHMIKFRGHFLIEGDLNPDNSDVDKLFIQLVQTYNQLFEENPINASGVDAKAILSARLSKSRRLENLIAQLPGEKKNGLFGNLIALSLGLTPNFKSNFDLAEDAKLQLSKDTYDDDLDNLLAQIGDQYADLFLAAKNLSDAILLSDILRVNTEITKAPLSASMIKRYDEHHQDLTLLKALVRQQLPEKYKEIFFDQSKNGYAGYIDGGASQEEFYKFIKPILEKMDGTEELLVKLNREDLLRKQRTFDNGSIPHQIHLGELHAILRRQEDFYPFLKDNREKIEKILTFRIPYYVGPLARGNSRFAWMTRKSEETITPWNFEEVVDKGASAQSFIERMTNFDKNLPNEKVLPKHSLLYEYFTVYNELTKVKYVTEGMRKPAFLSGEQKKAIVDLLFKTNRKVTVKQLKEDYFKKIECFDSVEISGVEDRFNASLGTYHDLLKIIKDKDFLDNEENEDILEDIVLTLTLFEDREMIEERLKTYAHLFDDKVMKQLKRRRYTGWGRLSRKLINGIRDKQSGKTILDFLKSDGFANRNFMQLIHDDSLTFKEDIQKAQVSGQGDSLHEHIANLAGSPAIKKGILQTVKVVDELVKVMGRHKPENIVIEMARENQTTQKGQKNSRERMKRIEEGIKELGSQILKEHPVENTQLQNEKLYLYYLQNGRDMYVDQELDINRLSDYDVDHIVPQSFLKDDSIDNKVLTRSDKARGKSDNVPSEEVVKKMKNYWRQLLNAKLITQRKFDNLTKAERGGLSELDKAGFIKRQLVETRQITKHVAQILDSRMNTKYDENDKLIREVKVITLKSKLVSDFRKDFQFYKVREINNYHHAHDAYLNAVVGTALIKKYPKLESEFVYGDYKVYDVRKMIAKSEQEIGKATAKYFFYSNIMNFFKTEITLANGEIRKRPLIETNGETGEIVWDKGRDFATVRKVLSMPQVNIVKKTEVQTGGFSKESILPKRNSDKLIARKKDWDPKKYGGFDSPTVAYSVLVVAKVEKGKSKKLKSVKELLGITIMERSSFEKNPIDFLEAKGYKEVKKDLIIKLPKYSLFELENGRKRMLASAGELQKGNELALPSKYVNFLYLASHYEKLKGSPEDNEQKQLFVEQHKHYLDEIIEQISEFSKRVILADANLDKVLSAYNKHRDKPIREQAENIIHLFTLTNLGAPAAFKYFDTTIDRKRYTSTKEVLDATLIHQSITGLYETRIDLSQLGGDGGGSSGSSGSSGSSGGTAPLEEEYRLFLEAPIQNVTLLEQWKREIPKVWAEINPPGLASTQAPIHVQLLSTALPVRVRQYPITLEAKRSLRETIRKFRAAGILRPVHSPWNTPLLPVRKSGTSEYRMVQDLREVNKRVETIHPTVPNPYTLLSLLPPDRIWYSVLDLKDAFFCIPLAPESQLIFAFEWADAEEGESGQLTWTRLPQGFKNSPTLFNEALNRDLQGFRLDHPSVSLLQYVDDLLIAADTQAACLSATRDLLMTLAELGYRVSGKKAQLCQEEVTYLGFKIHKGSRSLSNSRTQAILQIPVPKTKRQVREFLGKIGYCRLFIPGFAELAQPLYAATRPGNDPLVWGEKEEEAFQSLKLALTQPPALALPSLDKPFQLFVEETSGAAKGVLTQALGPWKRPVAYLSKRLDPVAAGWPRCLRAIAAAALLTREASKLTFGQDIEITSSHNLESLLRSPPDKWLTNARITQYQVLLLDPPRVRFKQTAALNPATLLPETDDTLPIHHCLDTLDSLTSTRPDLTDQPLAQAEATLFTDGSSYIRDGKRYAGAAVVTLDSVIWAEPLPIGTSAQKAELIALTKALEWSKDKSVNIYTDSRYAFATLHVHGMIYRERGWLTAGGKAIKNAPEILALLTAVWLPKRVAVMHCKGHQKDDAPTSTGNRRADEVAREVAIRPLSTQATISAGKRTADGSEFEKRTADGSEFESPKKKAKVE

SEQ ID NO: 1387 - protein, 2098 aa, synthetic construct
MPAAKRVKLDGGDKKYSIGLDIGTNSVGWAVITDEYKVPSKKFKVLGNTDRHSIKKNLIGALLFDSGETAEATRLKRTARRRYTRRKNRICYLQEIFSNEMAKVDDSFFHRLEESFLVEEDKKHERHPIFGNIVDEVAYHEKYPTIYHLRKKLVDSTDKADLRLIYLALAHMIKFRGHFLIEGDLNPDNSDVDKLFIQLVQTYNQLFEENPINASGVDAKAILSARLSKSRRLENLIAQLPGEKKNGLFGNLIALSLGLTPNFKSNFDLAEDAKLQLSKDTYDDDLDNLLAQIGDQYADLFLAAKNLSDAILLSDILRVNTEITKAPLSASMIKRYDEHHQDLTLLKALVRQQLPEKYKEIFFDQSKNGYAGYIDGGASQEEFYKFIKPILEKMDGTEELLVKLNREDLLRKQRTFDNGSIPHQIHLGELHAILRRQEDFYPFLKDNREKIEKILTFRIPYYVGPLARGNSRFAWMTRKSEETITPWNFEEVVDKGASAQSFIERMTNFDKNLPNEKVLPKHSLLYEYFTVYNELTKVKYVTEGMRKPAFLSGEQKKAIVDLLFKTNRKVTVKQLKEDYFKKIECFDSVEISGVEDRFNASLGTYHDLLKIIKDKDFLDNEENEDILEDIVLTLTLFEDREMIEERLKTYAHLFDDKVMKQLKRRRYTGWGRLSRKLINGIRDKQSGKTILDFLKSDGFANRNFMQLIHDDSLTFKEDIQKAQVSGQGDSLHEHIANLAGSPAIKKGILQTVKVVDELVKVMGRHKPENIVIEMARENQTTQKGQKNSRERMKRIEEGIKELGSQILKEHPVENTQLQNEKLYLYYLQNGRDMYVDQELDINRLSDYDVDHIVPQSFLKDDSIDNKVLTRSDKARGKSDNVPSEEVVKKMKNYWRQLLNAKLITQRKFDNLTKAERGGLSELDKAGFIKRQLVETRQITKHVAQILDSRMNTKYDENDKLIREVKVITLKSKLVSDFRKDFQFYKVREINNYHHAHDAYLNAVVGTALIKKYPKLESEFVYGDYKVYDVRKMIAKSEQEIGKATAKYFFYSNIMNFFKTEITLANGEIRKRPLIETNGETGEIVWDKGRDFATVRKVLSMPQVNIVKKTEVQTGGFSKESILPKRNSDKLIARKKDWDPKKYGGFDSPTVAYSVLVVAKVEKGKSKKLKSVKELLGITIMERSSFEKNPIDFLEAKGYKEVKKDLIIKLPKYSLFELENGRKRMLASAGELQKGNELALPSKYVNFLYLASHYEKLKGSPEDNEQKQLFVEQHKHYLDEIIEQISEFSKRVILADANLDKVLSAYNKHRDKPIREQAENIIHLFTLTNLGAPAAFKYFDTTIDRKRYTSTKEVLDATLIHQSITGLYETRIDLSQLGGDGGPAPEAAAKGGGGGTAPLEEEYRLFLEAPIQNVTLLEQWKREIPKVWAEINPPGLASTQAPIHVQLLSTALPVRVRQYPITLEAKRSLRETIRKFRAAGILRPVHSPWNTPLLPVRKSGTSEYRMVQDLREVNKRVETIHPTVPNPYTLLSLLPPDRIWYSVLDLKDAFFCIPLAPESQLIFAFEWADAEEGESGQLTWTRLPQGFKNSPTLFNEALNRDLQGFRLDHPSVSLLQYVDDLLIAADTQAACLSATRDLLMTLAELGYRVSGKKAQLCQEEVTYLGFKIHKGSRSLSNSRTQAILQIPVPKTKRQVREFLGKIGYCRLFIPGFAELAQPLYAATRPGNDPLVWGEKEEEAFQSLKLALTQPPALALPSLDKPFQLFVEETSGAAKGVLTQALGPWKRPVAYLSKRLDPVAAGWPRCLRAIAAAALLTREASKLTFGQDIEITSSHNLESLLRSPPDKWLTNARITQYQVLLLDPPRVRFKQTAALNPATLLPETDDTLPIHHCLDTLDSLTSTRPDLTDQPLAQAEATLFTDGSSYIRDGKRYAGAAVVTLDSVIWAEPLPIGTSAQKAELIALTKALEWSKDKSVNIYTDSRYAFATLHVHGMIYRERGWLTAGGKAIKNAPEILALLTAVWLPKRVAVMHCKGHQKDDAPTSTGNRRADEVAREVAIRPLSTQATISAGKRTADGSEFEKRTADGSEFESPKKKAKVE

SEQ ID NO: 1388 - protein, 2098 aa, synthetic construct
MPAAKRVKLDGGDKKYSIGLDIGTNSVGWAVITDEYKVPSKKFKVLGNTDRHSIKKNLIGALLFDSGETAEATRLKRTARRRYTRRKNRICYLQEIFSNEMAKVDDSFFHRLEESFLVEEDKKHERHPIFGNIVDEVAYHEKYPTIYHLRKKLVDSTDKADLRLIYLALAHMIKFRGHFLIEGDLNPDNSDVDKLFIQLVQTYNQLFEENPINASGVDAKAILSARLSKSRRLENLIAQLPGEKKNGLFGNLIALSLGLTPNFKSNFDLAEDAKLQLSKDTYDDDLDNLLAQIGDQYADLFLAAKNLSDAILLSDILRVNTEITKAPLSASMIKRYDEHHQDLTLLKALVRQQLPEKYKEIFFDQSKNGYAGYIDGGASQEEFYKFIKPILEKMDGTEELLVKLNREDLLRKQRTFDNGSIPHQIHLGELHAILRRQEDFYPFLKDNREKIEKILTFRIPYYVGPLARGNSRFAWMTRKSEETITPWNFEEVVDKGASAQSFIERMTNFDKNLPNEKVLPKHSLLYEYFTVYNELTKVKYVTEGMRKPAFLSGEQKKAIVDLLFKTNRKVTVKQLKEDYFKKIECFDSVEISGVEDRFNASLGTYHDLLKIIKDKDFLDNEENEDILEDIVLTLTLFEDREMIEERLKTYAHLFDDKVMKQLKRRRYTGWGRLSRKLINGIRDKQSGKTILDFLKSDGFANRNFMQLIHDDSLTFKEDIQKAQVSGQGDSLHEHIANLAGSPAIKKGILQTVKVVDELVKVMGRHKPENIVIEMARENQTTQKGQKNSRERMKRIEEGIKELGSQILKEHPVENTQLQNEKLYLYYLQNGRDMYVDQELDINRLSDYDVDHIVPQSFLKDDSIDNKVLTRSDKARGKSDNVPSEEVVKKMKNYWRQLLNAKLITQRKFDNLTKAERGGLSELDKAGFIKRQLVETRQITKHVAQILDSRMNTKYDENDKLIREVKVITLKSKLVSDFRKDFQFYKVREINNYHHAHDAYLNAVVGTALIKKYPKLESEFVYGDYKVYDVRKMIAKSEQEIGKATAKYFFYSNIMNFFKTEITLANGEIRKRPLIETNGETGEIVWDKGRDFATVRKVLSMPQVNIVKKTEVQTGGFSKESILPKRNSDKLIARKKDWDPKKYGGFDSPTVAYSVLVVAKVEKGKSKKLKSVKELLGITIMERSSFEKNPIDFLEAKGYKEVKKDLIIKLPKYSLFELENGRKRMLASAGELQKGNELALPSKYVNFLYLASHYEKLKGSPEDNEQKQLFVEQHKHYLDEIIEQISEFSKRVILADANLDKVLSAYNKHRDKPIREQAENIIHLFTLTNLGAPAAFKYFDTTIDRKRYTSTKEVLDATLIHQSITGLYETRIDLSQLGGDGGPAPEAAAKGSSGGTAPLEEEYRLFLEAPIQNVTLLEQWKREIPKVWAEINPPGLASTQAPIHVQLLSTALPVRVRQYPITLEAKRSLRETIRKFRAAGILRPVHSPWNTPLLPVRKSGTSEYRMVQDLREVNKRVETIHPTVPNPYTLLSLLPPDRIWYSVLDLKDAFFCIPLAPESQLIFAFEWADAEEGESGQLTWTRLPQGFKNSPTLFNEALNRDLQGFRLDHPSVSLLQYVDDLLIAADTQAACLSATRDLLMTLAELGYRVSGKKAQLCQEEVTYLGFKIHKGSRSLSNSRTQAILQIPVPKTKRQVREFLGKIGYCRLFIPGFAELAQPLYAATRPGNDPLVWGEKEEEAFQSLKLALTQPPALALPSLDKPFQLFVEETSGAAKGVLTQALGPWKRPVAYLSKRLDPVAAGWPRCLRAIAAAALLTREASKLTFGQDIEITSSHNLESLLRSPPDKWLTNARITQYQVLLLDPPRVRFKQTAALNPATLLPETDDTLPIHHCLDTLDSLTSTRPDLTDQPLAQAEATLFTDGSSYIRDGKRYAGAAVVTLDSVIWAEPLPIGTSAQKAELIALTKALEWSKDKSVNIYTDSRYAFATLHVHGMIYRERGWLTAGGKAIKNAPEILALLTAVWLPKRVAVMHCKGHQKDDAPTSTGNRRADEVAREVAIRPLSTQATISAGKRTADGSEFEKRTADGSEFESPKKKAKVE

SEQ ID NO: 1389 - protein, 2090 aa, synthetic construct
MPAAKRVKLDGGDKKYSIGLDIGTNSVGWAVITDEYKVPSKKFKVLGNTDRHSIKKNLIGALLFDSGETAEATRLKRTARRRYTRRKNRICYLQEIFSNEMAKVDDSFFHRLEESFLVEEDKKHERHPIFGNIVDEVAYHEKYPTIYHLRKKLVDSTDKADLRLIYLALAHMIKFRGHFLIEGDLNPDNSDVDKLFIQLVQTYNQLFEENPINASGVDAKAILSARLSKSRRLENLIAQLPGEKKNGLFGNLIALSLGLTPNFKSNFDLAEDAKLQLSKDTYDDDLDNLLAQIGDQYADLFLAAKNLSDAILLSDILRVNTEITKAPLSASMIKRYDEHHQDLTLLKALVRQQLPEKYKEIFFDQSKNGYAGYIDGGASQEEFYKFIKPILEKMDGTEELLVKLNREDLLRKQRTFDNGSIPHQIHLGELHAILRRQEDFYPFLKDNREKIEKILTFRIPYYVGPLARGNSRFAWMTRKSEETITPWNFEEVVDKGASAQSFIERMTNFDKNLPNEKVLPKHSLLYEYFTVYNELTKVKYVTEGMRKPAFLSGEQKKAIVDLLFKTNRKVTVKQLKEDYFKKIECFDSVEISGVEDRFNASLGTYHDLLKIIKDKDFLDNEENEDILEDIVLTLTLFEDREMIEERLKTYAHLFDDKVMKQLKRRRYTGWGRLSRKLINGIRDKQSGKTILDFLKSDGFANRNFMQLIHDDSLTFKEDIQKAQVSGQGDSLHEHIANLAGSPAIKKGILQTVKVVDELVKVMGRHKPENIVIEMARENQTTQKGQKNSRERMKRIEEGIKELGSQILKEHPVENTQLQNEKLYLYYLQNGRDMYVDQELDINRLSDYDVDHIVPQSFLKDDSIDNKVLTRSDKARGKSDNVPSEEVVKKMKNYWRQLLNAKLITQRKFDNLTKAERGGLSELDKAGFIKRQLVETRQITKHVAQILDSRMNTKYDENDKLIREVKVITLKSKLVSDFRKDFQFYKVREINNYHHAHDAYLNAVVGTALIKKYPKLESEFVYGDYKVYDVRKMIAKSEQEIGKATAKYFFYSNIMNFFKTEITLANGEIRKRPLIETNGETGEIVWDKGRDFATVRKVLSMPQVNIVKKTEVQTGGFSKESILPKRNSDKLIARKKDWDPKKYGGFDSPTVAYSVLVVAKVEKGKSKKLKSVKELLGITIMERSSFEKNPIDFLEAKGYKEVKKDLIIKLPKYSLFELENGRKRMLASAGELQKGNELALPSKYVNFLYLASHYEKLKGSPEDNEQKQLFVEQHKHYLDEIIEQISEFSKRVILADANLDKVLSAYNKHRDKPIREQAENIIHLFTLTNLGAPAAFKYFDTTIDRKRYTSTKEVLDATLIHQSITGLYETRIDLSQLGGDGGGGGGGTAPLEEEYRLFLEAPIQNVTLLEQWKREIPKVWAEINPPGLASTQAPIHVQLLSTALPVRVRQYPITLEAKRSLRETIRKFRAAGILRPVHSPWNTPLLPVRKSGTSEYRMVQDLREVNKRVETIHPTVPNPYTLLSLLPPDRIWYSVLDLKDAFFCIPLAPESQLIFAFEWADAEEGESGQLTWTRLPQGFKNSPTLFNEALNRDLQGFRLDHPSVSLLQYVDDLLIAADTQAACLSATRDLLMTLAELGYRVSGKKAQLCQEEVTYLGFKIHKGSRSLSNSRTQAILQIPVPKTKRQVREFLGKIGYCRLFIPGFAELAQPLYAATRPGNDPLVWGEKEEEAFQSLKLALTQPPALALPSLDKPFQLFVEETSGAAKGVLTQALGPWKRPVAYLSKRLDPVAAGWPRCLRAIAAAALLTREASKLTFGQDIEITSSHNLESLLRSPPDKWLTNARITQYQVLLLDPPRVRFKQTAALNPATLLPETDDTLPIHHCLDTLDSLTSTRPDLTDQPLAQAEATLFTDGSSYIRDGKRYAGAAVVTLDSVIWAEPLPIGTSAQKAELIALTKALEWSKDKSVNIYTDSRYAFATLHVHGMIYRERGWLTAGGKAIKNAPEILALLTAVWLPKRVAVMHCKGHQKDDAPTSTGNRRADEVAREVAIRPLSTQATISAGKRTADGSEFEKRTADGSEFESPKKKAKVE

SEQ ID NO: 1390 - protein, 2098 aa, synthetic construct
MPAAKRVKLDGGDKKYSIGLDIGTNSVGWAVITDEYKVPSKKFKVLGNTDRHSIKKNLIGALLFDSGETAEATRLKRTARRRYTRRKNRICYLQEIFSNEMAKVDDSFFHRLEESFLVEEDKKHERHPIFGNIVDEVAYHEKYPTIYHLRKKLVDSTDKADLRLIYLALAHMIKFRGHFLIEGDLNPDNSDVDKLFIQLVQTYNQLFEENPINASGVDAKAILSARLSKSRRLENLIAQLPGEKKNGLFGNLIALSLGLTPNFKSNFDLAEDAKLQLSKDTYDDDLDNLLAQIGDQYADLFLAAKNLSDAILLSDILRVNTEITKAPLSASMIKRYDEHHQDLTLLKALVRQQLPEKYKEIFFDQSKNGYAGYIDGGASQEEFYKFIKPILEKMDGTEELLVKLNREDLLRKQRTFDNGSIPHQIHLGELHAILRRQEDFYPFLKDNREKIEKILTFRIPYYVGPLARGNSRFAWMTRKSEETITPWNFEEVVDKGASAQSFIERMTNFDKNLPNEKVLPKHSLLYEYFTVYNELTKVKYVTEGMRKPAFLSGEQKKAIVDLLFKTNRKVTVKQLKEDYFKKIECFDSVEISGVEDRFNASLGTYHDLLKIIKDKDFLDNEENEDILEDIVLTLTLFEDREMIEERLKTYAHLFDDKVMKQLKRRRYTGWGRLSRKLINGIRDKQSGKTILDFLKSDGFANRNFMQLIHDDSLTFKEDIQKAQVSGQGDSLHEHIANLAGSPAIKKGILQTVKVVDELVKVMGRHKPENIVIEMARENQTTQKGQKNSRERMKRIEEGIKELGSQILKEHPVENTQLQNEKLYLYYLQNGRDMYVDQELDINRLSDYDVDHIVPQSFLKDDSIDNKVLTRSDKARGKSDNVPSEEVVKKMKNYWRQLLNAKLITQRKFDNLTKAERGGLSELDKAGFIKRQLVETRQITKHVAQILDSRMNTKYDENDKLIREVKVITLKSKLVSDFRKDFQFYKVREINNYHHAHDAYLNAVVGTALIKKYPKLESEFVYGDYKVYDVRKMIAKSEQEIGKATAKYFFYSNIMNFFKTEITLANGEIRKRPLIETNGETGEIVWDKGRDFATVRKVLSMPQVNIVKKTEVQTGGFSKESILPKRNSDKLIARKKDWDPKKYGGFDSPTVAYSVLVVAKVEKGKSKKLKSVKELLGITIMERSSFEKNPIDFLEAKGYKEVKKDLIIKLPKYSLFELENGRKRMLASAGELQKGNELALPSKYVNFLYLASHYEKLKGSPEDNEQKQLFVEQHKHYLDEIIEQISEFSKRVILADANLDKVLSAYNKHRDKPIREQAENIIHLFTLTNLGAPAAFKYFDTTIDRKRYTSTKEVLDATLIHQSITGLYETRIDLSQLGGDGGEAAAKGGGGGSGGTAPLEEEYRLFLEAPIQNVTLLEQWKREIPKVWAEINPPGLASTQAPIHVQLLSTALPVRVRQYPITLEAKRSLRETIRKFRAAGILRPVHSPWNTPLLPVRKSGTSEYRMVQDLREVNKRVETIHPTVPNPYTLLSLLPPDRIWYSVLDLKDAFFCIPLAPESQLIFAFEWADAEEGESGQLTWTRLPQGFKNSPTLFNEALNRDLQGFRLDHPSVSLLQYVDDLLIAADTQAACLSATRDLLMTLAELGYRVSGKKAQLCQEEVTYLGFKIHKGSRSLSNSRTQAILQIPVPKTKRQVREFLGKIGYCRLFIPGFAELAQPLYAATRPGNDPLVWGEKEEEAFQSLKLALTQPPALALPSLDKPFQLFVEETSGAAKGVLTQALGPWKRPVAYLSKRLDPVAAGWPRCLRAIAAAALLTREASKLTFGQDIEITSSHNLESLLRSPPDKWLTNARITQYQVLLLDPPRVRFKQTAALNPATLLPETDDTLPIHHCLDTLDSLTSTRPDLTDQPLAQAEATLFTDGSSYIRDGKRYAGAAVVTLDSVIWAEPLPIGTSAQKAELIALTKALEWSKDKSVNIYTDSRYAFATLHVHGMIYRERGWLTAGGKAIKNAPEILALLTAVWLPKRVAVMHCKGHQKDDAPTSTGNRRADEVAREVAIRPLSTQATISAGKRTADGSEFEKRTADGSEFESPKKKAKVE

SEQ ID NO: 1391 - protein, 2093 aa, synthetic construct
MPAAKRVKLDGGDKKYSIGLDIGTNSVGWAVITDEYKVPSKKFKVLGNTDRHSIKKNLIGALLFDSGETAEATRLKRTARRRYTRRKNRICYLQEIFSNEMAKVDDSFFHRLEESFLVEEDKKHERHPIFGNIVDEVAYHEKYPTIYHLRKKLVDSTDKADLRLIYLALAHMIKFRGHFLIEGDLNPDNSDVDKLFIQLVQTYNQLFEENPINASGVDAKAILSARLSKSRRLENLIAQLPGEKKNGLFGNLIALSLGLTPNFKSNFDLAEDAKLQLSKDTYDDDLDNLLAQIGDQYADLFLAAKNLSDAILLSDILRVNTEITKAPLSASMIKRYDEHHQDLTLLKALVRQQLPEKYKEIFFDQSKNGYAGYIDGGASQEEFYKFIKPILEKMDGTEELLVKLNREDLLRKQRTFDNGSIPHQIHLGELHAILRRQEDFYPFLKDNREKIEKILTFRIPYYVGPLARGNSRFAWMTRKSEETITPWNFEEVVDKGASAQSFIERMTNFDKNLPNEKVLPKHSLLYEYFTVYNELTKVKYVTEGMRKPAFLSGEQKKAIVDLLFKTNRKVTVKQLKEDYFKKIECFDSVEISGVEDRFNASLGTYHDLLKIIKDKDFLDNEENEDILEDIVLTLTLFEDREMIEERLKTYAHLFDDKVMKQLKRRRYTGWGRLSRKLINGIRDKQSGKTILDFLKSDGFANRNFMQLIHDDSLTFKEDIQKAQVSGQGDSLHEHIANLAGSPAIKKGILQTVKVVDELVKVMGRHKPENIVIEMARENQTTQKGQKNSRERMKRIEEGIKELGSQILKEHPVENTQLQNEKLYLYYLQNGRDMYVDQELDINRLSDYDVDHIVPQSFLKDDSIDNKVLTRSDKARGKSDNVPSEEVVKKMKNYWRQLLNAKLITQRKFDNLTKAERGGLSELDKAGFIKRQLVETRQITKHVAQILDSRMNTKYDENDKLIREVKVITLKSKLVSDFRKDFQFYKVREINNYHHAHDAYLNAVVGTALIKKYPKLESEFVYGDYKVYDVRKMIAKSEQEIGKATAKYFFYSNIMNFFKTEITLANGEIRKRPLIETNGETGEIVWDKGRDFATVRKVLSMPQVNIVKKTEVQTGGFSKESILPKRNSDKLIARKKDWDPKKYGGFDSPTVAYSVLVVAKVEKGKSKKLKSVKELLGITIMERSSFEKNPIDFLEAKGYKEVKKDLIIKLPKYSLFELENGRKRMLASAGELQKGNELALPSKYVNFLYLASHYEKLKGSPEDNEQKQLFVEQHKHYLDEIIEQISEFSKRVILADANLDKVLSAYNKHRDKPIREQAENIIHLFTLTNLGAPAAFKYFDTTIDRKRYTSTKEVLDATLIHQSITGLYETRIDLSQLGGDGGGGSGGGGGTAPLEEEYRLFLEAPIQNVTLLEQWKREIPKVWAEINPPGLASTQAPIHVQLLSTALPVRVRQYPITLEAKRSLRETIRKFRAAGILRPVHSPWNTPLLPVRKSGTSEYRMVQDLREVNKRVETIHPTVPNPYTLLSLLPPDRIWYSVLDLKDAFFCIPLAPESQLIFAFEWADAEEGESGQLTWTRLPQGFKNSPTLFNEALNRDLQGFRLDHPSVSLLQYVDDLLIAADTQAACLSATRDLLMTLAELGYRVSGKKAQLCQEEVTYLGFKIHKGSRSLSNSRTQAILQIPVPKTKRQVREFLGKIGYCRLFIPGFAELAQPLYAATRPGNDPLVWGEKEEEAFQSLKLALTQPPALALPSLDKPFQLFVEETSGAAKGVLTQALGPWKRPVAYLSKRLDPVAAGWPRCLRAIAAAALLTREASKLTFGQDIEITSSHNLESLLRSPPDKWLTNARITQYQVLLLDPPRVRFKQTAALNPATLLPETDDTLPIHHCLDTLDSLTSTRPDLTDQPLAQAEATLFTDGSSYIRDGKRYAGAAVVTLDSVIWAEPLPIGTSAQKAELIALTKALEWSKDKSVNIYTDSRYAFATLHVHGMIYRERGWLTAGGKAIKNAPEILALLTAVWLPKRVAVMHCKGHQKDDAPTSTGNRRADEVAREVAIRPLSTQATISAGKRTADGSEFEKRTADGSEFESPKKKAKVE

SEQ ID NO: 1392 - protein, 2093 aa, synthetic construct
MPAAKRVKLDGGDKKYSIGLDIGTNSVGWAVITDEYKVPSKKFKVLGNTDRHSIKKNLIGALLFDSGETAEATRLKRTARRRYTRRKNRICYLQEIFSNEMAKVDDSFFHRLEESFLVEEDKKHERHPIFGNIVDEVAYHEKYPTIYHLRKKLVDSTDKADLRLIYLALAHMIKFRGHFLIEGDLNPDNSDVDKLFIQLVQTYNQLFEENPINASGVDAKAILSARLSKSRRLENLIAQLPGEKKNGLFGNLIALSLGLTPNFKSNFDLAEDAKLQLSKDTYDDDLDNLLAQIGDQYADLFLAAKNLSDAILLSDILRVNTEITKAPLSASMIKRYDEHHQDLTLLKALVRQQLPEKYKEIFFDQSKNGYAGYIDGGASQEEFYKFIKPILEKMDGTEELLVKLNREDLLRKQRTFDNGSIPHQIHLGELHAILRRQEDFYPFLKDNREKIEKILTFRIPYYVGPLARGNSRFAWMTRKSEETITPWNFEEVVDKGASAQSFIERMTNFDKNLPNEKVLPKHSLLYEYFTVYNELTKVKYVTEGMRKPAFLSGEQKKAIVDLLFKTNRKVTVKQLKEDYFKKIECFDSVEISGVEDRFNASLGTYHDLLKIIKDKDFLDNEENEDILEDIVLTLTLFEDREMIEERLKTYAHLFDDKVMKQLKRRRYTGWGRLSRKLINGIRDKQSGKTILDFLKSDGFANRNFMQLIHDDSLTFKEDIQKAQVSGQGDSLHEHIANLAGSPAIKKGILQTVKVVDELVKVMGRHKPENIVIEMARENQTTQKGQKNSRERMKRIEEGIKELGSQILKEHPVENTQLQNEKLYLYYLQNGRDMYVDQELDINRLSDYDVDHIVPQSFLKDDSIDNKVLTRSDKARGKSDNVPSEEVVKKMKNYWRQLLNAKLITQRKFDNLTKAERGGLSELDKAGFIKRQLVETRQITKHVAQILDSRMNTKYDENDKLIREVKVITLKSKLVSDFRKDFQFYKVREINNYHHAHDAYLNAVVGTALIKKYPKLESEFVYGDYKVYDVRKMIAKSEQEIGKATAKYFFYSNIMNFFKTEITLANGEIRKRPLIETNGETGEIVWDKGRDFATVRKVLSMPQVNIVKKTEVQTGGFSKESILPKRNSDKLIARKKDWDPKKYGGFDSPTVAYSVLVVAKVEKGKSKKLKSVKELLGITIMERSSFEKNPIDFLEAKGYKEVKKDLIIKLPKYSLFELENGRKRMLASAGELQKGNELALPSKYVNFLYLASHYEKLKGSPEDNEQKQLFVEQHKHYLDEIIEQISEFSKRVILADANLDKVLSAYNKHRDKPIREQAENIIHLFTLTNLGAPAAFKYFDTTIDRKRYTSTKEVLDATLIHQSITGLYETRIDLSQLGGDGGGGSPAPGGTAPLEEEYRLFLEAPIQNVTLLEQWKREIPKVWAEINPPGLASTQAPIHVQLLSTALPVRVRQYPITLEAKRSLRETIRKFRAAGILRPVHSPWNTPLLPVRKSGTSEYRMVQDLREVNKRVETIHPTVPNPYTLLSLLPPDRIWYSVLDLKDAFFCIPLAPESQLIFAFEWADAEEGESGQLTWTRLPQGFKNSPTLFNEALNRDLQGFRLDHPSVSLLQYVDDLLIAADTQAACLSATRDLLMTLAELGYRVSGKKAQLCQEEVTYLGFKIHKGSRSLSNSRTQAILQIPVPKTKRQVREFLGKIGYCRLFIPGFAELAQPLYAATRPGNDPLVWGEKEEEAFQSLKLALTQPPALALPSLDKPFQLFVEETSGAAKGVLTQALGPWKRPVAYLSKRLDPVAAGWPRCLRAIAAAALLTREASKLTFGQDIEITSSHNLESLLRSPPDKWLTNARITQYQVLLLDPPRVRFKQTAALNPATLLPETDDTLPIHHCLDTLDSLTSTRPDLTDQPLAQAEATLFTDGSSYIRDGKRYAGAAVVTLDSVIWAEPLPIGTSAQKAELIALTKALEWSKDKSVNIYTDSRYAFATLHVHGMIYRERGWLTAGGKAIKNAPEILALLTAVWLPKRVAVMHCKGHQKDDAPTSTGNRRADEVAREVAIRPLSTQATISAGKRTADGSEFEKRTADGSEFESPKKKAKVE

SEQ ID NO: 1393 - protein, 2102 aa, synthetic construct
MPAAKRVKLDGGDKKYSIGLDIGTNSVGWAVITDEYKVPSKKFKVLGNTDRHSIKKNLIGALLFDSGETAEATRLKRTARRRYTRRKNRICYLQEIFSNEMAKVDDSFFHRLEESFLVEEDKKHERHPIFGNIVDEVAYHEKYPTIYHLRKKLVDSTDKADLRLIYLALAHMIKFRGHFLIEGDLNPDNSDVDKLFIQLVQTYNQLFEENPINASGVDAKAILSARLSKSRRLENLIAQLPGEKKNGLFGNLIALSLGLTPNFKSNFDLAEDAKLQLSKDTYDDDLDNLLAQIGDQYADLFLAAKNLSDAILLSDILRVNTEITKAPLSASMIKRYDEHHQDLTLLKALVRQQLPEKYKEIFFDQSKNGYAGYIDGGASQEEFYKFIKPILEKMDGTEELLVKLNREDLLRKQRTFDNGSIPHQIHLGELHAILRRQEDFYPFLKDNREKIEKILTFRIPYYVGPLARGNSRFAWMTRKSEETITPWNFEEVVDKGASAQSFIERMTNFDKNLPNEKVLPKHSLLYEYFTVYNELTKVKYVTEGMRKPAFLSGEQKKAIVDLLFKTNRKVTVKQLKEDYFKKIECFDSVEISGVEDRFNASLGTYHDLLKIIKDKDFLDNEENEDILEDIVLTLTLFEDREMIEERLKTYAHLFDDKVMKQLKRRRYTGWGRLSRKLINGIRDKQSGKTILDFLKSDGFANRNFMQLIHDDSLTFKEDIQKAQVSGQGDSLHEHIANLAGSPAIKKGILQTVKVVDELVKVMGRHKPENIVIEMARENQTTQKGQKNSRERMKRIEEGIKELGSQILKEHPVENTQLQNEKLYLYYLQNGRDMYVDQELDINRLSDYDVDHIVPQSFLKDDSIDNKVLTRSDKARGKSDNVPSEEVVKKMKNYWRQLLNAKLITQRKFDNLTKAERGGLSELDKAGFIKRQLVETRQITKHVAQILDSRMNTKYDENDKLIREVKVITLKSKLVSDFRKDFQFYKVREINNYHHAHDAYLNAVVGTALIKKYPKLESEFVYGDYKVYDVRKMIAKSEQEIGKATAKYFFYSNIMNFFKTEITLANGEIRKRPLIETNGETGEIVWDKGRDFATVRKVLSMPQVNIVKKTEVQTGGFSKESILPKRNSDKLIARKKDWDPKKYGGFDSPTVAYSVLVVAKVEKGKSKKLKSVKELLGITIMERSSFEKNPIDFLEAKGYKEVKKDLIIKLPKYSLFELENGRKRMLASAGELQKGNELALPSKYVNFLYLASHYEKLKGSPEDNEQKQLFVEQHKHYLDEIIEQISEFSKRVILADANLDKVLSAYNKHRDKPIREQAENIIHLFTLTNLGAPAAFKYFDTTIDRKRYTSTKEVLDATLIHQSITGLYETRIDLSQLGGDGGGGGGSEAAAKGGGGSGGTAPLEEEYRLFLEAPIQNVTLLEQWKREIPKVWAEINPPGLASTQAPIHVQLLSTALPVRVRQYPITLEAKRSLRETIRKFRAAGILRPVHSPWNTPLLPVRKSGTSEYRMVQDLREVNKRVETIHPTVPNPYTLLSLLPPDRIWYSVLDLKDAFFCIPLAPESQLIFAFEWADAEEGESGQLTWTRLPQGFKNSPTLFNEALNRDLQGFRLDHPSVSLLQYVDDLLIAADTQAACLSATRDLLMTLAELGYRVSGKKAQLCQEEVTYLGFKIHKGSRSLSNSRTQAILQIPVPKTKRQVREFLGKIGYCRLFIPGFAELAQPLYAATRPGNDPLVWGEKEEEAFQSLKLALTQPPALALPSLDKPFQLFVEETSGAAKGVLTQALGPWKRPVAYLSKRLDPVAAGWPRCLRAIAAAALLTREASKLTFGQDIEITSSHNLESLLRSPPDKWLTNARITQYQVLLLDPPRVRFKQTAALNPATLLPETDDTLPIHHCLDTLDSLTSTRPDLTDQPLAQAEATLFTDGSSYIRDGKRYAGAAVVTLDSVIWAEPLPIGTSAQKAELIALTKALEWSKDKSVNIYTDSRYAFATLHVHGMIYRERGWLTAGGKAIKNAPEILALLTAVWLPKRVAVMHCKGHQKDDAPTSTGNRRADEVAREVAIRPLSTQATISAGKRTADGSEFEKRTADGSEFESPKKKAKVE

SEQ ID NO: 1394 - protein, 2098 aa, synthetic construct
MPAAKRVKLDGGDKKYSIGLDIGTNSVGWAVITDEYKVPSKKFKVLGNTDRHSIKKNLIGALLFDSGETAEATRLKRTARRRYTRRKNRICYLQEIFSNEMAKVDDSFFHRLEESFLVEEDKKHERHPIFGNIVDEVAYHEKYPTIYHLRKKLVDSTDKADLRLIYLALAHMIKFRGHFLIEGDLNPDNSDVDKLFIQLVQTYNQLFEENPINASGVDAKAILSARLSKSRRLENLIAQLPGEKKNGLFGNLIALSLGLTPNFKSNFDLAEDAKLQLSKDTYDDDLDNLLAQIGDQYADLFLAAKNLSDAILLSDILRVNTEITKAPLSASMIKRYDEHHQDLTLLKALVRQQLPEKYKEIFFDQSKNGYAGYIDGGASQEEFYKFIKPILEKMDGTEELLVKLNREDLLRKQRTFDNGSIPHQIHLGELHAILRRQEDFYPFLKDNREKIEKILTFRIPYYVGPLARGNSRFAWMTRKSEETITPWNFEEVVDKGASAQSFIERMTNFDKNLPNEKVLPKHSLLYEYFTVYNELTKVKYVTEGMRKPAFLSGEQKKAIVDLLFKTNRKVTVKQLKEDYFKKIECFDSVEISGVEDRFNASLGTYHDLLKIIKDKDFLDNEENEDILEDIVLTLTLFEDREMIEERLKTYAHLFDDKVMKQLKRRRYTGWGRLSRKLINGIRDKQSGKTILDFLKSDGFANRNFMQLIHDDSLTFKEDIQKAQVSGQGDSLHEHIANLAGSPAIKKGILQTVKVVDELVKVMGRHKPENIVIEMARENQTTQKGQKNSRERMKRIEEGIKELGSQILKEHPVENTQLQNEKLYLYYLQNGRDMYVDQELDINRLSDYDVDHIVPQSFLKDDSIDNKVLTRSDKARGKSDNVPSEEVVKKMKNYWRQLLNAKLITQRKFDNLTKAERGGLSELDKAGFIKRQLVETRQITKHVAQILDSRMNTKYDENDKLIREVKVITLKSKLVSDFRKDFQFYKVREINNYHHAHDAYLNAVVGTALIKKYPKLESEFVYGDYKVYDVRKMIAKSEQEIGKATAKYFFYSNIMNFFKTEITLANGEIRKRPLIETNGETGEIVWDKGRDFATVRKVLSMPQVNIVKKTEVQTGGFSKESILPKRNSDKLIARKKDWDPKKYGGFDSPTVAYSVLVVAKVEKGKSKKLKSVKELLGITIMERSSFEKNPIDFLEAKGYKEVKKDLIIKLPKYSLFELENGRKRMLASAGELQKGNELALPSKYVNFLYLASHYEKLKGSPEDNEQKQLFVEQHKHYLDEIIEQISEFSKRVILADANLDKVLSAYNKHRDKPIREQAENIIHLFTLTNLGAPAAFKYFDTTIDRKRYTSTKEVLDATLIHQSITGLYETRIDLSQLGGDGGGSSEAAAKGGGGGTAPLEEEYRLFLEAPIQNVTLLEQWKREIPKVWAEINPPGLASTQAPIHVQLLSTALPVRVRQYPITLEAKRSLRETIRKFRAAGILRPVHSPWNTPLLPVRKSGTSEYRMVQDLREVNKRVETIHPTVPNPYTLLSLLPPDRIWYSVLDLKDAFFCIPLAPESQLIFAFEWADAEEGESGQLTWTRLPQGFKNSPTLFNEALNRDLQGFRLDHPSVSLLQYVDDLLIAADTQAACLSATRDLLMTLAELGYRVSGKKAQLCQEEVTYLGFKIHKGSRSLSNSRTQAILQIPVPKTKRQVREFLGKIGYCRLFIPGFAELAQPLYAATRPGNDPLVWGEKEEEAFQSLKLALTQPPALALPSLDKPFQLFVEETSGAAKGVLTQALGPWKRPVAYLSKRLDPVAAGWPRCLRAIAAAALLTREASKLTFGQDIEITSSHNLESLLRSPPDKWLTNARITQYQVLLLDPPRVRFKQTAALNPATLLPETDDTLPIHHCLDTLDSLTSTRPDLTDQPLAQAEATLFTDGSSYIRDGKRYAGAAVVTLDSVIWAEPLPIGTSAQKAELIALTKALEWSKDKSVNIYTDSRYAFATLHVHGMIYRERGWLTAGGKAIKNAPEILALLTAVWLPKRVAVMHCKGHQKDDAPTSTGNRRADEVAREVAIRPLSTQATISAGKRTADGSEFEKRTADGSEFESPKKKAKVE

SEQ ID NO: 1395 - protein, 2098 aa, synthetic construct
MPAAKRVKLDGGDKKYSIGLDIGTNSVGWAVITDEYKVPSKKFKVLGNTDRHSIKKNLIGALLFDSGETAEATRLKRTARRRYTRRKNRICYLQEIFSNEMAKVDDSFFHRLEESFLVEEDKKHERHPIFGNIVDEVAYHEKYPTIYHLRKKLVDSTDKADLRLIYLALAHMIKFRGHFLIEGDLNPDNSDVDKLFIQLVQTYNQLFEENPINASGVDAKAILSARLSKSRRLENLIAQLPGEKKNGLFGNLIALSLGLTPNFKSNFDLAEDAKLQLSKDTYDDDLDNLLAQIGDQYADLFLAAKNLSDAILLSDILRVNTEITKAPLSASMIKRYDEHHQDLTLLKALVRQQLPEKYKEIFFDQSKNGYAGYIDGGASQEEFYKFIKPILEKMDGTEELLVKLNREDLLRKQRTFDNGSIPHQIHLGELHAILRRQEDFYPFLKDNREKIEKILTFRIPYYVGPLARGNSRFAWMTRKSEETITPWNFEEVVDKGASAQSFIERMTNFDKNLPNEKVLPKHSLLYEYFTVYNELTKVKYVTEGMRKPAFLSGEQKKAIVDLLFKTNRKVTVKQLKEDYFKKIECFDSVEISGVEDRFNASLGTYHDLLKIIKDKDFLDNEENEDILEDIVLTLTLFEDREMIEERLKTYAHLFDDKVMKQLKRRRYTGWGRLSRKLINGIRDKQSGKTILDFLKSDGFANRNFMQLIHDDSLTFKEDIQKAQVSGQGDSLHEHIANLAGSPAIKKGILQTVKVVDELVKVMGRHKPENIVIEMARENQTTQKGQKNSRERMKRIEEGIKELGSQILKEHPVENTQLQNEKLYLYYLQNGRDMYVDQELDINRLSDYDVDHIVPQSFLKDDSIDNKVLTRSDKARGKSDNVPSEEVVKKMKNYWRQLLNAKLITQRKFDNLTKAERGGLSELDKAGFIKRQLVETRQITKHVAQILDSRMNTKYDENDKLIREVKVITLKSKLVSDFRKDFQFYKVREINNYHHAHDAYLNAVVGTALIKKYPKLESEFVYGDYKVYDVRKMIAKSEQEIGKATAKYFFYSNIMNFFKTEITLANGEIRKRPLIETNGETGEIVWDKGRDFATVRKVLSMPQVNIVKKTEVQTGGFSKESILPKRNSDKLIARKKDWDPKKYGGFDSPTVAYSVLVVAKVEKGKSKKLKSVKELLGITIMERSSFEKNPIDFLEAKGYKEVKKDLIIKLPKYSLFELENGRKRMLASAGELQKGNELALPSKYVNFLYLASHYEKLKGSPEDNEQKQLFVEQHKHYLDEIIEQISEFSKRVILADANLDKVLSAYNKHRDKPIREQAENIIHLFTLTNLGAPAAFKYFDTTIDRKRYTSTKEVLDATLIHQSITGLYETRIDLSQLGGDGGGGGEAAAKGSSGGTAPLEEEYRLFLEAPIQNVTLLEQWKREIPKVWAEINPPGLASTQAPIHVQLLSTALPVRVRQYPITLEAKRSLRETIRKFRAAGILRPVHSPWNTPLLPVRKSGTSEYRMVQDLREVNKRVETIHPTVPNPYTLLSLLPPDRIWYSVLDLKDAFFCIPLAPESQLIFAFEWADAEEGESGQLTWTRLPQGFKNSPTLFNEALNRDLQGFRLDHPSVSLLQYVDDLLIAADTQAACLSATRDLLMTLAELGYRVSGKKAQLCQEEVTYLGFKIHKGSRSLSNSRTQAILQIPVPKTKRQVREFLGKIGYCRLFIPGFAELAQPLYAATRPGNDPLVWGEKEEEAFQSLKLALTQPPALALPSLDKPFQLFVEETSGAAKGVLTQALGPWKRPVAYLSKRLDPVAAGWPRCLRAIAAAALLTREASKLTFGQDIEITSSHNLESLLRSPPDKWLTNARITQYQVLLLDPPRVRFKQTAALNPATLLPETDDTLPIHHCLDTLDSLTSTRPDLTDQPLAQAEATLFTDGSSYIRDGKRYAGAAVVTLDSVIWAEPLPIGTSAQKAELIALTKALEWSKDKSVNIYTDSRYAFATLHVHGMIYRERGWLTAGGKAIKNAPEILALLTAVWLPKRVAVMHCKGHQKDDAPTSTGNRRADEVAREVAIRPLSTQATISAGKRTADGSEFEKRTADGSEFESPKKKAKVE

SEQ ID NO: 1396 - protein, 2093 aa, synthetic construct
MPAAKRVKLDGGDKKYSIGLDIGTNSVGWAVITDEYKVPSKKFKVLGNTDRHSIKKNLIGALLFDSGETAEATRLKRTARRRYTRRKNRICYLQEIFSNEMAKVDDSFFHRLEESFLVEEDKKHERHPIFGNIVDEVAYHEKYPTIYHLRKKLVDSTDKADLRLIYLALAHMIKFRGHFLIEGDLNPDNSDVDKLFIQLVQTYNQLFEENPINASGVDAKAILSARLSKSRRLENLIAQLPGEKKNGLFGNLIALSLGLTPNFKSNFDLAEDAKLQLSKDTYDDDLDNLLAQIGDQYADLFLAAKNLSDAILLSDILRVNTEITKAPLSASMIKRYDEHHQDLTLLKALVRQQLPEKYKEIFFDQSKNGYAGYIDGGASQEEFYKFIKPILEKMDGTEELLVKLNREDLLRKQRTFDNGSIPHQIHLGELHAILRRQEDFYPFLKDNREKIEKILTFRIPYYVGPLARGNSRFAWMTRKSEETITPWNFEEVVDKGASAQSFIERMTNFDKNLPNEKVLPKHSLLYEYFTVYNELTKVKYVTEGMRKPAFLSGEQKKAIVDLLFKTNRKVTVKQLKEDYFKKIECFDSVEISGVEDRFNASLGTYHDLLKIIKDKDFLDNEENEDILEDIVLTLTLFEDREMIEERLKTYAHLFDDKVMKQLKRRRYTGWGRLSRKLINGIRDKQSGKTILDFLKSDGFANRNFMQLIHDDSLTFKEDIQKAQVSGQGDSLHEHIANLAGSPAIKKGILQTVKVVDELVKVMGRHKPENIVIEMARENQTTQKGQKNSRERMKRIEEGIKELGSQILKEHPVENTQLQNEKLYLYYLQNGRDMYVDQELDINRLSDYDVDHIVPQSFLKDDSIDNKVLTRSDKARGKSDNVPSEEVVKKMKNYWRQLLNAKLITQRKFDNLTKAERGGLSELDKAGFIKRQLVETRQITKHVAQILDSRMNTKYDENDKLIREVKVITLKSKLVSDFRKDFQFYKVREINNYHHAHDAYLNAVVGTALIKKYPKLESEFVYGDYKVYDVRKMIAKSEQEIGKATAKYFFYSNIMNFFKTEITLANGEIRKRPLIETNGETGEIVWDKGRDFATVRKVLSMPQVNIVKKTEVQTGGFSKESILPKRNSDKLIARKKDWDPKKYGGFDSPTVAYSVLVVAKVEKGKSKKLKSVKELLGITIMERSSFEKNPIDFLEAKGYKEVKKDLIIKLPKYSLFELENGRKRMLASAGELQKGNELALPSKYVNFLYLASHYEKLKGSPEDNEQKQLFVEQHKHYLDEIIEQISEFSKRVILADANLDKVLSAYNKHRDKPIREQAENIIHLFTLTNLGAPAAFKYFDTTIDRKRYTSTKEVLDATLIHQSITGLYETRIDLSQLGGDGGGGGGGGGGTAPLEEEYRLFLEAPIQNVTLLEQWKREIPKVWAEINPPGLASTQAPIHVQLLSTALPVRVRQYPITLEAKRSLRETIRKFRAAGILRPVHSPWNTPLLPVRKSGTSEYRMVQDLREVNKRVETIHPTVPNPYTLLSLLPPDRIWYSVLDLKDAFFCIPLAPESQLIFAFEWADAEEGESGQLTWTRLPQGFKNSPTLFNEALNRDLQGFRLDHPSVSLLQYVDDLLIAADTQAACLSATRDLLMTLAELGYRVSGKKAQLCQEEVTYLGFKIHKGSRSLSNSRTQAILQIPVPKTKRQVREFLGKIGYCRLFIPGFAELAQPLYAATRPGNDPLVWGEKEEEAFQSLKLALTQPPALALPSLDKPFQLFVEETSGAAKGVLTQALGPWKRPVAYLSKRLDPVAAGWPRCLRAIAAAALLTREASKLTFGQDIEITSSHNLESLLRSPPDKWLTNARITQYQVLLLDPPRVRFKQTAALNPATLLPETDDTLPIHHCLDTLDSLTSTRPDLTDQPLAQAEATLFTDGSSYIRDGKRYAGAAVVTLDSVIWAEPLPIGTSAQKAELIALTKALEWSKDKSVNIYTDSRYAFATLHVHGMIYRERGWLTAGGKAIKNAPEILALLTAVWLPKRVAVMHCKGHQKDDAPTSTGNRRADEVAREVAIRPLSTQATISAGKRTADGSEFEKRTADGSEFESPKKKAKVE

SEQ ID NO: 1397 - protein, 2093 aa, synthetic construct
MPAAKRVKLDGGDKKYSIGLDIGTNSVGWAVITDEYKVPSKKFKVLGNTDRHSIKKNLIGALLFDSGETAEATRLKRTARRRYTRRKNRICYLQEIFSNEMAKVDDSFFHRLEESFLVEEDKKHERHPIFGNIVDEVAYHEKYPTIYHLRKKLVDSTDKADLRLIYLALAHMIKFRGHFLIEGDLNPDNSDVDKLFIQLVQTYNQLFEENPINASGVDAKAILSARLSKSRRLENLIAQLPGEKKNGLFGNLIALSLGLTPNFKSNFDLAEDAKLQLSKDTYDDDLDNLLAQIGDQYADLFLAAKNLSDAILLSDILRVNTEITKAPLSASMIKRYDEHHQDLTLLKALVRQQLPEKYKEIFFDQSKNGYAGYIDGGASQEEFYKFIKPILEKMDGTEELLVKLNREDLLRKQRTFDNGSIPHQIHLGELHAILRRQEDFYPFLKDNREKIEKILTFRIPYYVGPLARGNSRFAWMTRKSEETITPWNFEEVVDKGASAQSFIERMTNFDKNLPNEKVLPKHSLLYEYFTVYNELTKVKYVTEGMRKPAFLSGEQKKAIVDLLFKTNRKVTVKQLKEDYFKKIECFDSVEISGVEDRFNASLGTYHDLLKIIKDKDFLDNEENEDILEDIVLTLTLFEDREMIEERLKTYAHLFDDKVMKQLKRRRYTGWGRLSRKLINGIRDKQSGKTILDFLKSDGFANRNFMQLIHDDSLTFKEDIQKAQVSGQGDSLHEHIANLAGSPAIKKGILQTVKVVDELVKVMGRHKPENIVIEMARENQTTQKGQKNSRERMKRIEEGIKELGSQILKEHPVENTQLQNEKLYLYYLQNGRDMYVDQELDINRLSDYDVDHIVPQSFLKDDSIDNKVLTRSDKARGKSDNVPSEEVVKKMKNYWRQLLNAKLITQRKFDNLTKAERGGLSELDKAGFIKRQLVETRQITKHVAQILDSRMNTKYDENDKLIREVKVITLKSKLVSDFRKDFQFYKVREINNYHHAHDAYLNAVVGTALIKKYPKLESEFVYGDYKVYDVRKMIAKSEQEIGKATAKYFFYSNIMNFFKTEITLANGEIRKRPLIETNGETGEIVWDKGRDFATVRKVLSMPQVNIVKKTEVQTGGFSKESILPKRNSDKLIARKKDWDPKKYGGFDSPTVAYSVLVVAKVEKGKSKKLKSVKELLGITIMERSSFEKNPIDFLEAKGYKEVKKDLIIKLPKYSLFELENGRKRMLASAGELQKGNELALPSKYVNFLYLASHYEKLKGSPEDNEQKQLFVEQHKHYLDEIIEQISEFSKRVILADANLDKVLSAYNKHRDKPIREQAENIIHLFTLTNLGAPAAFKYFDTTIDRKRYTSTKEVLDATLIHQSITGLYETRIDLSQLGGDGGGGGPAPGGTAPLEEEYRLFLEAPIQNVTLLEQWKREIPKVWAEINPPGLASTQAPIHVQLLSTALPVRVRQYPITLEAKRSLRETIRKFRAAGILRPVHSPWNTPLLPVRKSGTSEYRMVQDLREVNKRVETIHPTVPNPYTLLSLLPPDRIWYSVLDLKDAFFCIPLAPESQLIFAFEWADAEEGESGQLTWTRLPQGFKNSPTLFNEALNRDLQGFRLDHPSVSLLQYVDDLLIAADTQAACLSATRDLLMTLAELGYRVSGKKAQLCQEEVTYLGFKIHKGSRSLSNSRTQAILQIPVPKTKRQVREFLGKIGYCRLFIPGFAELAQPLYAATRPGNDPLVWGEKEEEAFQSLKLALTQPPALALPSLDKPFQLFVEETSGAAKGVLTQALGPWKRPVAYLSKRLDPVAAGWPRCLRAIAAAALLTREASKLTFGQDIEITSSHNLESLLRSPPDKWLTNARITQYQVLLLDPPRVRFKQTAALNPATLLPETDDTLPIHHCLDTLDSLTSTRPDLTDQPLAQAEATLFTDGSSYIRDGKRYAGAAVVTLDSVIWAEPLPIGTSAQKAELIALTKALEWSKDKSVNIYTDSRYAFATLHVHGMIYRERGWLTAGGKAIKNAPEILALLTAVWLPKRVAVMHCKGHQKDDAPTSTGNRRADEVAREVAIRPLSTQATISAGKRTADGSEFEKRTADGSEFESPKKKAKVE

SEQ ID NO: 1398 - protein, 2099 aa, synthetic construct
MPAAKRVKLDGGDKKYSIGLDIGTNSVGWAVITDEYKVPSKKFKVLGNTDRHSIKKNLIGALLFDSGETAEATRLKRTARRRYTRRKNRICYLQEIFSNEMAKVDDSFFHRLEESFLVEEDKKHERHPIFGNIVDEVAYHEKYPTIYHLRKKLVDSTDKADLRLIYLALAHMIKFRGHFLIEGDLNPDNSDVDKLFIQLVQTYNQLFEENPINASGVDAKAILSARLSKSRRLENLIAQLPGEKKNGLFGNLIALSLGLTPNFKSNFDLAEDAKLQLSKDTYDDDLDNLLAQIGDQYADLFLAAKNLSDAILLSDILRVNTEITKAPLSASMIKRYDEHHQDLTLLKALVRQQLPEKYKEIFFDQSKNGYAGYIDGGASQEEFYKFIKPILEKMDGTEELLVKLNREDLLRKQRTFDNGSIPHQIHLGELHAILRRQEDFYPFLKDNREKIEKILTFRIPYYVGPLARGNSRFAWMTRKSEETITPWNFEEVVDKGASAQSFIERMTNFDKNLPNEKVLPKHSLLYEYFTVYNELTKVKYVTEGMRKPAFLSGEQKKAIVDLLFKTNRKVTVKQLKEDYFKKIECFDSVEISGVEDRFNASLGTYHDLLKIIKDKDFLDNEENEDILEDIVLTLTLFEDREMIEERLKTYAHLFDDKVMKQLKRRRYTGWGRLSRKLINGIRDKQSGKTILDFLKSDGFANRNFMQLIHDDSLTFKEDIQKAQVSGQGDSLHEHIANLAGSPAIKKGILQTVKVVDELVKVMGRHKPENIVIEMARENQTTQKGQKNSRERMKRIEEGIKELGSQILKEHPVENTQLQNEKLYLYYLQNGRDMYVDQELDINRLSDYDVDHIVPQSFLKDDSIDNKVLTRSDKARGKSDNVPSEEVVKKMKNYWRQLLNAKLITQRKFDNLTKAERGGLSELDKAGFIKRQLVETRQITKHVAQILDSRMNTKYDENDKLIREVKVITLKSKLVSDFRKDFQFYKVREINNYHHAHDAYLNAVVGTALIKKYPKLESEFVYGDYKVYDVRKMIAKSEQEIGKATAKYFFYSNIMNFFKTEITLANGEIRKRPLIETNGETGEIVWDKGRDFATVRKVLSMPQVNIVKKTEVQTGGFSKESILPKRNSDKLIARKKDWDPKKYGGFDSPTVAYSVLVVAKVEKGKSKKLKSVKELLGITIMERSSFEKNPIDFLEAKGYKEVKKDLIIKLPKYSLFELENGRKRMLASAGELQKGNELALPSKYVNFLYLASHYEKLKGSPEDNEQKQLFVEQHKHYLDEIIEQISEFSKRVILADANLDKVLSAYNKHRDKPIREQAENIIHLFTLTNLGAPAAFKYFDTTIDRKRYTSTKEVLDATLIHQSITGLYETRIDLSQLGGDGGGGSGGSGGSGGSGGTAPLEEEYRLFLEAPIQNVTLLEQWKREIPKVWAEINPPGLASTQAPIHVQLLSTALPVRVRQYPITLEAKRSLRETIRKFRAAGILRPVHSPWNTPLLPVRKSGTSEYRMVQDLREVNKRVETIHPTVPNPYTLLSLLPPDRIWYSVLDLKDAFFCIPLAPESQLIFAFEWADAEEGESGQLTWTRLPQGFKNSPTLFNEALNRDLQGFRLDHPSVSLLQYVDDLLIAADTQAACLSATRDLLMTLAELGYRVSGKKAQLCQEEVTYLGFKIHKGSRSLSNSRTQAILQIPVPKTKRQVREFLGKIGYCRLFIPGFAELAQPLYAATRPGNDPLVWGEKEEEAFQSLKLALTQPPALALPSLDKPFQLFVEETSGAAKGVLTQALGPWKRPVAYLSKRLDPVAAGWPRCLRAIAAAALLTREASKLTFGQDIEITSSHNLESLLRSPPDKWLTNARITQYQVLLLDPPRVRFKQTAALNPATLLPETDDTLPIHHCLDTLDSLTSTRPDLTDQPLAQAEATLFTDGSSYIRDGKRYAGAAVVTLDSVIWAEPLPIGTSAQKAELIALTKALEWSKDKSVNIYTDSRYAFATLHVHGMIYRERGWLTAGGKAIKNAPEILALLTAVWLPKRVAVMHCKGHQKDDAPTSTGNRRADEVAREVAIRPLSTQATISAGKRTADGSEFEKRTADGSEFESPKKKAKVE

SEQ ID NO: 1399 - protein, 2102 aa, synthetic construct
MPAAKRVKLDGGDKKYSIGLDIGTNSVGWAVITDEYKVPSKKFKVLGNTDRHSIKKNLIGALLFDSGETAEATRLKRTARRRYTRRKNRICYLQEIFSNEMAKVDDSFFHRLEESFLVEEDKKHERHPIFGNIVDEVAYHEKYPTIYHLRKKLVDSTDKADLRLIYLALAHMIKFRGHFLIEGDLNPDNSDVDKLFIQLVQTYNQLFEENPINASGVDAKAILSARLSKSRRLENLIAQLPGEKKNGLFGNLIALSLGLTPNFKSNFDLAEDAKLQLSKDTYDDDLDNLLAQIGDQYADLFLAAKNLSDAILLSDILRVNTEITKAPLSASMIKRYDEHHQDLTLLKALVRQQLPEKYKEIFFDQSKNGYAGYIDGGASQEEFYKFIKPILEKMDGTEELLVKLNREDLLRKQRTFDNGSIPHQIHLGELHAILRRQEDFYPFLKDNREKIEKILTFRIPYYVGPLARGNSRFAWMTRKSEETITPWNFEEVVDKGASAQSFIERMTNFDKNLPNEKVLPKHSLLYEYFTVYNELTKVKYVTEGMRKPAFLSGEQKKAIVDLLFKTNRKVTVKQLKEDYFKKIECFDSVEISGVEDRFNASLGTYHDLLKIIKDKDFLDNEENEDILEDIVLTLTLFEDREMIEERLKTYAHLFDDKVMKQLKRRRYTGWGRLSRKLINGIRDKQSGKTILDFLKSDGFANRNFMQLIHDDSLTFKEDIQKAQVSGQGDSLHEHIANLAGSPAIKKGILQTVKVVDELVKVMGRHKPENIVIEMARENQTTQKGQKNSRERMKRIEEGIKELGSQILKEHPVENTQLQNEKLYLYYLQNGRDMYVDQELDINRLSDYDVDHIVPQSFLKDDSIDNKVLTRSDKARGKSDNVPSEEVVKKMKNYWRQLLNAKLITQRKFDNLTKAERGGLSELDKAGFIKRQLVETRQITKHVAQILDSRMNTKYDENDKLIREVKVITLKSKLVSDFRKDFQFYKVREINNYHHAHDAYLNAVVGTALIKKYPKLESEFVYGDYKVYDVRKMIAKSEQEIGKATAKYFFYSNIMNFFKTEITLANGEIRKRPLIETNGETGEIVWDKGRDFATVRKVLSMPQVNIVKKTEVQTGGFSKESILPKRNSDKLIARKKDWDPKKYGGFDSPTVAYSVLVVAKVEKGKSKKLKSVKELLGITIMERSSFEKNPIDFLEAKGYKEVKKDLIIKLPKYSLFELENGRKRMLASAGELQKGNELALPSKYVNFLYLASHYEKLKGSPEDNEQKQLFVEQHKHYLDEIIEQISEFSKRVILADANLDKVLSAYNKHRDKPIREQAENIIHLFTLTNLGAPAAFKYFDTTIDRKRYTSTKEVLDATLIHQSITGLYETRIDLSQLGGDGGEAAAKGGGGSEAAAKGGTAPLEEEYRLFLEAPIQNVTLLEQWKREIPKVWAEINPPGLASTQAPIHVQLLSTALPVRVRQYPITLEAKRSLRETIRKFRAAGILRPVHSPWNTPLLPVRKSGTSEYRMVQDLREVNKRVETIHPTVPNPYTLLSLLPPDRIWYSVLDLKDAFFCIPLAPESQLIFAFEWADAEEGESGQLTWTRLPQGFKNSPTLFNEALNRDLQGFRLDHPSVSLLQYVDDLLIAADTQAACLSATRDLLMTLAELGYRVSGKKAQLCQEEVTYLGFKIHKGSRSLSNSRTQAILQIPVPKTKRQVREFLGKIGYCRLFIPGFAELAQPLYAATRPGNDPLVWGEKEEEAFQSLKLALTQPPALALPSLDKPFQLFVEETSGAAKGVLTQALGPWKRPVAYLSKRLDPVAAGWPRCLRAIAAAALLTREASKLTFGQDIEITSSHNLESLLRSPPDKWLTNARITQYQVLLLDPPRVRFKQTAALNPATLLPETDDTLPIHHCLDTLDSLTSTRPDLTDQPLAQAEATLFTDGSSYIRDGKRYAGAAVVTLDSVIWAEPLPIGTSAQKAELIALTKALEWSKDKSVNIYTDSRYAFATLHVHGMIYRERGWLTAGGKAIKNAPEILALLTAVWLPKRVAVMHCKGHQKDDAPTSTGNRRADEVAREVAIRPLSTQATISAGKRTADGSEFEKRTADGSEFESPKKKAKVE

SEQ ID NO: 1400 - protein, 2112 aa, synthetic construct
MPAAKRVKLDGGDKKYSIGLDIGTNSVGWAVITDEYKVPSKKFKVLGNTDRHSIKKNLIGALLFDSGETAEATRLKRTARRRYTRRKNRICYLQEIFSNEMAKVDDSFFHRLEESFLVEEDKKHERHPIFGNIVDEVAYHEKYPTIYHLRKKLVDSTDKADLRLIYLALAHMIKFRGHFLIEGDLNPDNSDVDKLFIQLVQTYNQLFEENPINASGVDAKAILSARLSKSRRLENLIAQLPGEKKNGLFGNLIALSLGLTPNFKSNFDLAEDAKLQLSKDTYDDDLDNLLAQIGDQYADLFLAAKNLSDAILLSDILRVNTEITKAPLSASMIKRYDEHHQDLTLLKALVRQQLPEKYKEIFFDQSKNGYAGYIDGGASQEEFYKFIKPILEKMDGTEELLVKLNREDLLRKQRTFDNGSIPHQIHLGELHAILRRQEDFYPFLKDNREKIEKILTFRIPYYVGPLARGNSRFAWMTRKSEETITPWNFEEVVDKGASAQSFIERMTNFDKNLPNEKVLPKHSLLYEYFTVYNELTKVKYVTEGMRKPAFLSGEQKKAIVDLLFKTNRKVTVKQLKEDYFKKIECFDSVEISGVEDRFNASLGTYHDLLKIIKDKDFLDNEENEDILEDIVLTLTLFEDREMIEERLKTYAHLFDDKVMKQLKRRRYTGWGRLSRKLINGIRDKQSGKTILDFLKSDGFANRNFMQLIHDDSLTFKEDIQKAQVSGQGDSLHEHIANLAGSPAIKKGILQTVKVVDELVKVMGRHKPENIVIEMARENQTTQKGQKNSRERMKRIEEGIKELGSQILKEHPVENTQLQNEKLYLYYLQNGRDMYVDQELDINRLSDYDVDHIVPQSFLKDDSIDNKVLTRSDKARGKSDNVPSEEVVKKMKNYWRQLLNAKLITQRKFDNLTKAERGGLSELDKAGFIKRQLVETRQITKHVAQILDSRMNTKYDENDKLIREVKVITLKSKLVSDFRKDFQFYKVREINNYHHAHDAYLNAVVGTALIKKYPKLESEFVYGDYKVYDVRKMIAKSEQEIGKATAKYFFYSNIMNFFKTEITLANGEIRKRPLIETNGETGEIVWDKGRDFATVRKVLSMPQVNIVKKTEVQTGGFSKESILPKRNSDKLIARKKDWDPKKYGGFDSPTVAYSVLVVAKVEKGKSKKLKSVKELLGITIMERSSFEKNPIDFLEAKGYKEVKKDLIIKLPKYSLFELENGRKRMLASAGELQKGNELALPSKYVNFLYLASHYEKLKGSPEDNEQKQLFVEQHKHYLDEIIEQISEFSKRVILADANLDKVLSAYNKHRDKPIREQAENIIHLFTLTNLGAPAAFKYFDTTIDRKRYTSTKEVLDATLIHQSITGLYETRIDLSQLGGDGGEAAAKEAAAKEAAAKEAAAKEAAAKGGTAPLEEEYRLFLEAPIQNVTLLEQWKREIPKVWAEINPPGLASTQAPIHVQLLSTALPVRVRQYPITLEAKRSLRETIRKFRAAGILRPVHSPWNTPLLPVRKSGTSEYRMVQDLREVNKRVETIHPTVPNPYTLLSLLPPDRIWYSVLDLKDAFFCIPLAPESQLIFAFEWADAEEGESGQLTWTRLPQGFKNSPTLFNEALNRDLQGFRLDHPSVSLLQYVDDLLIAADTQAACLSATRDLLMTLAELGYRVSGKKAQLCQEEVTYLGFKIHKGSRSLSNSRTQAILQIPVPKTKRQVREFLGKIGYCRLFIPGFAELAQPLYAATRPGNDPLVWGEKEEEAFQSLKLALTQPPALALPSLDKPFQLFVEETSGAAKGVLTQALGPWKRPVAYLSKRLDPVAAGWPRCLRAIAAAALLTREASKLTFGQDIEITSSHNLESLLRSPPDKWLTNARITQYQVLLLDPPRVRFKQTAALNPATLLPETDDTLPIHHCLDTLDSLTSTRPDLTDQPLAQAEATLFTDGSSYIRDGKRYAGAAVVTLDSVIWAEPLPIGTSAQKAELIALTKALEWSKDKSVNIYTDSRYAFATLHVHGMIYRERGWLTAGGKAIKNAPEILALLTAVWLPKRVAVMHCKGHQKDDAPTSTGNRRADEVAREVAIRPLSTQATISAGKRTADGSEFEKRTADGSEFESPKKKAKVE

SEQ ID NO: 1401 - protein, 2096 aa, synthetic construct
MPAAKRVKLDGGDKKYSIGLDIGTNSVGWAVITDEYKVPSKKFKVLGNTDRHSIKKNLIGALLFDSGETAEATRLKRTARRRYTRRKNRICYLQEIFSNEMAKVDDSFFHRLEESFLVEEDKKHERHPIFGNIVDEVAYHEKYPTIYHLRKKLVDSTDKADLRLIYLALAHMIKFRGHFLIEGDLNPDNSDVDKLFIQLVQTYNQLFEENPINASGVDAKAILSARLSKSRRLENLIAQLPGEKKNGLFGNLIALSLGLTPNFKSNFDLAEDAKLQLSKDTYDDDLDNLLAQIGDQYADLFLAAKNLSDAILLSDILRVNTEITKAPLSASMIKRYDEHHQDLTLLKALVRQQLPEKYKEIFFDQSKNGYAGYIDGGASQEEFYKFIKPILEKMDGTEELLVKLNREDLLRKQRTFDNGSIPHQIHLGELHAILRRQEDFYPFLKDNREKIEKILTFRIPYYVGPLARGNSRFAWMTRKSEETITPWNFEEVVDKGASAQSFIERMTNFDKNLPNEKVLPKHSLLYEYFTVYNELTKVKYVTEGMRKPAFLSGEQKKAIVDLLFKTNRKVTVKQLKEDYFKKIECFDSVEISGVEDRFNASLGTYHDLLKIIKDKDFLDNEENEDILEDIVLTLTLFEDREMIEERLKTYAHLFDDKVMKQLKRRRYTGWGRLSRKLINGIRDKQSGKTILDFLKSDGFANRNFMQLIHDDSLTFKEDIQKAQVSGQGDSLHEHIANLAGSPAIKKGILQTVKVVDELVKVMGRHKPENIVIEMARENQTTQKGQKNSRERMKRIEEGIKELGSQILKEHPVENTQLQNEKLYLYYLQNGRDMYVDQELDINRLSDYDVDHIVPQSFLKDDSIDNKVLTRSDKARGKSDNVPSEEVVKKMKNYWRQLLNAKLITQRKFDNLTKAERGGLSELDKAGFIKRQLVETRQITKHVAQILDSRMNTKYDENDKLIREVKVITLKSKLVSDFRKDFQFYKVREINNYHHAHDAYLNAVVGTALIKKYPKLESEFVYGDYKVYDVRKMIAKSEQEIGKATAKYFFYSNIMNFFKTEITLANGEIRKRPLIETNGETGEIVWDKGRDFATVRKVLSMPQVNIVKKTEVQTGGFSKESILPKRNSDKLIARKKDWDPKKYGGFDSPTVAYSVLVVAKVEKGKSKKLKSVKELLGITIMERSSFEKNPIDFLEAKGYKEVKKDLIIKLPKYSLFELENGRKRMLASAGELQKGNELALPSKYVNFLYLASHYEKLKGSPEDNEQKQLFVEQHKHYLDEIIEQISEFSKRVILADANLDKVLSAYNKHRDKPIREQAENIIHLFTLTNLGAPAAFKYFDTTIDRKRYTSTKEVLDATLIHQSITGLYETRIDLSQLGGDGGPAPGSSGGSGGTAPLEEEYRLFLEAPIQNVTLLEQWKREIPKVWAEINPPGLASTQAPIHVQLLSTALPVRVRQYPITLEAKRSLRETIRKFRAAGILRPVHSPWNTPLLPVRKSGTSEYRMVQDLREVNKRVETIHPTVPNPYTLLSLLPPDRIWYSVLDLKDAFFCIPLAPESQLIFAFEWADAEEGESGQLTWTRLPQGFKNSPTLFNEALNRDLQGFRLDHPSVSLLQYVDDLLIAADTQAACLSATRDLLMTLAELGYRVSGKKAQLCQEEVTYLGFKIHKGSRSLSNSRTQAILQIPVPKTKRQVREFLGKIGYCRLFIPGFAELAQPLYAATRPGNDPLVWGEKEEEAFQSLKLALTQPPALALPSLDKPFQLFVEETSGAAKGVLTQALGPWKRPVAYLSKRLDPVAAGWPRCLRAIAAAALLTREASKLTFGQDIEITSSHNLESLLRSPPDKWLTNARITQYQVLLLDPPRVRFKQTAALNPATLLPETDDTLPIHHCLDTLDSLTSTRPDLTDQPLAQAEATLFTDGSSYIRDGKRYAGAAVVTLDSVIWAEPLPIGTSAQKAELIALTKALEWSKDKSVNIYTDSRYAFATLHVHGMIYRERGWLTAGGKAIKNAPEILALLTAVWLPKRVAVMHCKGHQKDDAPTSTGNRRADEVAREVAIRPLSTQATISAGKRTADGSEFEKRTADGSEFESPKKKAKVE

SEQ ID NO: 1402 - protein, 2096 aa, synthetic construct
MPAAKRVKLDGGDKKYSIGLDIGTNSVGWAVITDEYKVPSKKFKVLGNTDRHSIKKNLIGALLFDSGETAEATRLKRTARRRYTRRKNRICYLQEIFSNEMAKVDDSFFHRLEESFLVEEDKKHERHPIFGNIVDEVAYHEKYPTIYHLRKKLVDSTDKADLRLIYLALAHMIKFRGHFLIEGDLNPDNSDVDKLFIQLVQTYNQLFEENPINASGVDAKAILSARLSKSRRLENLIAQLPGEKKNGLFGNLIALSLGLTPNFKSNFDLAEDAKLQLSKDTYDDDLDNLLAQIGDQYADLFLAAKNLSDAILLSDILRVNTEITKAPLSASMIKRYDEHHQDLTLLKALVRQQLPEKYKEIFFDQSKNGYAGYIDGGASQEEFYKFIKPILEKMDGTEELLVKLNREDLLRKQRTFDNGSIPHQIHLGELHAILRRQEDFYPFLKDNREKIEKILTFRIPYYVGPLARGNSRFAWMTRKSEETITPWNFEEVVDKGASAQSFIERMTNFDKNLPNEKVLPKHSLLYEYFTVYNELTKVKYVTEGMRKPAFLSGEQKKAIVDLLFKTNRKVTVKQLKEDYFKKIECFDSVEISGVEDRFNASLGTYHDLLKIIKDKDFLDNEENEDILEDIVLTLTLFEDREMIEERLKTYAHLFDDKVMKQLKRRRYTGWGRLSRKLINGIRDKQSGKTILDFLKSDGFANRNFMQLIHDDSLTFKEDIQKAQVSGQGDSLHEHIANLAGSPAIKKGILQTVKVVDELVKVMGRHKPENIVIEMARENQTTQKGQKNSRERMKRIEEGIKELGSQILKEHPVENTQLQNEKLYLYYLQNGRDMYVDQELDINRLSDYDVDHIVPQSFLKDDSIDNKVLTRSDKARGKSDNVPSEEVVKKMKNYWRQLLNAKLITQRKFDNLTKAERGGLSELDKAGFIKRQLVETRQITKHVAQILDSRMNTKYDENDKLIREVKVITLKSKLVSDFRKDFQFYKVREINNYHHAHDAYLNAVVGTALIKKYPKLESEFVYGDYKVYDVRKMIAKSEQEIGKATAKYFFYSNIMNFFKTEITLANGEIRKRPLIETNGETGEIVWDKGRDFATVRKVLSMPQVNIVKKTEVQTGGFSKESILPKRNSDKLIARKKDWDPKKYGGFDSPTVAYSVLVVAKVEKGKSKKLKSVKELLGITIMERSSFEKNPIDFLEAKGYKEVKKDLIIKLPKYSLFELENGRKRMLASAGELQKGNELALPSKYVNFLYLASHYEKLKGSPEDNEQKQLFVEQHKHYLDEIIEQISEFSKRVILADANLDKVLSAYNKHRDKPIREQAENIIHLFTLTNLGAPAAFKYFDTTIDRKRYTSTKEVLDATLIHQSITGLYETRIDLSQLGGDGGGGGPAPGGSGGTAPLEEEYRLFLEAPIQNVTLLEQWKREIPKVWAEINPPGLASTQAPIHVQLLSTALPVRVRQYPITLEAKRSLRETIRKFRAAGILRPVHSPWNTPLLPVRKSGTSEYRMVQDLREVNKRVETIHPTVPNPYTLLSLLPPDRIWYSVLDLKDAFFCIPLAPESQLIFAFEWADAEEGESGQLTWTRLPQGFKNSPTLFNEALNRDLQGFRLDHPSVSLLQYVDDLLIAADTQAACLSATRDLLMTLAELGYRVSGKKAQLCQEEVTYLGFKIHKGSRSLSNSRTQAILQIPVPKTKRQVREFLGKIGYCRLFIPGFAELAQPLYAATRPGNDPLVWGEKEEEAFQSLKLALTQPPALALPSLDKPFQLFVEETSGAAKGVLTQALGPWKRPVAYLSKRLDPVAAGWPRCLRAIAAAALLTREASKLTFGQDIEITSSHNLESLLRSPPDKWLTNARITQYQVLLLDPPRVRFKQTAALNPATLLPETDDTLPIHHCLDTLDSLTSTRPDLTDQPLAQAEATLFTDGSSYIRDGKRYAGAAVVTLDSVIWAEPLPIGTSAQKAELIALTKALEWSKDKSVNIYTDSRYAFATLHVHGMIYRERGWLTAGGKAIKNAPEILALLTAVWLPKRVAVMHCKGHQKDDAPTSTGNRRADEVAREVAIRPLSTQATISAGKRTADGSEFEKRTADGSEFESPKKKAKVE

SEQ ID NO: 1403 - protein, 2096 aa, synthetic construct
MPAAKRVKLDGGDKKYSIGLDIGTNSVGWAVITDEYKVPSKKFKVLGNTDRHSIKKNLIGALLFDSGETAEATRLKRTARRRYTRRKNRICYLQEIFSNEMAKVDDSFFHRLEESFLVEEDKKHERHPIFGNIVDEVAYHEKYPTIYHLRKKLVDSTDKADLRLIYLALAHMIKFRGHFLIEGDLNPDNSDVDKLFIQLVQTYNQLFEENPINASGVDAKAILSARLSKSRRLENLIAQLPGEKKNGLFGNLIALSLGLTPNFKSNFDLAEDAKLQLSKDTYDDDLDNLLAQIGDQYADLFLAAKNLSDAILLSDILRVNTEITKAPLSASMIKRYDEHHQDLTLLKALVRQQLPEKYKEIFFDQSKNGYAGYIDGGASQEEFYKFIKPILEKMDGTEELLVKLNREDLLRKQRTFDNGSIPHQIHLGELHAILRRQEDFYPFLKDNREKIEKILTFRIPYYVGPLARGNSRFAWMTRKSEETITPWNFEEVVDKGASAQSFIERMTNFDKNLPNEKVLPKHSLLYEYFTVYNELTKVKYVTEGMRKPAFLSGEQKKAIVDLLFKTNRKVTVKQLKEDYFKKIECFDSVEISGVEDRFNASLGTYHDLLKIIKDKDFLDNEENEDILEDIVLTLTLFEDREMIEERLKTYAHLFDDKVMKQLKRRRYTGWGRLSRKLINGIRDKQSGKTILDFLKSDGFANRNFMQLIHDDSLTFKEDIQKAQVSGQGDSLHEHIANLAGSPAIKKGILQTVKVVDELVKVMGRHKPENIVIEMARENQTTQKGQKNSRERMKRIEEGIKELGSQILKEHPVENTQLQNEKLYLYYLQNGRDMYVDQELDINRLSDYDVDHIVPQSFLKDDSIDNKVLTRSDKARGKSDNVPSEEVVKKMKNYWRQLLNAKLITQRKFDNLTKAERGGLSELDKAGFIKRQLVETRQITKHVAQILDSRMNTKYDENDKLIREVKVITLKSKLVSDFRKDFQFYKVREINNYHHAHDAYLNAVVGTALIKKYPKLESEFVYGDYKVYDVRKMIAKSEQEIGKATAKYFFYSNIMNFFKTEITLANGEIRKRPLIETNGETGEIVWDKGRDFATVRKVLSMPQVNIVKKTEVQTGGFSKESILPKRNSDKLIARKKDWDPKKYGGFDSPTVAYSVLVVAKVEKGKSKKLKSVKELLGITIMERSSFEKNPIDFLEAKGYKEVKKDLIIKLPKYSLFELENGRKRMLASAGELQKGNELALPSKYVNFLYLASHYEKLKGSPEDNEQKQLFVEQHKHYLDEIIEQISEFSKRVILADANLDKVLSAYNKHRDKPIREQAENIIHLFTLTNLGAPAAFKYFDTTIDRKRYTSTKEVLDATLIHQSITGLYETRIDLSQLGGDGGPAPGGSGGGGGTAPLEEEYRLFLEAPIQNVTLLEQWKREIPKVWAEINPPGLASTQAPIHVQLLSTALPVRVRQYPITLEAKRSLRETIRKFRAAGILRPVHSPWNTPLLPVRKSGTSEYRMVQDLREVNKRVETIHPTVPNPYTLLSLLPPDRIWYSVLDLKDAFFCIPLAPESQLIFAFEWADAEEGESGQLTWTRLPQGFKNSPTLFNEALNRDLQGFRLDHPSVSLLQYVDDLLIAADTQAACLSATRDLLMTLAELGYRVSGKKAQLCQEEVTYLGFKIHKGSRSLSNSRTQAILQIPVPKTKRQVREFLGKIGYCRLFIPGFAELAQPLYAATRPGNDPLVWGEKEEEAFQSLKLALTQPPALALPSLDKPFQLFVEETSGAAKGVLTQALGPWKRPVAYLSKRLDPVAAGWPRCLRAIAAAALLTREASKLTFGQDIEITSSHNLESLLRSPPDKWLTNARITQYQVLLLDPPRVRFKQTAALNPATLLPETDDTLPIHHCLDTLDSLTSTRPDLTDQPLAQAEATLFTDGSSYIRDGKRYAGAAVVTLDSVIWAEPLPIGTSAQKAELIALTKALEWSKDKSVNIYTDSRYAFATLHVHGMIYRERGWLTAGGKAIKNAPEILALLTAVWLPKRVAVMHCKGHQKDDAPTSTGNRRADEVAREVAIRPLSTQATISAGKRTADGSEFEKRTADGSEFESPKKKAKVE

SEQ ID NO: 1404 - protein, 2098 aa, synthetic construct
MPAAKRVKLDGGDKKYSIGLDIGTNSVGWAVITDEYKVPSKKFKVLGNTDRHSIKKNLIGALLFDSGETAEATRLKRTARRRYTRRKNRICYLQEIFSNEMAKVDDSFFHRLEESFLVEEDKKHERHPIFGNIVDEVAYHEKYPTIYHLRKKLVDSTDKADLRLIYLALAHMIKFRGHFLIEGDLNPDNSDVDKLFIQLVQTYNQLFEENPINASGVDAKAILSARLSKSRRLENLIAQLPGEKKNGLFGNLIALSLGLTPNFKSNFDLAEDAKLQLSKDTYDDDLDNLLAQIGDQYADLFLAAKNLSDAILLSDILRVNTEITKAPLSASMIKRYDEHHQDLTLLKALVRQQLPEKYKEIFFDQSKNGYAGYIDGGASQEEFYKFIKPILEKMDGTEELLVKLNREDLLRKQRTFDNGSIPHQIHLGELHAILRRQEDFYPFLKDNREKIEKILTFRIPYYVGPLARGNSRFAWMTRKSEETITPWNFEEVVDKGASAQSFIERMTNFDKNLPNEKVLPKHSLLYEYFTVYNELTKVKYVTEGMRKPAFLSGEQKKAIVDLLFKTNRKVTVKQLKEDYFKKIECFDSVEISGVEDRFNASLGTYHDLLKIIKDKDFLDNEENEDILEDIVLTLTLFEDREMIEERLKTYAHLFDDKVMKQLKRRRYTGWGRLSRKLINGIRDKQSGKTILDFLKSDGFANRNFMQLIHDDSLTFKEDIQKAQVSGQGDSLHEHIANLAGSPAIKKGILQTVKVVDELVKVMGRHKPENIVIEMARENQTTQKGQKNSRERMKRIEEGIKELGSQILKEHPVENTQLQNEKLYLYYLQNGRDMYVDQELDINRLSDYDVDHIVPQSFLKDDSIDNKVLTRSDKARGKSDNVPSEEVVKKMKNYWRQLLNAKLITQRKFDNLTKAERGGLSELDKAGFIKRQLVETRQITKHVAQILDSRMNTKYDENDKLIREVKVITLKSKLVSDFRKDFQFYKVREINNYHHAHDAYLNAVVGTALIKKYPKLESEFVYGDYKVYDVRKMIAKSEQEIGKATAKYFFYSNIMNFFKTEITLANGEIRKRPLIETNGETGEIVWDKGRDFATVRKVLSMPQVNIVKKTEVQTGGFSKESILPKRNSDKLIARKKDWDPKKYGGFDSPTVAYSVLVVAKVEKGKSKKLKSVKELLGITIMERSSFEKNPIDFLEAKGYKEVKKDLIIKLPKYSLFELENGRKRMLASAGELQKGNELALPSKYVNFLYLASHYEKLKGSPEDNEQKQLFVEQHKHYLDEIIEQISEFSKRVILADANLDKVLSAYNKHRDKPIREQAENIIHLFTLTNLGAPAAFKYFDTTIDRKRYTSTKEVLDATLIHQSITGLYETRIDLSQLGGDGGGGGGSSEAAAKGGTAPLEEEYRLFLEAPIQNVTLLEQWKREIPKVWAEINPPGLASTQAPIHVQLLSTALPVRVRQYPITLEAKRSLRETIRKFRAAGILRPVHSPWNTPLLPVRKSGTSEYRMVQDLREVNKRVETIHPTVPNPYTLLSLLPPDRIWYSVLDLKDAFFCIPLAPESQLIFAFEWADAEEGESGQLTWTRLPQGFKNSPTLFNEALNRDLQGFRLDHPSVSLLQYVDDLLIAADTQAACLSATRDLLMTLAELGYRVSGKKAQLCQEEVTYLGFKIHKGSRSLSNSRTQAILQIPVPKTKRQVREFLGKIGYCRLFIPGFAELAQPLYAATRPGNDPLVWGEKEEEAFQSLKLALTQPPALALPSLDKPFQLFVEETSGAAKGVLTQALGPWKRPVAYLSKRLDPVAAGWPRCLRAIAAAALLTREASKLTFGQDIEITSSHNLESLLRSPPDKWLTNARITQYQVLLLDPPRVRFKQTAALNPATLLPETDDTLPIHHCLDTLDSLTSTRPDLTDQPLAQAEATLFTDGSSYIRDGKRYAGAAVVTLDSVIWAEPLPIGTSAQKAELIALTKALEWSKDKSVNIYTDSRYAFATLHVHGMIYRERGWLTAGGKAIKNAPEILALLTAVWLPKRVAVMHCKGHQKDDAPTSTGNRRADEVAREVAIRPLSTQATISAGKRTADGSEFEKRTADGSEFESPKKKAKVE

SEQ ID NO: 1405 - protein, 2095 aa, synthetic construct
MPAAKRVKLDGGDKKYSIGLDIGTNSVGWAVITDEYKVPSKKFKVLGNTDRHSIKKNLIGALLFDSGETAEATRLKRTARRRYTRRKNRICYLQEIFSNEMAKVDDSFFHRLEESFLVEEDKKHERHPIFGNIVDEVAYHEKYPTIYHLRKKLVDSTDKADLRLIYLALAHMIKFRGHFLIEGDLNPDNSDVDKLFIQLVQTYNQLFEENPINASGVDAKAILSARLSKSRRLENLIAQLPGEKKNGLFGNLIALSLGLTPNFKSNFDLAEDAKLQLSKDTYDDDLDNLLAQIGDQYADLFLAAKNLSDAILLSDILRVNTEITKAPLSASMIKRYDEHHQDLTLLKALVRQQLPEKYKEIFFDQSKNGYAGYIDGGASQEEFYKFIKPILEKMDGTEELLVKLNREDLLRKQRTFDNGSIPHQIHLGELHAILRRQEDFYPFLKDNREKIEKILTFRIPYYVGPLARGNSRFAWMTRKSEETITPWNFEEVVDKGASAQSFIERMTNFDKNLPNEKVLPKHSLLYEYFTVYNELTKVKYVTEGMRKPAFLSGEQKKAIVDLLFKTNRKVTVKQLKEDYFKKIECFDSVEISGVEDRFNASLGTYHDLLKIIKDKDFLDNEENEDILEDIVLTLTLFEDREMIEERLKTYAHLFDDKVMKQLKRRRYTGWGRLSRKLINGIRDKQSGKTILDFLKSDGFANRNFMQLIHDDSLTFKEDIQKAQVSGQGDSLHEHIANLAGSPAIKKGILQTVKVVDELVKVMGRHKPENIVIEMARENQTTQKGQKNSRERMKRIEEGIKELGSQILKEHPVENTQLQNEKLYLYYLQNGRDMYVDQELDINRLSDYDVDHIVPQSFLKDDSIDNKVLTRSDKARGKSDNVPSEEVVKKMKNYWRQLLNAKLITQRKFDNLTKAERGGLSELDKAGFIKRQLVETRQITKHVAQILDSRMNTKYDENDKLIREVKVITLKSKLVSDFRKDFQFYKVREINNYHHAHDAYLNAVVGTALIKKYPKLESEFVYGDYKVYDVRKMIAKSEQEIGKATAKYFFYSNIMNFFKTEITLANGEIRKRPLIETNGETGEIVWDKGRDFATVRKVLSMPQVNIVKKTEVQTGGFSKESILPKRNSDKLIARKKDWDPKKYGGFDSPTVAYSVLVVAKVEKGKSKKLKSVKELLGITIMERSSFEKNPIDFLEAKGYKEVKKDLIIKLPKYSLFELENGRKRMLASAGELQKGNELALPSKYVNFLYLASHYEKLKGSPEDNEQKQLFVEQHKHYLDEIIEQISEFSKRVILADANLDKVLSAYNKHRDKPIREQAENIIHLFTLTNLGAPAAFKYFDTTIDRKRYTSTKEVLDATLIHQSITGLYETRIDLSQLGGDGGGSSEAAAKGGTAPLEEEYRLFLEAPIQNVTLLEQWKREIPKVWAEINPPGLASTQAPIHVQLLSTALPVRVRQYPITLEAKRSLRETIRKFRAAGILRPVHSPWNTPLLPVRKSGTSEYRMVQDLREVNKRVETIHPTVPNPYTLLSLLPPDRIWYSVLDLKDAFFCIPLAPESQLIFAFEWADAEEGESGQLTWTRLPQGFKNSPTLFNEALNRDLQGFRLDHPSVSLLQYVDDLLIAADTQAACLSATRDLLMTLAELGYRVSGKKAQLCQEEVTYLGFKIHKGSRSLSNSRTQAILQIPVPKTKRQVREFLGKIGYCRLFIPGFAELAQPLYAATRPGNDPLVWGEKEEEAFQSLKLALTQPPALALPSLDKPFQLFVEETSGAAKGVLTQALGPWKRPVAYLSKRLDPVAAGWPRCLRAIAAAALLTREASKLTFGQDIEITSSHNLESLLRSPPDKWLTNARITQYQVLLLDPPRVRFKQTAALNPATLLPETDDTLPIHHCLDTLDSLTSTRPDLTDQPLAQAEATLFTDGSSYIRDGKRYAGAAVVTLDSVIWAEPLPIGTSAQKAELIALTKALEWSKDKSVNIYTDSRYAFATLHVHGMIYRERGWLTAGGKAIKNAPEILALLTAVWLPKRVAVMHCKGHQKDDAPTSTGNRRADEVAREVAIRPLSTQATISAGKRTADGSEFEKRTADGSEFESPKKKAKVE

SEQ ID NO: 1406 - protein, 2098 aa, synthetic construct
MPAAKRVKLDGGDKKYSIGLDIGTNSVGWAVITDEYKVPSKKFKVLGNTDRHSIKKNLIGALLFDSGETAEATRLKRTARRRYTRRKNRICYLQEIFSNEMAKVDDSFFHRLEESFLVEEDKKHERHPIFGNIVDEVAYHEKYPTIYHLRKKLVDSTDKADLRLIYLALAHMIKFRGHFLIEGDLNPDNSDVDKLFIQLVQTYNQLFEENPINASGVDAKAILSARLSKSRRLENLIAQLPGEKKNGLFGNLIALSLGLTPNFKSNFDLAEDAKLQLSKDTYDDDLDNLLAQIGDQYADLFLAAKNLSDAILLSDILRVNTEITKAPLSASMIKRYDEHHQDLTLLKALVRQQLPEKYKEIFFDQSKNGYAGYIDGGASQEEFYKFIKPILEKMDGTEELLVKLNREDLLRKQRTFDNGSIPHQIHLGELHAILRRQEDFYPFLKDNREKIEKILTFRIPYYVGPLARGNSRFAWMTRKSEETITPWNFEEVVDKGASAQSFIERMTNFDKNLPNEKVLPKHSLLYEYFTVYNELTKVKYVTEGMRKPAFLSGEQKKAIVDLLFKTNRKVTVKQLKEDYFKKIECFDSVEISGVEDRFNASLGTYHDLLKIIKDKDFLDNEENEDILEDIVLTLTLFEDREMIEERLKTYAHLFDDKVMKQLKRRRYTGWGRLSRKLINGIRDKQSGKTILDFLKSDGFANRNFMQLIHDDSLTFKEDIQKAQVSGQGDSLHEHIANLAGSPAIKKGILQTVKVVDELVKVMGRHKPENIVIEMARENQTTQKGQKNSRERMKRIEEGIKELGSQILKEHPVENTQLQNEKLYLYYLQNGRDMYVDQELDINRLSDYDVDHIVPQSFLKDDSIDNKVLTRSDKARGKSDNVPSEEVVKKMKNYWRQLLNAKLITQRKFDNLTKAERGGLSELDKAGFIKRQLVETRQITKHVAQILDSRMNTKYDENDKLIREVKVITLKSKLVSDFRKDFQFYKVREINNYHHAHDAYLNAVVGTALIKKYPKLESEFVYGDYKVYDVRKMIAKSEQEIGKATAKYFFYSNIMNFFKTEITLANGEIRKRPLIETNGETGEIVWDKGRDFATVRKVLSMPQVNIVKKTEVQTGGFSKESILPKRNSDKLIARKKDWDPKKYGGFDSPTVAYSVLVVAKVEKGKSKKLKSVKELLGITIMERSSFEKNPIDFLEAKGYKEVKKDLIIKLPKYSLFELENGRKRMLASAGELQKGNELALPSKYVNFLYLASHYEKLKGSPEDNEQKQLFVEQHKHYLDEIIEQISEFSKRVILADANLDKVLSAYNKHRDKPIREQAENIIHLFTLTNLGAPAAFKYFDTTIDRKRYTSTKEVLDATLIHQSITGLYETRIDLSQLGGDGGEAAAKGGSGSSGGTAPLEEEYRLFLEAPIQNVTLLEQWKREIPKVWAEINPPGLASTQAPIHVQLLSTALPVRVRQYPITLEAKRSLRETIRKFRAAGILRPVHSPWNTPLLPVRKSGTSEYRMVQDLREVNKRVETIHPTVPNPYTLLSLLPPDRIWYSVLDLKDAFFCIPLAPESQLIFAFEWADAEEGESGQLTWTRLPQGFKNSPTLFNEALNRDLQGFRLDHPSVSLLQYVDDLLIAADTQAACLSATRDLLMTLAELGYRVSGKKAQLCQEEVTYLGFKIHKGSRSLSNSRTQAILQIPVPKTKRQVREFLGKIGYCRLFIPGFAELAQPLYAATRPGNDPLVWGEKEEEAFQSLKLALTQPPALALPSLDKPFQLFVEETSGAAKGVLTQALGPWKRPVAYLSKRLDPVAAGWPRCLRAIAAAALLTREASKLTFGQDIEITSSHNLESLLRSPPDKWLTNARITQYQVLLLDPPRVRFKQTAALNPATLLPETDDTLPIHHCLDTLDSLTSTRPDLTDQPLAQAEATLFTDGSSYIRDGKRYAGAAVVTLDSVIWAEPLPIGTSAQKAELIALTKALEWSKDKSVNIYTDSRYAFATLHVHGMIYRERGWLTAGGKAIKNAPEILALLTAVWLPKRVAVMHCKGHQKDDAPTSTGNRRADEVAREVAIRPLSTQATISAGKRTADGSEFEKRTADGSEFESPKKKAKVE

SEQ ID NO: 1407 - protein, 2095 aa, synthetic construct
MPAAKRVKLDGGDKKYSIGLDIGTNSVGWAVITDEYKVPSKKFKVLGNTDRHSIKKNLIGALLFDSGETAEATRLKRTARRRYTRRKNRICYLQEIFSNEMAKVDDSFFHRLEESFLVEEDKKHERHPIFGNIVDEVAYHEKYPTIYHLRKKLVDSTDKADLRLIYLALAHMIKFRGHFLIEGDLNPDNSDVDKLFIQLVQTYNQLFEENPINASGVDAKAILSARLSKSRRLENLIAQLPGEKKNGLFGNLIALSLGLTPNFKSNFDLAEDAKLQLSKDTYDDDLDNLLAQIGDQYADLFLAAKNLSDAILLSDILRVNTEITKAPLSASMIKRYDEHHQDLTLLKALVRQQLPEKYKEIFFDQSKNGYAGYIDGGASQEEFYKFIKPILEKMDGTEELLVKLNREDLLRKQRTFDNGSIPHQIHLGELHAILRRQEDFYPFLKDNREKIEKILTFRIPYYVGPLARGNSRFAWMTRKSEETITPWNFEEVVDKGASAQSFIERMTNFDKNLPNEKVLPKHSLLYEYFTVYNELTKVKYVTEGMRKPAFLSGEQKKAIVDLLFKTNRKVTVKQLKEDYFKKIECFDSVEISGVEDRFNASLGTYHDLLKIIKDKDFLDNEENEDILEDIVLTLTLFEDREMIEERLKTYAHLFDDKVMKQLKRRRYTGWGRLSRKLINGIRDKQSGKTILDFLKSDGFANRNFMQLIHDDSLTFKEDIQKAQVSGQGDSLHEHIANLAGSPAIKKGILQTVKVVDELVKVMGRHKPENIVIEMARENQTTQKGQKNSRERMKRIEEGIKELGSQILKEHPVENTQLQNEKLYLYYLQNGRDMYVDQELDINRLSDYDVDHIVPQSFLKDDSIDNKVLTRSDKARGKSDNVPSEEVVKKMKNYWRQLLNAKLITQRKFDNLTKAERGGLSELDKAGFIKRQLVETRQITKHVAQILDSRMNTKYDENDKLIREVKVITLKSKLVSDFRKDFQFYKVREINNYHHAHDAYLNAVVGTALIKKYPKLESEFVYGDYKVYDVRKMIAKSEQEIGKATAKYFFYSNIMNFFKTEITLANGEIRKRPLIETNGETGEIVWDKGRDFATVRKVLSMPQVNIVKKTEVQTGGFSKESILPKRNSDKLIARKKDWDPKKYGGFDSPTVAYSVLVVAKVEKGKSKKLKSVKELLGITIMERSSFEKNPIDFLEAKGYKEVKKDLIIKLPKYSLFELENGRKRMLASAGELQKGNELALPSKYVNFLYLASHYEKLKGSPEDNEQKQLFVEQHKHYLDEIIEQISEFSKRVILADANLDKVLSAYNKHRDKPIREQAENIIHLFTLTNLGAPAAFKYFDTTIDRKRYTSTKEVLDATLIHQSITGLYETRIDLSQLGGDGGPAPEAAAKGGTAPLEEEYRLFLEAPIQNVTLLEQWKREIPKVWAEINPPGLASTQAPIHVQLLSTALPVRVRQYPITLEAKRSLRETIRKFRAAGILRPVHSPWNTPLLPVRKSGTSEYRMVQDLREVNKRVETIHPTVPNPYTLLSLLPPDRIWYSVLDLKDAFFCIPLAPESQLIFAFEWADAEEGESGQLTWTRLPQGFKNSPTLFNEALNRDLQGFRLDHPSVSLLQYVDDLLIAADTQAACLSATRDLLMTLAELGYRVSGKKAQLCQEEVTYLGFKIHKGSRSLSNSRTQAILQIPVPKTKRQVREFLGKIGYCRLFIPGFAELAQPLYAATRPGNDPLVWGEKEEEAFQSLKLALTQPPALALPSLDKPFQLFVEETSGAAKGVLTQALGPWKRPVAYLSKRLDPVAAGWPRCLRAIAAAALLTREASKLTFGQDIEITSSHNLESLLRSPPDKWLTNARITQYQVLLLDPPRVRFKQTAALNPATLLPETDDTLPIHHCLDTLDSLTSTRPDLTDQPLAQAEATLFTDGSSYIRDGKRYAGAAVVTLDSVIWAEPLPIGTSAQKAELIALTKALEWSKDKSVNIYTDSRYAFATLHVHGMIYRERGWLTAGGKAIKNAPEILALLTAVWLPKRVAVMHCKGHQKDDAPTSTGNRRADEVAREVAIRPLSTQATISAGKRTADGSEFEKRTADGSEFESPKKKAKVE

SEQ ID NO: 1408 - protein, 2099 aa, synthetic construct
MPAAKRVKLDGGDKKYSIGLDIGTNSVGWAVITDEYKVPSKKFKVLGNTDRHSIKKNLIGALLFDSGETAEATRLKRTARRRYTRRKNRICYLQEIFSNEMAKVDDSFFHRLEESFLVEEDKKHERHPIFGNIVDEVAYHEKYPTIYHLRKKLVDSTDKADLRLIYLALAHMIKFRGHFLIEGDLNPDNSDVDKLFIQLVQTYNQLFEENPINASGVDAKAILSARLSKSRRLENLIAQLPGEKKNGLFGNLIALSLGLTPNFKSNFDLAEDAKLQLSKDTYDDDLDNLLAQIGDQYADLFLAAKNLSDAILLSDILRVNTEITKAPLSASMIKRYDEHHQDLTLLKALVRQQLPEKYKEIFFDQSKNGYAGYIDGGASQEEFYKFIKPILEKMDGTEELLVKLNREDLLRKQRTFDNGSIPHQIHLGELHAILRRQEDFYPFLKDNREKIEKILTFRIPYYVGPLARGNSRFAWMTRKSEETITPWNFEEVVDKGASAQSFIERMTNFDKNLPNEKVLPKHSLLYEYFTVYNELTKVKYVTEGMRKPAFLSGEQKKAIVDLLFKTNRKVTVKQLKEDYFKKIECFDSVEISGVEDRFNASLGTYHDLLKIIKDKDFLDNEENEDILEDIVLTLTLFEDREMIEERLKTYAHLFDDKVMKQLKRRRYTGWGRLSRKLINGIRDKQSGKTILDFLKSDGFANRNFMQLIHDDSLTFKEDIQKAQVSGQGDSLHEHIANLAGSPAIKKGILQTVKVVDELVKVMGRHKPENIVIEMARENQTTQKGQKNSRERMKRIEEGIKELGSQILKEHPVENTQLQNEKLYLYYLQNGRDMYVDQELDINRLSDYDVDHIVPQSFLKDDSIDNKVLTRSDKARGKSDNVPSEEVVKKMKNYWRQLLNAKLITQRKFDNLTKAERGGLSELDKAGFIKRQLVETRQITKHVAQILDSRMNTKYDENDKLIREVKVITLKSKLVSDFRKDFQFYKVREINNYHHAHDAYLNAVVGTALIKKYPKLESEFVYGDYKVYDVRKMIAKSEQEIGKATAKYFFYSNIMNFFKTEITLANGEIRKRPLIETNGETGEIVWDKGRDFATVRKVLSMPQVNIVKKTEVQTGGFSKESILPKRNSDKLIARKKDWDPKKYGGFDSPTVAYSVLVVAKVEKGKSKKLKSVKELLGITIMERSSFEKNPIDFLEAKGYKEVKKDLIIKLPKYSLFELENGRKRMLASAGELQKGNELALPSKYVNFLYLASHYEKLKGSPEDNEQKQLFVEQHKHYLDEIIEQISEFSKRVILADANLDKVLSAYNKHRDKPIREQAENIIHLFTLTNLGAPAAFKYFDTTIDRKRYTSTKEVLDATLIHQSITGLYETRIDLSQLGGDGGGSAGSAAGSGEFGGTAPLEEEYRLFLEAPIQNVTLLEQWKREIPKVWAEINPPGLASTQAPIHVQLLSTALPVRVRQYPITLEAKRSLRETIRKFRAAGILRPVHSPWNTPLLPVRKSGTSEYRMVQDLREVNKRVETIHPTVPNPYTLLSLLPPDRIWYSVLDLKDAFFCIPLAPESQLIFAFEWADAEEGESGQLTWTRLPQGFKNSPTLFNEALNRDLQGFRLDHPSVSLLQYVDDLLIAADTQAACLSATRDLLMTLAELGYRVSGKKAQLCQEEVTYLGFKIHKGSRSLSNSRTQAILQIPVPKTKRQVREFLGKIGYCRLFIPGFAELAQPLYAATRPGNDPLVWGEKEEEAFQSLKLALTQPPALALPSLDKPFQLFVEETSGAAKGVLTQALGPWKRPVAYLSKRLDPVAAGWPRCLRAIAAAALLTREASKLTFGQDIEITSSHNLESLLRSPPDKWLTNARITQYQVLLLDPPRVRFKQTAALNPATLLPETDDTLPIHHCLDTLDSLTSTRPDLTDQPLAQAEATLFTDGSSYIRDGKRYAGAAVVTLDSVIWAEPLPIGTSAQKAELIALTKALEWSKDKSVNIYTDSRYAFATLHVHGMIYRERGWLTAGGKAIKNAPEILALLTAVWLPKRVAVMHCKGHQKDDAPTSTGNRRADEVAREVAIRPLSTQATISAGKRTADGSEFEKRTADGSEFESPKKKAKVE

SEQ ID NO: 1409 - protein, 2096 aa, synthetic construct
MPAAKRVKLDGGDKKYSIGLDIGTNSVGWAVITDEYKVPSKKFKVLGNTDRHSIKKNLIGALLFDSGETAEATRLKRTARRRYTRRKNRICYLQEIFSNEMAKVDDSFFHRLEESFLVEEDKKHERHPIFGNIVDEVAYHEKYPTIYHLRKKLVDSTDKADLRLIYLALAHMIKFRGHFLIEGDLNPDNSDVDKLFIQLVQTYNQLFEENPINASGVDAKAILSARLSKSRRLENLIAQLPGEKKNGLFGNLIALSLGLTPNFKSNFDLAEDAKLQLSKDTYDDDLDNLLAQIGDQYADLFLAAKNLSDAILLSDILRVNTEITKAPLSASMIKRYDEHHQDLTLLKALVRQQLPEKYKEIFFDQSKNGYAGYIDGGASQEEFYKFIKPILEKMDGTEELLVKLNREDLLRKQRTFDNGSIPHQIHLGELHAILRRQEDFYPFLKDNREKIEKILTFRIPYYVGPLARGNSRFAWMTRKSEETITPWNFEEVVDKGASAQSFIERMTNFDKNLPNEKVLPKHSLLYEYFTVYNELTKVKYVTEGMRKPAFLSGEQKKAIVDLLFKTNRKVTVKQLKEDYFKKIECFDSVEISGVEDRFNASLGTYHDLLKIIKDKDFLDNEENEDILEDIVLTLTLFEDREMIEERLKTYAHLFDDKVMKQLKRRRYTGWGRLSRKLINGIRDKQSGKTILDFLKSDGFANRNFMQLIHDDSLTFKEDIQKAQVSGQGDSLHEHIANLAGSPAIKKGILQTVKVVDELVKVMGRHKPENIVIEMARENQTTQKGQKNSRERMKRIEEGIKELGSQILKEHPVENTQLQNEKLYLYYLQNGRDMYVDQELDINRLSDYDVDHIVPQSFLKDDSIDNKVLTRSDKARGKSDNVPSEEVVKKMKNYWRQLLNAKLITQRKFDNLTKAERGGLSELDKAGFIKRQLVETRQITKHVAQILDSRMNTKYDENDKLIREVKVITLKSKLVSDFRKDFQFYKVREINNYHHAHDAYLNAVVGTALIKKYPKLESEFVYGDYKVYDVRKMIAKSEQEIGKATAKYFFYSNIMNFFKTEITLANGEIRKRPLIETNGETGEIVWDKGRDFATVRKVLSMPQVNIVKKTEVQTGGFSKESILPKRNSDKLIARKKDWDPKKYGGFDSPTVAYSVLVVAKVEKGKSKKLKSVKELLGITIMERSSFEKNPIDFLEAKGYKEVKKDLIIKLPKYSLFELENGRKRMLASAGELQKGNELALPSKYVNFLYLASHYEKLKGSPEDNEQKQLFVEQHKHYLDEIIEQISEFSKRVILADANLDKVLSAYNKHRDKPIREQAENIIHLFTLTNLGAPAAFKYFDTTIDRKRYTSTKEVLDATLIHQSITGLYETRIDLSQLGGDGGGGSPAPGSSGGTAPLEEEYRLFLEAPIQNVTLLEQWKREIPKVWAEINPPGLASTQAPIHVQLLSTALPVRVRQYPITLEAKRSLRETIRKFRAAGILRPVHSPWNTPLLPVRKSGTSEYRMVQDLREVNKRVETIHPTVPNPYTLLSLLPPDRIWYSVLDLKDAFFCIPLAPESQLIFAFEWADAEEGESGQLTWTRLPQGFKNSPTLFNEALNRDLQGFRLDHPSVSLLQYVDDLLIAADTQAACLSATRDLLMTLAELGYRVSGKKAQLCQEEVTYLGFKIHKGSRSLSNSRTQAILQIPVPKTKRQVREFLGKIGYCRLFIPGFAELAQPLYAATRPGNDPLVWGEKEEEAFQSLKLALTQPPALALPSLDKPFQLFVEETSGAAKGVLTQALGPWKRPVAYLSKRLDPVAAGWPRCLRAIAAAALLTREASKLTFGQDIEITSSHNLESLLRSPPDKWLTNARITQYQVLLLDPPRVRFKQTAALNPATLLPETDDTLPIHHCLDTLDSLTSTRPDLTDQPLAQAEATLFTDGSSYIRDGKRYAGAAVVTLDSVIWAEPLPIGTSAQKAELIALTKALEWSKDKSVNIYTDSRYAFATLHVHGMIYRERGWLTAGGKAIKNAPEILALLTAVWLPKRVAVMHCKGHQKDDAPTSTGNRRADEVAREVAIRPLSTQATISAGKRTADGSEFEKRTADGSEFESPKKKAKVE

SEQ ID NO: 1410 - protein, 2093 aa, synthetic construct
MPAAKRVKLDGGDKKYSIGLDIGTNSVGWAVITDEYKVPSKKFKVLGNTDRHSIKKNLIGALLFDSGETAEATRLKRTARRRYTRRKNRICYLQEIFSNEMAKVDDSFFHRLEESFLVEEDKKHERHPIFGNIVDEVAYHEKYPTIYHLRKKLVDSTDKADLRLIYLALAHMIKFRGHFLIEGDLNPDNSDVDKLFIQLVQTYNQLFEENPINASGVDAKAILSARLSKSRRLENLIAQLPGEKKNGLFGNLIALSLGLTPNFKSNFDLAEDAKLQLSKDTYDDDLDNLLAQIGDQYADLFLAAKNLSDAILLSDILRVNTEITKAPLSASMIKRYDEHHQDLTLLKALVRQQLPEKYKEIFFDQSKNGYAGYIDGGASQEEFYKFIKPILEKMDGTEELLVKLNREDLLRKQRTFDNGSIPHQIHLGELHAILRRQEDFYPFLKDNREKIEKILTFRIPYYVGPLARGNSRFAWMTRKSEETITPWNFEEVVDKGASAQSFIERMTNFDKNLPNEKVLPKHSLLYEYFTVYNELTKVKYVTEGMRKPAFLSGEQKKAIVDLLFKTNRKVTVKQLKEDYFKKIECFDSVEISGVEDRFNASLGTYHDLLKIIKDKDFLDNEENEDILEDIVLTLTLFEDREMIEERLKTYAHLFDDKVMKQLKRRRYTGWGRLSRKLINGIRDKQSGKTILDFLKSDGFANRNFMQLIHDDSLTFKEDIQKAQVSGQGDSLHEHIANLAGSPAIKKGILQTVKVVDELVKVMGRHKPENIVIEMARENQTTQKGQKNSRERMKRIEEGIKELGSQILKEHPVENTQLQNEKLYLYYLQNGRDMYVDQELDINRLSDYDVDHIVPQSFLKDDSIDNKVLTRSDKARGKSDNVPSEEVVKKMKNYWRQLLNAKLITQRKFDNLTKAERGGLSELDKAGFIKRQLVETRQITKHVAQILDSRMNTKYDENDKLIREVKVITLKSKLVSDFRKDFQFYKVREINNYHHAHDAYLNAVVGTALIKKYPKLESEFVYGDYKVYDVRKMIAKSEQEIGKATAKYFFYSNIMNFFKTEITLANGEIRKRPLIETNGETGEIVWDKGRDFATVRKVLSMPQVNIVKKTEVQTGGFSKESILPKRNSDKLIARKKDWDPKKYGGFDSPTVAYSVLVVAKVEKGKSKKLKSVKELLGITIMERSSFEKNPIDFLEAKGYKEVKKDLIIKLPKYSLFELENGRKRMLASAGELQKGNELALPSKYVNFLYLASHYEKLKGSPEDNEQKQLFVEQHKHYLDEIIEQISEFSKRVILADANLDKVLSAYNKHRDKPIREQAENIIHLFTLTNLGAPAAFKYFDTTIDRKRYTSTKEVLDATLIHQSITGLYETRIDLSQLGGDGGPAPGGGGGTAPLEEEYRLFLEAPIQNVTLLEQWKREIPKVWAEINPPGLASTQAPIHVQLLSTALPVRVRQYPITLEAKRSLRETIRKFRAAGILRPVHSPWNTPLLPVRKSGTSEYRMVQDLREVNKRVETIHPTVPNPYTLLSLLPPDRIWYSVLDLKDAFFCIPLAPESQLIFAFEWADAEEGESGQLTWTRLPQGFKNSPTLFNEALNRDLQGFRLDHPSVSLLQYVDDLLIAADTQAACLSATRDLLMTLAELGYRVSGKKAQLCQEEVTYLGFKIHKGSRSLSNSRTQAILQIPVPKTKRQVREFLGKIGYCRLFIPGFAELAQPLYAATRPGNDPLVWGEKEEEAFQSLKLALTQPPALALPSLDKPFQLFVEETSGAAKGVLTQALGPWKRPVAYLSKRLDPVAAGWPRCLRAIAAAALLTREASKLTFGQDIEITSSHNLESLLRSPPDKWLTNARITQYQVLLLDPPRVRFKQTAALNPATLLPETDDTLPIHHCLDTLDSLTSTRPDLTDQPLAQAEATLFTDGSSYIRDGKRYAGAAVVTLDSVIWAEPLPIGTSAQKAELIALTKALEWSKDKSVNIYTDSRYAFATLHVHGMIYRERGWLTAGGKAIKNAPEILALLTAVWLPKRVAVMHCKGHQKDDAPTSTGNRRADEVAREVAIRPLSTQATISAGKRTADGSEFEKRTADGSEFESPKKKAKVE

SEQ ID NO: 1411 - protein, 2096 aa, synthetic construct
MPAAKRVKLDGGDKKYSIGLDIGTNSVGWAVITDEYKVPSKKFKVLGNTDRHSIKKNLIGALLFDSGETAEATRLKRTARRRYTRRKNRICYLQEIFSNEMAKVDDSFFHRLEESFLVEEDKKHERHPIFGNIVDEVAYHEKYPTIYHLRKKLVDSTDKADLRLIYLALAHMIKFRGHFLIEGDLNPDNSDVDKLFIQLVQTYNQLFEENPINASGVDAKAILSARLSKSRRLENLIAQLPGEKKNGLFGNLIALSLGLTPNFKSNFDLAEDAKLQLSKDTYDDDLDNLLAQIGDQYADLFLAAKNLSDAILLSDILRVNTEITKAPLSASMIKRYDEHHQDLTLLKALVRQQLPEKYKEIFFDQSKNGYAGYIDGGASQEEFYKFIKPILEKMDGTEELLVKLNREDLLRKQRTFDNGSIPHQIHLGELHAILRRQEDFYPFLKDNREKIEKILTFRIPYYVGPLARGNSRFAWMTRKSEETITPWNFEEVVDKGASAQSFIERMTNFDKNLPNEKVLPKHSLLYEYFTVYNELTKVKYVTEGMRKPAFLSGEQKKAIVDLLFKTNRKVTVKQLKEDYFKKIECFDSVEISGVEDRFNASLGTYHDLLKIIKDKDFLDNEENEDILEDIVLTLTLFEDREMIEERLKTYAHLFDDKVMKQLKRRRYTGWGRLSRKLINGIRDKQSGKTILDFLKSDGFANRNFMQLIHDDSLTFKEDIQKAQVSGQGDSLHEHIANLAGSPAIKKGILQTVKVVDELVKVMGRHKPENIVIEMARENQTTQKGQKNSRERMKRIEEGIKELGSQILKEHPVENTQLQNEKLYLYYLQNGRDMYVDQELDINRLSDYDVDHIVPQSFLKDDSIDNKVLTRSDKARGKSDNVPSEEVVKKMKNYWRQLLNAKLITQRKFDNLTKAERGGLSELDKAGFIKRQLVETRQITKHVAQILDSRMNTKYDENDKLIREVKVITLKSKLVSDFRKDFQFYKVREINNYHHAHDAYLNAVVGTALIKKYPKLESEFVYGDYKVYDVRKMIAKSEQEIGKATAKYFFYSNIMNFFKTEITLANGEIRKRPLIETNGETGEIVWDKGRDFATVRKVLSMPQVNIVKKTEVQTGGFSKESILPKRNSDKLIARKKDWDPKKYGGFDSPTVAYSVLVVAKVEKGKSKKLKSVKELLGITIMERSSFEKNPIDFLEAKGYKEVKKDLIIKLPKYSLFELENGRKRMLASAGELQKGNELALPSKYVNFLYLASHYEKLKGSPEDNEQKQLFVEQHKHYLDEIIEQISEFSKRVILADANLDKVLSAYNKHRDKPIREQAENIIHLFTLTNLGAPAAFKYFDTTIDRKRYTSTKEVLDATLIHQSITGLYETRIDLSQLGGDGGGGGPAPGSSGGTAPLEEEYRLFLEAPIQNVTLLEQWKREIPKVWAEINPPGLASTQAPIHVQLLSTALPVRVRQYPITLEAKRSLRETIRKFRAAGILRPVHSPWNTPLLPVRKSGTSEYRMVQDLREVNKRVETIHPTVPNPYTLLSLLPPDRIWYSVLDLKDAFFCIPLAPESQLIFAFEWADAEEGESGQLTWTRLPQGFKNSPTLFNEALNRDLQGFRLDHPSVSLLQYVDDLLIAADTQAACLSATRDLLMTLAELGYRVSGKKAQLCQEEVTYLGFKIHKGSRSLSNSRTQAILQIPVPKTKRQVREFLGKIGYCRLFIPGFAELAQPLYAATRPGNDPLVWGEKEEEAFQSLKLALTQPPALALPSLDKPFQLFVEETSGAAKGVLTQALGPWKRPVAYLSKRLDPVAAGWPRCLRAIAAAALLTREASKLTFGQDIEITSSHNLESLLRSPPDKWLTNARITQYQVLLLDPPRVRFKQTAALNPATLLPETDDTLPIHHCLDTLDSLTSTRPDLTDQPLAQAEATLFTDGSSYIRDGKRYAGAAVVTLDSVIWAEPLPIGTSAQKAELIALTKALEWSKDKSVNIYTDSRYAFATLHVHGMIYRERGWLTAGGKAIKNAPEILALLTAVWLPKRVAVMHCKGHQKDDAPTSTGNRRADEVAREVAIRPLSTQATISAGKRTADGSEFEKRTADGSEFESPKKKAKVE

SEQ ID NO: 1412 - protein, 2093 aa, synthetic construct
MPAAKRVKLDGGDKKYSIGLDIGTNSVGWAVITDEYKVPSKKFKVLGNTDRHSIKKNLIGALLFDSGETAEATRLKRTARRRYTRRKNRICYLQEIFSNEMAKVDDSFFHRLEESFLVEEDKKHERHPIFGNIVDEVAYHEKYPTIYHLRKKLVDSTDKADLRLIYLALAHMIKFRGHFLIEGDLNPDNSDVDKLFIQLVQTYNQLFEENPINASGVDAKAILSARLSKSRRLENLIAQLPGEKKNGLFGNLIALSLGLTPNFKSNFDLAEDAKLQLSKDTYDDDLDNLLAQIGDQYADLFLAAKNLSDAILLSDILRVNTEITKAPLSASMIKRYDEHHQDLTLLKALVRQQLPEKYKEIFFDQSKNGYAGYIDGGASQEEFYKFIKPILEKMDGTEELLVKLNREDLLRKQRTFDNGSIPHQIHLGELHAILRRQEDFYPFLKDNREKIEKILTFRIPYYVGPLARGNSRFAWMTRKSEETITPWNFEEVVDKGASAQSFIERMTNFDKNLPNEKVLPKHSLLYEYFTVYNELTKVKYVTEGMRKPAFLSGEQKKAIVDLLFKTNRKVTVKQLKEDYFKKIECFDSVEISGVEDRFNASLGTYHDLLKIIKDKDFLDNEENEDILEDIVLTLTLFEDREMIEERLKTYAHLFDDKVMKQLKRRRYTGWGRLSRKLINGIRDKQSGKTILDFLKSDGFANRNFMQLIHDDSLTFKEDIQKAQVSGQGDSLHEHIANLAGSPAIKKGILQTVKVVDELVKVMGRHKPENIVIEMARENQTTQKGQKNSRERMKRIEEGIKELGSQILKEHPVENTQLQNEKLYLYYLQNGRDMYVDQELDINRLSDYDVDHIVPQSFLKDDSIDNKVLTRSDKARGKSDNVPSEEVVKKMKNYWRQLLNAKLITQRKFDNLTKAERGGLSELDKAGFIKRQLVETRQITKHVAQILDSRMNTKYDENDKLIREVKVITLKSKLVSDFRKDFQFYKVREINNYHHAHDAYLNAVVGTALIKKYPKLESEFVYGDYKVYDVRKMIAKSEQEIGKATAKYFFYSNIMNFFKTEITLANGEIRKRPLIETNGETGEIVWDKGRDFATVRKVLSMPQVNIVKKTEVQTGGFSKESILPKRNSDKLIARKKDWDPKKYGGFDSPTVAYSVLVVAKVEKGKSKKLKSVKELLGITIMERSSFEKNPIDFLEAKGYKEVKKDLIIKLPKYSLFELENGRKRMLASAGELQKGNELALPSKYVNFLYLASHYEKLKGSPEDNEQKQLFVEQHKHYLDEIIEQISEFSKRVILADANLDKVLSAYNKHRDKPIREQAENIIHLFTLTNLGAPAAFKYFDTTIDRKRYTSTKEVLDATLIHQSITGLYETRIDLSQLGGDGGGGSGSSGGTAPLEEEYRLFLEAPIQNVTLLEQWKREIPKVWAEINPPGLASTQAPIHVQLLSTALPVRVRQYPITLEAKRSLRETIRKFRAAGILRPVHSPWNTPLLPVRKSGTSEYRMVQDLREVNKRVETIHPTVPNPYTLLSLLPPDRIWYSVLDLKDAFFCIPLAPESQLIFAFEWADAEEGESGQLTWTRLPQGFKNSPTLFNEALNRDLQGFRLDHPSVSLLQYVDDLLIAADTQAACLSATRDLLMTLAELGYRVSGKKAQLCQEEVTYLGFKIHKGSRSLSNSRTQAILQIPVPKTKRQVREFLGKIGYCRLFIPGFAELAQPLYAATRPGNDPLVWGEKEEEAFQSLKLALTQPPALALPSLDKPFQLFVEETSGAAKGVLTQALGPWKRPVAYLSKRLDPVAAGWPRCLRAIAAAALLTREASKLTFGQDIEITSSHNLESLLRSPPDKWLTNARITQYQVLLLDPPRVRFKQTAALNPATLLPETDDTLPIHHCLDTLDSLTSTRPDLTDQPLAQAEATLFTDGSSYIRDGKRYAGAAVVTLDSVIWAEPLPIGTSAQKAELIALTKALEWSKDKSVNIYTDSRYAFATLHVHGMIYRERGWLTAGGKAIKNAPEILALLTAVWLPKRVAVMHCKGHQKDDAPTSTGNRRADEVAREVAIRPLSTQATISAGKRTADGSEFEKRTADGSEFESPKKKAKVE

SEQ ID NO: 1413 - protein, 2096 aa, synthetic construct
MPAAKRVKLDGGDKKYSIGLDIGTNSVGWAVITDEYKVPSKKFKVLGNTDRHSIKKNLIGALLFDSGETAEATRLKRTARRRYTRRKNRICYLQEIFSNEMAKVDDSFFHRLEESFLVEEDKKHERHPIFGNIVDEVAYHEKYPTIYHLRKKLVDSTDKADLRLIYLALAHMIKFRGHFLIEGDLNPDNSDVDKLFIQLVQTYNQLFEENPINASGVDAKAILSARLSKSRRLENLIAQLPGEKKNGLFGNLIALSLGLTPNFKSNFDLAEDAKLQLSKDTYDDDLDNLLAQIGDQYADLFLAAKNLSDAILLSDILRVNTEITKAPLSASMIKRYDEHHQDLTLLKALVRQQLPEKYKEIFFDQSKNGYAGYIDGGASQEEFYKFIKPILEKMDGTEELLVKLNREDLLRKQRTFDNGSIPHQIHLGELHAILRRQEDFYPFLKDNREKIEKILTFRIPYYVGPLARGNSRFAWMTRKSEETITPWNFEEVVDKGASAQSFIERMTNFDKNLPNEKVLPKHSLLYEYFTVYNELTKVKYVTEGMRKPAFLSGEQKKAIVDLLFKTNRKVTVKQLKEDYFKKIECFDSVEISGVEDRFNASLGTYHDLLKIIKDKDFLDNEENEDILEDIVLTLTLFEDREMIEERLKTYAHLFDDKVMKQLKRRRYTGWGRLSRKLINGIRDKQSGKTILDFLKSDGFANRNFMQLIHDDSLTFKEDIQKAQVSGQGDSLHEHIANLAGSPAIKKGILQTVKVVDELVKVMGRHKPENIVIEMARENQTTQKGQKNSRERMKRIEEGIKELGSQILKEHPVENTQLQNEKLYLYYLQNGRDMYVDQELDINRLSDYDVDHIVPQSFLKDDSIDNKVLTRSDKARGKSDNVPSEEVVKKMKNYWRQLLNAKLITQRKFDNLTKAERGGLSELDKAGFIKRQLVETRQITKHVAQILDSRMNTKYDENDKLIREVKVITLKSKLVSDFRKDFQFYKVREINNYHHAHDAYLNAVVGTALIKKYPKLESEFVYGDYKVYDVRKMIAKSEQEIGKATAKYFFYSNIMNFFKTEITLANGEIRKRPLIETNGETGEIVWDKGRDFATVRKVLSMPQVNIVKKTEVQTGGFSKESILPKRNSDKLIARKKDWDPKKYGGFDSPTVAYSVLVVAKVEKGKSKKLKSVKELLGITIMERSSFEKNPIDFLEAKGYKEVKKDLIIKLPKYSLFELENGRKRMLASAGELQKGNELALPSKYVNFLYLASHYEKLKGSPEDNEQKQLFVEQHKHYLDEIIEQISEFSKRVILADANLDKVLSAYNKHRDKPIREQAENIIHLFTLTNLGAPAAFKYFDTTIDRKRYTSTKEVLDATLIHQSITGLYETRIDLSQLGGDGGGSSGGGGGSGGTAPLEEEYRLFLEAPIQNVTLLEQWKREIPKVWAEINPPGLASTQAPIHVQLLSTALPVRVRQYPITLEAKRSLRETIRKFRAAGILRPVHSPWNTPLLPVRKSGTSEYRMVQDLREVNKRVETIHPTVPNPYTLLSLLPPDRIWYSVLDLKDAFFCIPLAPESQLIFAFEWADAEEGESGQLTWTRLPQGFKNSPTLFNEALNRDLQGFRLDHPSVSLLQYVDDLLIAADTQAACLSATRDLLMTLAELGYRVSGKKAQLCQEEVTYLGFKIHKGSRSLSNSRTQAILQIPVPKTKRQVREFLGKIGYCRLFIPGFAELAQPLYAATRPGNDPLVWGEKEEEAFQSLKLALTQPPALALPSLDKPFQLFVEETSGAAKGVLTQALGPWKRPVAYLSKRLDPVAAGWPRCLRAIAAAALLTREASKLTFGQDIEITSSHNLESLLRSPPDKWLTNARITQYQVLLLDPPRVRFKQTAALNPATLLPETDDTLPIHHCLDTLDSLTSTRPDLTDQPLAQAEATLFTDGSSYIRDGKRYAGAAVVTLDSVIWAEPLPIGTSAQKAELIALTKALEWSKDKSVNIYTDSRYAFATLHVHGMIYRERGWLTAGGKAIKNAPEILALLTAVWLPKRVAVMHCKGHQKDDAPTSTGNRRADEVAREVAIRPLSTQATISAGKRTADGSEFEKRTADGSEFESPKKKAKVE

SEQ ID NO: 1414 - protein, 2090 aa, synthetic construct
MPAAKRVKLDGGDKKYSIGLDIGTNSVGWAVITDEYKVPSKKFKVLGNTDRHSIKKNLIGALLFDSGETAEATRLKRTARRRYTRRKNRICYLQEIFSNEMAKVDDSFFHRLEESFLVEEDKKHERHPIFGNIVDEVAYHEKYPTIYHLRKKLVDSTDKADLRLIYLALAHMIKFRGHFLIEGDLNPDNSDVDKLFIQLVQTYNQLFEENPINASGVDAKAILSARLSKSRRLENLIAQLPGEKKNGLFGNLIALSLGLTPNFKSNFDLAEDAKLQLSKDTYDDDLDNLLAQIGDQYADLFLAAKNLSDAILLSDILRVNTEITKAPLSASMIKRYDEHHQDLTLLKALVRQQLPEKYKEIFFDQSKNGYAGYIDGGASQEEFYKFIKPILEKMDGTEELLVKLNREDLLRKQRTFDNGSIPHQIHLGELHAILRRQEDFYPFLKDNREKIEKILTFRIPYYVGPLARGNSRFAWMTRKSEETITPWNFEEVVDKGASAQSFIERMTNFDKNLPNEKVLPKHSLLYEYFTVYNELTKVKYVTEGMRKPAFLSGEQKKAIVDLLFKTNRKVTVKQLKEDYFKKIECFDSVEISGVEDRFNASLGTYHDLLKIIKDKDFLDNEENEDILEDIVLTLTLFEDREMIEERLKTYAHLFDDKVMKQLKRRRYTGWGRLSRKLINGIRDKQSGKTILDFLKSDGFANRNFMQLIHDDSLTFKEDIQKAQVSGQGDSLHEHIANLAGSPAIKKGILQTVKVVDELVKVMGRHKPENIVIEMARENQTTQKGQKNSRERMKRIEEGIKELGSQILKEHPVENTQLQNEKLYLYYLQNGRDMYVDQELDINRLSDYDVDHIVPQSFLKDDSIDNKVLTRSDKARGKSDNVPSEEVVKKMKNYWRQLLNAKLITQRKFDNLTKAERGGLSELDKAGFIKRQLVETRQITKHVAQILDSRMNTKYDENDKLIREVKVITLKSKLVSDFRKDFQFYKVREINNYHHAHDAYLNAVVGTALIKKYPKLESEFVYGDYKVYDVRKMIAKSEQEIGKATAKYFFYSNIMNFFKTEITLANGEIRKRPLIETNGETGEIVWDKGRDFATVRKVLSMPQVNIVKKTEVQTGGFSKESILPKRNSDKLIARKKDWDPKKYGGFDSPTVAYSVLVVAKVEKGKSKKLKSVKELLGITIMERSSFEKNPIDFLEAKGYKEVKKDLIIKLPKYSLFELENGRKRMLASAGELQKGNELALPSKYVNFLYLASHYEKLKGSPEDNEQKQLFVEQHKHYLDEIIEQISEFSKRVILADANLDKVLSAYNKHRDKPIREQAENIIHLFTLTNLGAPAAFKYFDTTIDRKRYTSTKEVLDATLIHQSITGLYETRIDLSQLGGDGGPAPGGTAPLEEEYRLFLEAPIQNVTLLEQWKREIPKVWAEINPPGLASTQAPIHVQLLSTALPVRVRQYPITLEAKRSLRETIRKFRAAGILRPVHSPWNTPLLPVRKSGTSEYRMVQDLREVNKRVETIHPTVPNPYTLLSLLPPDRIWYSVLDLKDAFFCIPLAPESQLIFAFEWADAEEGESGQLTWTRLPQGFKNSPTLFNEALNRDLQGFRLDHPSVSLLQYVDDLLIAADTQAACLSATRDLLMTLAELGYRVSGKKAQLCQEEVTYLGFKIHKGSRSLSNSRTQAILQIPVPKTKRQVREFLGKIGYCRLFIPGFAELAQPLYAATRPGNDPLVWGEKEEEAFQSLKLALTQPPALALPSLDKPFQLFVEETSGAAKGVLTQALGPWKRPVAYLSKRLDPVAAGWPRCLRAIAAAALLTREASKLTFGQDIEITSSHNLESLLRSPPDKWLTNARITQYQVLLLDPPRVRFKQTAALNPATLLPETDDTLPIHHCLDTLDSLTSTRPDLTDQPLAQAEATLFTDGSSYIRDGKRYAGAAVVTLDSVIWAEPLPIGTSAQKAELIALTKALEWSKDKSVNIYTDSRYAFATLHVHGMIYRERGWLTAGGKAIKNAPEILALLTAVWLPKRVAVMHCKGHQKDDAPTSTGNRRADEVAREVAIRPLSTQATISAGKRTADGSEFEKRTADGSEFESPKKKAKVE

SEQ ID NO: 1415 - protein, 2098 aa, synthetic construct
MPAAKRVKLDGGDKKYSIGLDIGTNSVGWAVITDEYKVPSKKFKVLGNTDRHSIKKNLIGALLFDSGETAEATRLKRTARRRYTRRKNRICYLQEIFSNEMAKVDDSFFHRLEESFLVEEDKKHERHPIFGNIVDEVAYHEKYPTIYHLRKKLVDSTDKADLRLIYLALAHMIKFRGHFLIEGDLNPDNSDVDKLFIQLVQTYNQLFEENPINASGVDAKAILSARLSKSRRLENLIAQLPGEKKNGLFGNLIALSLGLTPNFKSNFDLAEDAKLQLSKDTYDDDLDNLLAQIGDQYADLFLAAKNLSDAILLSDILRVNTEITKAPLSASMIKRYDEHHQDLTLLKALVRQQLPEKYKEIFFDQSKNGYAGYIDGGASQEEFYKFIKPILEKMDGTEELLVKLNREDLLRKQRTFDNGSIPHQIHLGELHAILRRQEDFYPFLKDNREKIEKILTFRIPYYVGPLARGNSRFAWMTRKSEETITPWNFEEVVDKGASAQSFIERMTNFDKNLPNEKVLPKHSLLYEYFTVYNELTKVKYVTEGMRKPAFLSGEQKKAIVDLLFKTNRKVTVKQLKEDYFKKIECFDSVEISGVEDRFNASLGTYHDLLKIIKDKDFLDNEENEDILEDIVLTLTLFEDREMIEERLKTYAHLFDDKVMKQLKRRRYTGWGRLSRKLINGIRDKQSGKTILDFLKSDGFANRNFMQLIHDDSLTFKEDIQKAQVSGQGDSLHEHIANLAGSPAIKKGILQTVKVVDELVKVMGRHKPENIVIEMARENQTTQKGQKNSRERMKRIEEGIKELGSQILKEHPVENTQLQNEKLYLYYLQNGRDMYVDQELDINRLSDYDVDHIVPQSFLKDDSIDNKVLTRSDKARGKSDNVPSEEVVKKMKNYWRQLLNAKLITQRKFDNLTKAERGGLSELDKAGFIKRQLVETRQITKHVAQILDSRMNTKYDENDKLIREVKVITLKSKLVSDFRKDFQFYKVREINNYHHAHDAYLNAVVGTALIKKYPKLESEFVYGDYKVYDVRKMIAKSEQEIGKATAKYFFYSNIMNFFKTEITLANGEIRKRPLIETNGETGEIVWDKGRDFATVRKVLSMPQVNIVKKTEVQTGGFSKESILPKRNSDKLIARKKDWDPKKYGGFDSPTVAYSVLVVAKVEKGKSKKLKSVKELLGITIMERSSFEKNPIDFLEAKGYKEVKKDLIIKLPKYSLFELENGRKRMLASAGELQKGNELALPSKYVNFLYLASHYEKLKGSPEDNEQKQLFVEQHKHYLDEIIEQISEFSKRVILADANLDKVLSAYNKHRDKPIREQAENIIHLFTLTNLGAPAAFKYFDTTIDRKRYTSTKEVLDATLIHQSITGLYETRIDLSQLGGDGGGGGPAPEAAAKGGTAPLEEEYRLFLEAPIQNVTLLEQWKREIPKVWAEINPPGLASTQAPIHVQLLSTALPVRVRQYPITLEAKRSLRETIRKFRAAGILRPVHSPWNTPLLPVRKSGTSEYRMVQDLREVNKRVETIHPTVPNPYTLLSLLPPDRIWYSVLDLKDAFFCIPLAPESQLIFAFEWADAEEGESGQLTWTRLPQGFKNSPTLFNEALNRDLQGFRLDHPSVSLLQYVDDLLIAADTQAACLSATRDLLMTLAELGYRVSGKKAQLCQEEVTYLGFKIHKGSRSLSNSRTQAILQIPVPKTKRQVREFLGKIGYCRLFIPGFAELAQPLYAATRPGNDPLVWGEKEEEAFQSLKLALTQPPALALPSLDKPFQLFVEETSGAAKGVLTQALGPWKRPVAYLSKRLDPVAAGWPRCLRAIAAAALLTREASKLTFGQDIEITSSHNLESLLRSPPDKWLTNARITQYQVLLLDPPRVRFKQTAALNPATLLPETDDTLPIHHCLDTLDSLTSTRPDLTDQPLAQAEATLFTDGSSYIRDGKRYAGAAVVTLDSVIWAEPLPIGTSAQKAELIALTKALEWSKDKSVNIYTDSRYAFATLHVHGMIYRERGWLTAGGKAIKNAPEILALLTAVWLPKRVAVMHCKGHQKDDAPTSTGNRRADEVAREVAIRPLSTQATISAGKRTADGSEFEKRTADGSEFESPKKKAKVE

SEQ ID NO: 1416 - protein, 2098 aa, synthetic construct
MPAAKRVKLDGGDKKYSIGLDIGTNSVGWAVITDEYKVPSKKFKVLGNTDRHSIKKNLIGALLFDSGETAEATRLKRTARRRYTRRKNRICYLQEIFSNEMAKVDDSFFHRLEESFLVEEDKKHERHPIFGNIVDEVAYHEKYPTIYHLRKKLVDSTDKADLRLIYLALAHMIKFRGHFLIEGDLNPDNSDVDKLFIQLVQTYNQLFEENPINASGVDAKAILSARLSKSRRLENLIAQLPGEKKNGLFGNLIALSLGLTPNFKSNFDLAEDAKLQLSKDTYDDDLDNLLAQIGDQYADLFLAAKNLSDAILLSDILRVNTEITKAPLSASMIKRYDEHHQDLTLLKALVRQQLPEKYKEIFFDQSKNGYAGYIDGGASQEEFYKFIKPILEKMDGTEELLVKLNREDLLRKQRTFDNGSIPHQIHLGELHAILRRQEDFYPFLKDNREKIEKILTFRIPYYVGPLARGNSRFAWMTRKSEETITPWNFEEVVDKGASAQSFIERMTNFDKNLPNEKVLPKHSLLYEYFTVYNELTKVKYVTEGMRKPAFLSGEQKKAIVDLLFKTNRKVTVKQLKEDYFKKIECFDSVEISGVEDRFNASLGTYHDLLKIIKDKDFLDNEENEDILEDIVLTLTLFEDREMIEERLKTYAHLFDDKVMKQLKRRRYTGWGRLSRKLINGIRDKQSGKTILDFLKSDGFANRNFMQLIHDDSLTFKEDIQKAQVSGQGDSLHEHIANLAGSPAIKKGILQTVKVVDELVKVMGRHKPENIVIEMARENQTTQKGQKNSRERMKRIEEGIKELGSQILKEHPVENTQLQNEKLYLYYLQNGRDMYVDQELDINRLSDYDVDHIVPQSFLKDDSIDNKVLTRSDKARGKSDNVPSEEVVKKMKNYWRQLLNAKLITQRKFDNLTKAERGGLSELDKAGFIKRQLVETRQITKHVAQILDSRMNTKYDENDKLIREVKVITLKSKLVSDFRKDFQFYKVREINNYHHAHDAYLNAVVGTALIKKYPKLESEFVYGDYKVYDVRKMIAKSEQEIGKATAKYFFYSNIMNFFKTEITLANGEIRKRPLIETNGETGEIVWDKGRDFATVRKVLSMPQVNIVKKTEVQTGGFSKESILPKRNSDKLIARKKDWDPKKYGGFDSPTVAYSVLVVAKVEKGKSKKLKSVKELLGITIMERSSFEKNPIDFLEAKGYKEVKKDLIIKLPKYSLFELENGRKRMLASAGELQKGNELALPSKYVNFLYLASHYEKLKGSPEDNEQKQLFVEQHKHYLDEIIEQISEFSKRVILADANLDKVLSAYNKHRDKPIREQAENIIHLFTLTNLGAPAAFKYFDTTIDRKRYTSTKEVLDATLIHQSITGLYETRIDLSQLGGDGGEAAAKGSSPAPGGTAPLEEEYRLFLEAPIQNVTLLEQWKREIPKVWAEINPPGLASTQAPIHVQLLSTALPVRVRQYPITLEAKRSLRETIRKFRAAGILRPVHSPWNTPLLPVRKSGTSEYRMVQDLREVNKRVETIHPTVPNPYTLLSLLPPDRIWYSVLDLKDAFFCIPLAPESQLIFAFEWADAEEGESGQLTWTRLPQGFKNSPTLFNEALNRDLQGFRLDHPSVSLLQYVDDLLIAADTQAACLSATRDLLMTLAELGYRVSGKKAQLCQEEVTYLGFKIHKGSRSLSNSRTQAILQIPVPKTKRQVREFLGKIGYCRLFIPGFAELAQPLYAATRPGNDPLVWGEKEEEAFQSLKLALTQPPALALPSLDKPFQLFVEETSGAAKGVLTQALGPWKRPVAYLSKRLDPVAAGWPRCLRAIAAAALLTREASKLTFGQDIEITSSHNLESLLRSPPDKWLTNARITQYQVLLLDPPRVRFKQTAALNPATLLPETDDTLPIHHCLDTLDSLTSTRPDLTDQPLAQAEATLFTDGSSYIRDGKRYAGAAVVTLDSVIWAEPLPIGTSAQKAELIALTKALEWSKDKSVNIYTDSRYAFATLHVHGMIYRERGWLTAGGKAIKNAPEILALLTAVWLPKRVAVMHCKGHQKDDAPTSTGNRRADEVAREVAIRPLSTQATISAGKRTADGSEFEKRTADGSEFESPKKKAKVE

SEQ ID NO: 1417 - protein, 2090 aa, synthetic construct
MPAAKRVKLDGGDKKYSIGLDIGTNSVGWAVITDEYKVPSKKFKVLGNTDRHSIKKNLIGALLFDSGETAEATRLKRTARRRYTRRKNRICYLQEIFSNEMAKVDDSFFHRLEESFLVEEDKKHERHPIFGNIVDEVAYHEKYPTIYHLRKKLVDSTDKADLRLIYLALAHMIKFRGHFLIEGDLNPDNSDVDKLFIQLVQTYNQLFEENPINASGVDAKAILSARLSKSRRLENLIAQLPGEKKNGLFGNLIALSLGLTPNFKSNFDLAEDAKLQLSKDTYDDDLDNLLAQIGDQYADLFLAAKNLSDAILLSDILRVNTEITKAPLSASMIKRYDEHHQDLTLLKALVRQQLPEKYKEIFFDQSKNGYAGYIDGGASQEEFYKFIKPILEKMDGTEELLVKLNREDLLRKQRTFDNGSIPHQIHLGELHAILRRQEDFYPFLKDNREKIEKILTFRIPYYVGPLARGNSRFAWMTRKSEETITPWNFEEVVDKGASAQSFIERMTNFDKNLPNEKVLPKHSLLYEYFTVYNELTKVKYVTEGMRKPAFLSGEQKKAIVDLLFKTNRKVTVKQLKEDYFKKIECFDSVEISGVEDRFNASLGTYHDLLKIIKDKDFLDNEENEDILEDIVLTLTLFEDREMIEERLKTYAHLFDDKVMKQLKRRRYTGWGRLSRKLINGIRDKQSGKTILDFLKSDGFANRNFMQLIHDDSLTFKEDIQKAQVSGQGDSLHEHIANLAGSPAIKKGILQTVKVVDELVKVMGRHKPENIVIEMARENQTTQKGQKNSRERMKRIEEGIKELGSQILKEHPVENTQLQNEKLYLYYLQNGRDMYVDQELDINRLSDYDVDHIVPQSFLKDDSIDNKVLTRSDKARGKSDNVPSEEVVKKMKNYWRQLLNAKLITQRKFDNLTKAERGGLSELDKAGFIKRQLVETRQITKHVAQILDSRMNTKYDENDKLIREVKVITLKSKLVSDFRKDFQFYKVREINNYHHAHDAYLNAVVGTALIKKYPKLESEFVYGDYKVYDVRKMIAKSEQEIGKATAKYFFYSNIMNFFKTEITLANGEIRKRPLIETNGETGEIVWDKGRDFATVRKVLSMPQVNIVKKTEVQTGGFSKESILPKRNSDKLIARKKDWDPKKYGGFDSPTVAYSVLVVAKVEKGKSKKLKSVKELLGITIMERSSFEKNPIDFLEAKGYKEVKKDLIIKLPKYSLFELENGRKRMLASAGELQKGNELALPSKYVNFLYLASHYEKLKGSPEDNEQKQLFVEQHKHYLDEIIEQISEFSKRVILADANLDKVLSAYNKHRDKPIREQAENIIHLFTLTNLGAPAAFKYFDTTIDRKRYTSTKEVLDATLIHQSITGLYETRIDLSQLGGDGGGSSGGTAPLEEEYRLFLEAPIQNVTLLEQWKREIPKVWAEINPPGLASTQAPIHVQLLSTALPVRVRQYPITLEAKRSLRETIRKFRAAGILRPVHSPWNTPLLPVRKSGTSEYRMVQDLREVNKRVETIHPTVPNPYTLLSLLPPDRIWYSVLDLKDAFFCIPLAPESQLIFAFEWADAEEGESGQLTWTRLPQGFKNSPTLFNEALNRDLQGFRLDHPSVSLLQYVDDLLIAADTQAACLSATRDLLMTLAELGYRVSGKKAQLCQEEVTYLGFKIHKGSRSLSNSRTQAILQIPVPKTKRQVREFLGKIGYCRLFIPGFAELAQPLYAATRPGNDPLVWGEKEEEAFQSLKLALTQPPALALPSLDKPFQLFVEETSGAAKGVLTQALGPWKRPVAYLSKRLDPVAAGWPRCLRAIAAAALLTREASKLTFGQDIEITSSHNLESLLRSPPDKWLTNARITQYQVLLLDPPRVRFKQTAALNPATLLPETDDTLPIHHCLDTLDSLTSTRPDLTDQPLAQAEATLFTDGSSYIRDGKRYAGAAVVTLDSVIWAEPLPIGTSAQKAELIALTKALEWSKDKSVNIYTDSRYAFATLHVHGMIYRERGWLTAGGKAIKNAPEILALLTAVWLPKRVAVMHCKGHQKDDAPTSTGNRRADEVAREVAIRPLSTQATISAGKRTADGSEFEKRTADGSEFESPKKKAKVE

SEQ ID NO: 1418 - protein, 2096 aa, synthetic construct
MPAAKRVKLDGGDKKYSIGLDIGTNSVGWAVITDEYKVPSKKFKVLGNTDRHSIKKNLIGALLFDSGETAEATRLKRTARRRYTRRKNRICYLQEIFSNEMAKVDDSFFHRLEESFLVEEDKKHERHPIFGNIVDEVAYHEKYPTIYHLRKKLVDSTDKADLRLIYLALAHMIKFRGHFLIEGDLNPDNSDVDKLFIQLVQTYNQLFEENPINASGVDAKAILSARLSKSRRLENLIAQLPGEKKNGLFGNLIALSLGLTPNFKSNFDLAEDAKLQLSKDTYDDDLDNLLAQIGDQYADLFLAAKNLSDAILLSDILRVNTEITKAPLSASMIKRYDEHHQDLTLLKALVRQQLPEKYKEIFFDQSKNGYAGYIDGGASQEEFYKFIKPILEKMDGTEELLVKLNREDLLRKQRTFDNGSIPHQIHLGELHAILRRQEDFYPFLKDNREKIEKILTFRIPYYVGPLARGNSRFAWMTRKSEETITPWNFEEVVDKGASAQSFIERMTNFDKNLPNEKVLPKHSLLYEYFTVYNELTKVKYVTEGMRKPAFLSGEQKKAIVDLLFKTNRKVTVKQLKEDYFKKIECFDSVEISGVEDRFNASLGTYHDLLKIIKDKDFLDNEENEDILEDIVLTLTLFEDREMIEERLKTYAHLFDDKVMKQLKRRRYTGWGRLSRKLINGIRDKQSGKTILDFLKSDGFANRNFMQLIHDDSLTFKEDIQKAQVSGQGDSLHEHIANLAGSPAIKKGILQTVKVVDELVKVMGRHKPENIVIEMARENQTTQKGQKNSRERMKRIEEGIKELGSQILKEHPVENTQLQNEKLYLYYLQNGRDMYVDQELDINRLSDYDVDHIVPQSFLKDDSIDNKVLTRSDKARGKSDNVPSEEVVKKMKNYWRQLLNAKLITQRKFDNLTKAERGGLSELDKAGFIKRQLVETRQITKHVAQILDSRMNTKYDENDKLIREVKVITLKSKLVSDFRKDFQFYKVREINNYHHAHDAYLNAVVGTALIKKYPKLESEFVYGDYKVYDVRKMIAKSEQEIGKATAKYFFYSNIMNFFKTEITLANGEIRKRPLIETNGETGEIVWDKGRDFATVRKVLSMPQVNIVKKTEVQTGGFSKESILPKRNSDKLIARKKDWDPKKYGGFDSPTVAYSVLVVAKVEKGKSKKLKSVKELLGITIMERSSFEKNPIDFLEAKGYKEVKKDLIIKLPKYSLFELENGRKRMLASAGELQKGNELALPSKYVNFLYLASHYEKLKGSPEDNEQKQLFVEQHKHYLDEIIEQISEFSKRVILADANLDKVLSAYNKHRDKPIREQAENIIHLFTLTNLGAPAAFKYFDTTIDRKRYTSTKEVLDATLIHQSITGLYETRIDLSQLGGDGGGGSGSSGGGGGTAPLEEEYRLFLEAPIQNVTLLEQWKREIPKVWAEINPPGLASTQAPIHVQLLSTALPVRVRQYPITLEAKRSLRETIRKFRAAGILRPVHSPWNTPLLPVRKSGTSEYRMVQDLREVNKRVETIHPTVPNPYTLLSLLPPDRIWYSVLDLKDAFFCIPLAPESQLIFAFEWADAEEGESGQLTWTRLPQGFKNSPTLFNEALNRDLQGFRLDHPSVSLLQYVDDLLIAADTQAACLSATRDLLMTLAELGYRVSGKKAQLCQEEVTYLGFKIHKGSRSLSNSRTQAILQIPVPKTKRQVREFLGKIGYCRLFIPGFAELAQPLYAATRPGNDPLVWGEKEEEAFQSLKLALTQPPALALPSLDKPFQLFVEETSGAAKGVLTQALGPWKRPVAYLSKRLDPVAAGWPRCLRAIAAAALLTREASKLTFGQDIEITSSHNLESLLRSPPDKWLTNARITQYQVLLLDPPRVRFKQTAALNPATLLPETDDTLPIHHCLDTLDSLTSTRPDLTDQPLAQAEATLFTDGSSYIRDGKRYAGAAVVTLDSVIWAEPLPIGTSAQKAELIALTKALEWSKDKSVNIYTDSRYAFATLHVHGMIYRERGWLTAGGKAIKNAPEILALLTAVWLPKRVAVMHCKGHQKDDAPTSTGNRRADEVAREVAIRPLSTQATISAGKRTADGSEFEKRTADGSEFESPKKKAKVE

SEQ ID NO: 1419 - protein, 2098 aa, synthetic construct
MPAAKRVKLDGGDKKYSIGLDIGTNSVGWAVITDEYKVPSKKFKVLGNTDRHSIKKNLIGALLFDSGETAEATRLKRTARRRYTRRKNRICYLQEIFSNEMAKVDDSFFHRLEESFLVEEDKKHERHPIFGNIVDEVAYHEKYPTIYHLRKKLVDSTDKADLRLIYLALAHMIKFRGHFLIEGDLNPDNSDVDKLFIQLVQTYNQLFEENPINASGVDAKAILSARLSKSRRLENLIAQLPGEKKNGLFGNLIALSLGLTPNFKSNFDLAEDAKLQLSKDTYDDDLDNLLAQIGDQYADLFLAAKNLSDAILLSDILRVNTEITKAPLSASMIKRYDEHHQDLTLLKALVRQQLPEKYKEIFFDQSKNGYAGYIDGGASQEEFYKFIKPILEKMDGTEELLVKLNREDLLRKQRTFDNGSIPHQIHLGELHAILRRQEDFYPFLKDNREKIEKILTFRIPYYVGPLARGNSRFAWMTRKSEETITPWNFEEVVDKGASAQSFIERMTNFDKNLPNEKVLPKHSLLYEYFTVYNELTKVKYVTEGMRKPAFLSGEQKKAIVDLLFKTNRKVTVKQLKEDYFKKIECFDSVEISGVEDRFNASLGTYHDLLKIIKDKDFLDNEENEDILEDIVLTLTLFEDREMIEERLKTYAHLFDDKVMKQLKRRRYTGWGRLSRKLINGIRDKQSGKTILDFLKSDGFANRNFMQLIHDDSLTFKEDIQKAQVSGQGDSLHEHIANLAGSPAIKKGILQTVKVVDELVKVMGRHKPENIVIEMARENQTTQKGQKNSRERMKRIEEGIKELGSQILKEHPVENTQLQNEKLYLYYLQNGRDMYVDQELDINRLSDYDVDHIVPQSFLKDDSIDNKVLTRSDKARGKSDNVPSEEVVKKMKNYWRQLLNAKLITQRKFDNLTKAERGGLSELDKAGFIKRQLVETRQITKHVAQILDSRMNTKYDENDKLIREVKVITLKSKLVSDFRKDFQFYKVREINNYHHAHDAYLNAVVGTALIKKYPKLESEFVYGDYKVYDVRKMIAKSEQEIGKATAKYFFYSNIMNFFKTEITLANGEIRKRPLIETNGETGEIVWDKGRDFATVRKVLSMPQVNIVKKTEVQTGGFSKESILPKRNSDKLIARKKDWDPKKYGGFDSPTVAYSVLVVAKVEKGKSKKLKSVKELLGITIMERSSFEKNPIDFLEAKGYKEVKKDLIIKLPKYSLFELENGRKRMLASAGELQKGNELALPSKYVNFLYLASHYEKLKGSPEDNEQKQLFVEQHKHYLDEIIEQISEFSKRVILADANLDKVLSAYNKHRDKPIREQAENIIHLFTLTNLGAPAAFKYFDTTIDRKRYTSTKEVLDATLIHQSITGLYETRIDLSQLGGDGGEAAAKGSSGGGGGTAPLEEEYRLFLEAPIQNVTLLEQWKREIPKVWAEINPPGLASTQAPIHVQLLSTALPVRVRQYPITLEAKRSLRETIRKFRAAGILRPVHSPWNTPLLPVRKSGTSEYRMVQDLREVNKRVETIHPTVPNPYTLLSLLPPDRIWYSVLDLKDAFFCIPLAPESQLIFAFEWADAEEGESGQLTWTRLPQGFKNSPTLFNEALNRDLQGFRLDHPSVSLLQYVDDLLIAADTQAACLSATRDLLMTLAELGYRVSGKKAQLCQEEVTYLGFKIHKGSRSLSNSRTQAILQIPVPKTKRQVREFLGKIGYCRLFIPGFAELAQPLYAATRPGNDPLVWGEKEEEAFQSLKLALTQPPALALPSLDKPFQLFVEETSGAAKGVLTQALGPWKRPVAYLSKRLDPVAAGWPRCLRAIAAAALLTREASKLTFGQDIEITSSHNLESLLRSPPDKWLTNARITQYQVLLLDPPRVRFKQTAALNPATLLPETDDTLPIHHCLDTLDSLTSTRPDLTDQPLAQAEATLFTDGSSYIRDGKRYAGAAVVTLDSVIWAEPLPIGTSAQKAELIALTKALEWSKDKSVNIYTDSRYAFATLHVHGMIYRERGWLTAGGKAIKNAPEILALLTAVWLPKRVAVMHCKGHQKDDAPTSTGNRRADEVAREVAIRPLSTQATISAGKRTADGSEFEKRTADGSEFESPKKKAKVE

SEQ ID NO: 1420 - protein, 2096 aa, synthetic construct
MPAAKRVKLDGGDKKYSIGLDIGTNSVGWAVITDEYKVPSKKFKVLGNTDRHSIKKNLIGALLFDSGETAEATRLKRTARRRYTRRKNRICYLQEIFSNEMAKVDDSFFHRLEESFLVEEDKKHERHPIFGNIVDEVAYHEKYPTIYHLRKKLVDSTDKADLRLIYLALAHMIKFRGHFLIEGDLNPDNSDVDKLFIQLVQTYNQLFEENPINASGVDAKAILSARLSKSRRLENLIAQLPGEKKNGLFGNLIALSLGLTPNFKSNFDLAEDAKLQLSKDTYDDDLDNLLAQIGDQYADLFLAAKNLSDAILLSDILRVNTEITKAPLSASMIKRYDEHHQDLTLLKALVRQQLPEKYKEIFFDQSKNGYAGYIDGGASQEEFYKFIKPILEKMDGTEELLVKLNREDLLRKQRTFDNGSIPHQIHLGELHAILRRQEDFYPFLKDNREKIEKILTFRIPYYVGPLARGNSRFAWMTRKSEETITPWNFEEVVDKGASAQSFIERMTNFDKNLPNEKVLPKHSLLYEYFTVYNELTKVKYVTEGMRKPAFLSGEQKKAIVDLLFKTNRKVTVKQLKEDYFKKIECFDSVEISGVEDRFNASLGTYHDLLKIIKDKDFLDNEENEDILEDIVLTLTLFEDREMIEERLKTYAHLFDDKVMKQLKRRRYTGWGRLSRKLINGIRDKQSGKTILDFLKSDGFANRNFMQLIHDDSLTFKEDIQKAQVSGQGDSLHEHIANLAGSPAIKKGILQTVKVVDELVKVMGRHKPENIVIEMARENQTTQKGQKNSRERMKRIEEGIKELGSQILKEHPVENTQLQNEKLYLYYLQNGRDMYVDQELDINRLSDYDVDHIVPQSFLKDDSIDNKVLTRSDKARGKSDNVPSEEVVKKMKNYWRQLLNAKLITQRKFDNLTKAERGGLSELDKAGFIKRQLVETRQITKHVAQILDSRMNTKYDENDKLIREVKVITLKSKLVSDFRKDFQFYKVREINNYHHAHDAYLNAVVGTALIKKYPKLESEFVYGDYKVYDVRKMIAKSEQEIGKATAKYFFYSNIMNFFKTEITLANGEIRKRPLIETNGETGEIVWDKGRDFATVRKVLSMPQVNIVKKTEVQTGGFSKESILPKRNSDKLIARKKDWDPKKYGGFDSPTVAYSVLVVAKVEKGKSKKLKSVKELLGITIMERSSFEKNPIDFLEAKGYKEVKKDLIIKLPKYSLFELENGRKRMLASAGELQKGNELALPSKYVNFLYLASHYEKLKGSPEDNEQKQLFVEQHKHYLDEIIEQISEFSKRVILADANLDKVLSAYNKHRDKPIREQAENIIHLFTLTNLGAPAAFKYFDTTIDRKRYTSTKEVLDATLIHQSITGLYETRIDLSQLGGDGGGGGGSSGGSGGTAPLEEEYRLFLEAPIQNVTLLEQWKREIPKVWAEINPPGLASTQAPIHVQLLSTALPVRVRQYPITLEAKRSLRETIRKFRAAGILRPVHSPWNTPLLPVRKSGTSEYRMVQDLREVNKRVETIHPTVPNPYTLLSLLPPDRIWYSVLDLKDAFFCIPLAPESQLIFAFEWADAEEGESGQLTWTRLPQGFKNSPTLFNEALNRDLQGFRLDHPSVSLLQYVDDLLIAADTQAACLSATRDLLMTLAELGYRVSGKKAQLCQEEVTYLGFKIHKGSRSLSNSRTQAILQIPVPKTKRQVREFLGKIGYCRLFIPGFAELAQPLYAATRPGNDPLVWGEKEEEAFQSLKLALTQPPALALPSLDKPFQLFVEETSGAAKGVLTQALGPWKRPVAYLSKRLDPVAAGWPRCLRAIAAAALLTREASKLTFGQDIEITSSHNLESLLRSPPDKWLTNARITQYQVLLLDPPRVRFKQTAALNPATLLPETDDTLPIHHCLDTLDSLTSTRPDLTDQPLAQAEATLFTDGSSYIRDGKRYAGAAVVTLDSVIWAEPLPIGTSAQKAELIALTKALEWSKDKSVNIYTDSRYAFATLHVHGMIYRERGWLTAGGKAIKNAPEILALLTAVWLPKRVAVMHCKGHQKDDAPTSTGNRRADEVAREVAIRPLSTQATISAGKRTADGSEFEKRTADGSEFESPKKKAKVE

SEQ ID NO: 1421 - protein, 2100 aa, synthetic construct
MPAAKRVKLDGGDKKYSIGLDIGTNSVGWAVITDEYKVPSKKFKVLGNTDRHSIKKNLIGALLFDSGETAEATRLKRTARRRYTRRKNRICYLQEIFSNEMAKVDDSFFHRLEESFLVEEDKKHERHPIFGNIVDEVAYHEKYPTIYHLRKKLVDSTDKADLRLIYLALAHMIKFRGHFLIEGDLNPDNSDVDKLFIQLVQTYNQLFEENPINASGVDAKAILSARLSKSRRLENLIAQLPGEKKNGLFGNLIALSLGLTPNFKSNFDLAEDAKLQLSKDTYDDDLDNLLAQIGDQYADLFLAAKNLSDAILLSDILRVNTEITKAPLSASMIKRYDEHHQDLTLLKALVRQQLPEKYKEIFFDQSKNGYAGYIDGGASQEEFYKFIKPILEKMDGTEELLVKLNREDLLRKQRTFDNGSIPHQIHLGELHAILRRQEDFYPFLKDNREKIEKILTFRIPYYVGPLARGNSRFAWMTRKSEETITPWNFEEVVDKGASAQSFIERMTNFDKNLPNEKVLPKHSLLYEYFTVYNELTKVKYVTEGMRKPAFLSGEQKKAIVDLLFKTNRKVTVKQLKEDYFKKIECFDSVEISGVEDRFNASLGTYHDLLKIIKDKDFLDNEENEDILEDIVLTLTLFEDREMIEERLKTYAHLFDDKVMKQLKRRRYTGWGRLSRKLINGIRDKQSGKTILDFLKSDGFANRNFMQLIHDDSLTFKEDIQKAQVSGQGDSLHEHIANLAGSPAIKKGILQTVKVVDELVKVMGRHKPENIVIEMARENQTTQKGQKNSRERMKRIEEGIKELGSQILKEHPVENTQLQNEKLYLYYLQNGRDMYVDQELDINRLSDYDVDHIVPQSFLKDDSIDNKVLTRSDKARGKSDNVPSEEVVKKMKNYWRQLLNAKLITQRKFDNLTKAERGGLSELDKAGFIKRQLVETRQITKHVAQILDSRMNTKYDENDKLIREVKVITLKSKLVSDFRKDFQFYKVREINNYHHAHDAYLNAVVGTALIKKYPKLESEFVYGDYKVYDVRKMIAKSEQEIGKATAKYFFYSNIMNFFKTEITLANGEIRKRPLIETNGETGEIVWDKGRDFATVRKVLSMPQVNIVKKTEVQTGGFSKESILPKRNSDKLIARKKDWDPKKYGGFDSPTVAYSVLVVAKVEKGKSKKLKSVKELLGITIMERSSFEKNPIDFLEAKGYKEVKKDLIIKLPKYSLFELENGRKRMLASAGELQKGNELALPSKYVNFLYLASHYEKLKGSPEDNEQKQLFVEQHKHYLDEIIEQISEFSKRVILADANLDKVLSAYNKHRDKPIREQAENIIHLFTLTNLGAPAAFKYFDTTIDRKRYTSTKEVLDATLIHQSITGLYETRIDLSQLGGDGGPAPAPAPAPAPAPGGTAPLEEEYRLFLEAPIQNVTLLEQWKREIPKVWAEINPPGLASTQAPIHVQLLSTALPVRVRQYPITLEAKRSLRETIRKFRAAGILRPVHSPWNTPLLPVRKSGTSEYRMVQDLREVNKRVETIHPTVPNPYTLLSLLPPDRIWYSVLDLKDAFFCIPLAPESQLIFAFEWADAEEGESGQLTWTRLPQGFKNSPTLFNEALNRDLQGFRLDHPSVSLLQYVDDLLIAADTQAACLSATRDLLMTLAELGYRVSGKKAQLCQEEVTYLGFKIHKGSRSLSNSRTQAILQIPVPKTKRQVREFLGKIGYCRLFIPGFAELAQPLYAATRPGNDPLVWGEKEEEAFQSLKLALTQPPALALPSLDKPFQLFVEETSGAAKGVLTQALGPWKRPVAYLSKRLDPVAAGWPRCLRAIAAAALLTREASKLTFGQDIEITSSHNLESLLRSPPDKWLTNARITQYQVLLLDPPRVRFKQTAALNPATLLPETDDTLPIHHCLDTLDSLTSTRPDLTDQPLAQAEATLFTDGSSYIRDGKRYAGAAVVTLDSVIWAEPLPIGTSAQKAELIALTKALEWSKDKSVNIYTDSRYAFATLHVHGMIYRERGWLTAGGKAIKNAPEILALLTAVWLPKRVAVMHCKGHQKDDAPTSTGNRRADEVAREVAIRPLSTQATISAGKRTADGSEFEKRTADGSEFESPKKKAKVE

SEQ ID NO: 1422 - protein, 2095 aa, synthetic construct
MPAAKRVKLDGGDKKYSIGLDIGTNSVGWAVITDEYKVPSKKFKVLGNTDRHSIKKNLIGALLFDSGETAEATRLKRTARRRYTRRKNRICYLQEIFSNEMAKVDDSFFHRLEESFLVEEDKKHERHPIFGNIVDEVAYHEKYPTIYHLRKKLVDSTDKADLRLIYLALAHMIKFRGHFLIEGDLNPDNSDVDKLFIQLVQTYNQLFEENPINASGVDAKAILSARLSKSRRLENLIAQLPGEKKNGLFGNLIALSLGLTPNFKSNFDLAEDAKLQLSKDTYDDDLDNLLAQIGDQYADLFLAAKNLSDAILLSDILRVNTEITKAPLSASMIKRYDEHHQDLTLLKALVRQQLPEKYKEIFFDQSKNGYAGYIDGGASQEEFYKFIKPILEKMDGTEELLVKLNREDLLRKQRTFDNGSIPHQIHLGELHAILRRQEDFYPFLKDNREKIEKILTFRIPYYVGPLARGNSRFAWMTRKSEETITPWNFEEVVDKGASAQSFIERMTNFDKNLPNEKVLPKHSLLYEYFTVYNELTKVKYVTEGMRKPAFLSGEQKKAIVDLLFKTNRKVTVKQLKEDYFKKIECFDSVEISGVEDRFNASLGTYHDLLKIIKDKDFLDNEENEDILEDIVLTLTLFEDREMIEERLKTYAHLFDDKVMKQLKRRRYTGWGRLSRKLINGIRDKQSGKTILDFLKSDGFANRNFMQLIHDDSLTFKEDIQKAQVSGQGDSLHEHIANLAGSPAIKKGILQTVKVVDELVKVMGRHKPENIVIEMARENQTTQKGQKNSRERMKRIEEGIKELGSQILKEHPVENTQLQNEKLYLYYLQNGRDMYVDQELDINRLSDYDVDHIVPQSFLKDDSIDNKVLTRSDKARGKSDNVPSEEVVKKMKNYWRQLLNAKLITQRKFDNLTKAERGGLSELDKAGFIKRQLVETRQITKHVAQILDSRMNTKYDENDKLIREVKVITLKSKLVSDFRKDFQFYKVREINNYHHAHDAYLNAVVGTALIKKYPKLESEFVYGDYKVYDVRKMIAKSEQEIGKATAKYFFYSNIMNFFKTEITLANGEIRKRPLIETNGETGEIVWDKGRDFATVRKVLSMPQVNIVKKTEVQTGGFSKESILPKRNSDKLIARKKDWDPKKYGGFDSPTVAYSVLVVAKVEKGKSKKLKSVKELLGITIMERSSFEKNPIDFLEAKGYKEVKKDLIIKLPKYSLFELENGRKRMLASAGELQKGNELALPSKYVNFLYLASHYEKLKGSPEDNEQKQLFVEQHKHYLDEIIEQISEFSKRVILADANLDKVLSAYNKHRDKPIREQAENIIHLFTLTNLGAPAAFKYFDTTIDRKRYTSTKEVLDATLIHQSITGLYETRIDLSQLGGDGGEAAAKGGGGGTAPLEEEYRLFLEAPIQNVTLLEQWKREIPKVWAEINPPGLASTQAPIHVQLLSTALPVRVRQYPITLEAKRSLRETIRKFRAAGILRPVHSPWNTPLLPVRKSGTSEYRMVQDLREVNKRVETIHPTVPNPYTLLSLLPPDRIWYSVLDLKDAFFCIPLAPESQLIFAFEWADAEEGESGQLTWTRLPQGFKNSPTLFNEALNRDLQGFRLDHPSVSLLQYVDDLLIAADTQAACLSATRDLLMTLAELGYRVSGKKAQLCQEEVTYLGFKIHKGSRSLSNSRTQAILQIPVPKTKRQVREFLGKIGYCRLFIPGFAELAQPLYAATRPGNDPLVWGEKEEEAFQSLKLALTQPPALALPSLDKPFQLFVEETSGAAKGVLTQALGPWKRPVAYLSKRLDPVAAGWPRCLRAIAAAALLTREASKLTFGQDIEITSSHNLESLLRSPPDKWLTNARITQYQVLLLDPPRVRFKQTAALNPATLLPETDDTLPIHHCLDTLDSLTSTRPDLTDQPLAQAEATLFTDGSSYIRDGKRYAGAAVVTLDSVIWAEPLPIGTSAQKAELIALTKALEWSKDKSVNIYTDSRYAFATLHVHGMIYRERGWLTAGGKAIKNAPEILALLTAVWLPKRVAVMHCKGHQKDDAPTSTGNRRADEVAREVAIRPLSTQATISAGKRTADGSEFEKRTADGSEFESPKKKAKVE

SEQ ID NO: 1423 - protein, 2097 aa, synthetic construct
MPAAKRVKLDGGDKKYSIGLDIGTNSVGWAVITDEYKVPSKKFKVLGNTDRHSIKKNLIGALLFDSGETAEATRLKRTARRRYTRRKNRICYLQEIFSNEMAKVDDSFFHRLEESFLVEEDKKHERHPIFGNIVDEVAYHEKYPTIYHLRKKLVDSTDKADLRLIYLALAHMIKFRGHFLIEGDLNPDNSDVDKLFIQLVQTYNQLFEENPINASGVDAKAILSARLSKSRRLENLIAQLPGEKKNGLFGNLIALSLGLTPNFKSNFDLAEDAKLQLSKDTYDDDLDNLLAQIGDQYADLFLAAKNLSDAILLSDILRVNTEITKAPLSASMIKRYDEHHQDLTLLKALVRQQLPEKYKEIFFDQSKNGYAGYIDGGASQEEFYKFIKPILEKMDGTEELLVKLNREDLLRKQRTFDNGSIPHQIHLGELHAILRRQEDFYPFLKDNREKIEKILTFRIPYYVGPLARGNSRFAWMTRKSEETITPWNFEEVVDKGASAQSFIERMTNFDKNLPNEKVLPKHSLLYEYFTVYNELTKVKYVTEGMRKPAFLSGEQKKAIVDLLFKTNRKVTVKQLKEDYFKKIECFDSVEISGVEDRFNASLGTYHDLLKIIKDKDFLDNEENEDILEDIVLTLTLFEDREMIEERLKTYAHLFDDKVMKQLKRRRYTGWGRLSRKLINGIRDKQSGKTILDFLKSDGFANRNFMQLIHDDSLTFKEDIQKAQVSGQGDSLHEHIANLAGSPAIKKGILQTVKVVDELVKVMGRHKPENIVIEMARENQTTQKGQKNSRERMKRIEEGIKELGSQILKEHPVENTQLQNEKLYLYYLQNGRDMYVDQELDINRLSDYDVDHIVPQSFLKDDSIDNKVLTRSDKARGKSDNVPSEEVVKKMKNYWRQLLNAKLITQRKFDNLTKAERGGLSELDKAGFIKRQLVETRQITKHVAQILDSRMNTKYDENDKLIREVKVITLKSKLVSDFRKDFQFYKVREINNYHHAHDAYLNAVVGTALIKKYPKLESEFVYGDYKVYDVRKMIAKSEQEIGKATAKYFFYSNIMNFFKTEITLANGEIRKRPLIETNGETGEIVWDKGRDFATVRKVLSMPQVNIVKKTEVQTGGFSKESILPKRNSDKLIARKKDWDPKKYGGFDSPTVAYSVLVVAKVEKGKSKKLKSVKELLGITIMERSSFEKNPIDFLEAKGYKEVKKDLIIKLPKYSLFELENGRKRMLASAGELQKGNELALPSKYVNFLYLASHYEKLKGSPEDNEQKQLFVEQHKHYLDEIIEQISEFSKRVILADANLDKVLSAYNKHRDKPIREQAENIIHLFTLTNLGAPAAFKYFDTTIDRKRYTSTKEVLDATLIHQSITGLYETRIDLSQLGGDGGGGGGSGGGGSGGTAPLEEEYRLFLEAPIQNVTLLEQWKREIPKVWAEINPPGLASTQAPIHVQLLSTALPVRVRQYPITLEAKRSLRETIRKFRAAGILRPVHSPWNTPLLPVRKSGTSEYRMVQDLREVNKRVETIHPTVPNPYTLLSLLPPDRIWYSVLDLKDAFFCIPLAPESQLIFAFEWADAEEGESGQLTWTRLPQGFKNSPTLFNEALNRDLQGFRLDHPSVSLLQYVDDLLIAADTQAACLSATRDLLMTLAELGYRVSGKKAQLCQEEVTYLGFKIHKGSRSLSNSRTQAILQIPVPKTKRQVREFLGKIGYCRLFIPGFAELAQPLYAATRPGNDPLVWGEKEEEAFQSLKLALTQPPALALPSLDKPFQLFVEETSGAAKGVLTQALGPWKRPVAYLSKRLDPVAAGWPRCLRAIAAAALLTREASKLTFGQDIEITSSHNLESLLRSPPDKWLTNARITQYQVLLLDPPRVRFKQTAALNPATLLPETDDTLPIHHCLDTLDSLTSTRPDLTDQPLAQAEATLFTDGSSYIRDGKRYAGAAVVTLDSVIWAEPLPIGTSAQKAELIALTKALEWSKDKSVNIYTDSRYAFATLHVHGMIYRERGWLTAGGKAIKNAPEILALLTAVWLPKRVAVMHCKGHQKDDAPTSTGNRRADEVAREVAIRPLSTQATISAGKRTADGSEFEKRTADGSEFESPKKKAKVE

SEQ ID NO: 1424 - protein, 2098 aa, synthetic construct
MPAAKRVKLDGGDKKYSIGLDIGTNSVGWAVITDEYKVPSKKFKVLGNTDRHSIKKNLIGALLFDSGETAEATRLKRTARRRYTRRKNRICYLQEIFSNEMAKVDDSFFHRLEESFLVEEDKKHERHPIFGNIVDEVAYHEKYPTIYHLRKKLVDSTDKADLRLIYLALAHMIKFRGHFLIEGDLNPDNSDVDKLFIQLVQTYNQLFEENPINASGVDAKAILSARLSKSRRLENLIAQLPGEKKNGLFGNLIALSLGLTPNFKSNFDLAEDAKLQLSKDTYDDDLDNLLAQIGDQYADLFLAAKNLSDAILLSDILRVNTEITKAPLSASMIKRYDEHHQDLTLLKALVRQQLPEKYKEIFFDQSKNGYAGYIDGGASQEEFYKFIKPILEKMDGTEELLVKLNREDLLRKQRTFDNGSIPHQIHLGELHAILRRQEDFYPFLKDNREKIEKILTFRIPYYVGPLARGNSRFAWMTRKSEETITPWNFEEVVDKGASAQSFIERMTNFDKNLPNEKVLPKHSLLYEYFTVYNELTKVKYVTEGMRKPAFLSGEQKKAIVDLLFKTNRKVTVKQLKEDYFKKIECFDSVEISGVEDRFNASLGTYHDLLKIIKDKDFLDNEENEDILEDIVLTLTLFEDREMIEERLKTYAHLFDDKVMKQLKRRRYTGWGRLSRKLINGIRDKQSGKTILDFLKSDGFANRNFMQLIHDDSLTFKEDIQKAQVSGQGDSLHEHIANLAGSPAIKKGILQTVKVVDELVKVMGRHKPENIVIEMARENQTTQKGQKNSRERMKRIEEGIKELGSQILKEHPVENTQLQNEKLYLYYLQNGRDMYVDQELDINRLSDYDVDHIVPQSFLKDDSIDNKVLTRSDKARGKSDNVPSEEVVKKMKNYWRQLLNAKLITQRKFDNLTKAERGGLSELDKAGFIKRQLVETRQITKHVAQILDSRMNTKYDENDKLIREVKVITLKSKLVSDFRKDFQFYKVREINNYHHAHDAYLNAVVGTALIKKYPKLESEFVYGDYKVYDVRKMIAKSEQEIGKATAKYFFYSNIMNFFKTEITLANGEIRKRPLIETNGETGEIVWDKGRDFATVRKVLSMPQVNIVKKTEVQTGGFSKESILPKRNSDKLIARKKDWDPKKYGGFDSPTVAYSVLVVAKVEKGKSKKLKSVKELLGITIMERSSFEKNPIDFLEAKGYKEVKKDLIIKLPKYSLFELENGRKRMLASAGELQKGNELALPSKYVNFLYLASHYEKLKGSPEDNEQKQLFVEQHKHYLDEIIEQISEFSKRVILADANLDKVLSAYNKHRDKPIREQAENIIHLFTLTNLGAPAAFKYFDTTIDRKRYTSTKEVLDATLIHQSITGLYETRIDLSQLGGDGGGSSGGGEAAAKGGTAPLEEEYRLFLEAPIQNVTLLEQWKREIPKVWAEINPPGLASTQAPIHVQLLSTALPVRVRQYPITLEAKRSLRETIRKFRAAGILRPVHSPWNTPLLPVRKSGTSEYRMVQDLREVNKRVETIHPTVPNPYTLLSLLPPDRIWYSVLDLKDAFFCIPLAPESQLIFAFEWADAEEGESGQLTWTRLPQGFKNSPTLFNEALNRDLQGFRLDHPSVSLLQYVDDLLIAADTQAACLSATRDLLMTLAELGYRVSGKKAQLCQEEVTYLGFKIHKGSRSLSNSRTQAILQIPVPKTKRQVREFLGKIGYCRLFIPGFAELAQPLYAATRPGNDPLVWGEKEEEAFQSLKLALTQPPALALPSLDKPFQLFVEETSGAAKGVLTQALGPWKRPVAYLSKRLDPVAAGWPRCLRAIAAAALLTREASKLTFGQDIEITSSHNLESLLRSPPDKWLTNARITQYQVLLLDPPRVRFKQTAALNPATLLPETDDTLPIHHCLDTLDSLTSTRPDLTDQPLAQAEATLFTDGSSYIRDGKRYAGAAVVTLDSVIWAEPLPIGTSAQKAELIALTKALEWSKDKSVNIYTDSRYAFATLHVHGMIYRERGWLTAGGKAIKNAPEILALLTAVWLPKRVAVMHCKGHQKDDAPTSTGNRRADEVAREVAIRPLSTQATISAGKRTADGSEFEKRTADGSEFESPKKKAKVE

SEQ ID NO: 1425 - protein, 2098 aa, synthetic construct
MPAAKRVKLDGGDKKYSIGLDIGTNSVGWAVITDEYKVPSKKFKVLGNTDRHSIKKNLIGALLFDSGETAEATRLKRTARRRYTRRKNRICYLQEIFSNEMAKVDDSFFHRLEESFLVEEDKKHERHPIFGNIVDEVAYHEKYPTIYHLRKKLVDSTDKADLRLIYLALAHMIKFRGHFLIEGDLNPDNSDVDKLFIQLVQTYNQLFEENPINASGVDAKAILSARLSKSRRLENLIAQLPGEKKNGLFGNLIALSLGLTPNFKSNFDLAEDAKLQLSKDTYDDDLDNLLAQIGDQYADLFLAAKNLSDAILLSDILRVNTEITKAPLSASMIKRYDEHHQDLTLLKALVRQQLPEKYKEIFFDQSKNGYAGYIDGGASQEEFYKFIKPILEKMDGTEELLVKLNREDLLRKQRTFDNGSIPHQIHLGELHAILRRQEDFYPFLKDNREKIEKILTFRIPYYVGPLARGNSRFAWMTRKSEETITPWNFEEVVDKGASAQSFIERMTNFDKNLPNEKVLPKHSLLYEYFTVYNELTKVKYVTEGMRKPAFLSGEQKKAIVDLLFKTNRKVTVKQLKEDYFKKIECFDSVEISGVEDRFNASLGTYHDLLKIIKDKDFLDNEENEDILEDIVLTLTLFEDREMIEERLKTYAHLFDDKVMKQLKRRRYTGWGRLSRKLINGIRDKQSGKTILDFLKSDGFANRNFMQLIHDDSLTFKEDIQKAQVSGQGDSLHEHIANLAGSPAIKKGILQTVKVVDELVKVMGRHKPENIVIEMARENQTTQKGQKNSRERMKRIEEGIKELGSQILKEHPVENTQLQNEKLYLYYLQNGRDMYVDQELDINRLSDYDVDHIVPQSFLKDDSIDNKVLTRSDKARGKSDNVPSEEVVKKMKNYWRQLLNAKLITQRKFDNLTKAERGGLSELDKAGFIKRQLVETRQITKHVAQILDSRMNTKYDENDKLIREVKVITLKSKLVSDFRKDFQFYKVREINNYHHAHDAYLNAVVGTALIKKYPKLESEFVYGDYKVYDVRKMIAKSEQEIGKATAKYFFYSNIMNFFKTEITLANGEIRKRPLIETNGETGEIVWDKGRDFATVRKVLSMPQVNIVKKTEVQTGGFSKESILPKRNSDKLIARKKDWDPKKYGGFDSPTVAYSVLVVAKVEKGKSKKLKSVKELLGITIMERSSFEKNPIDFLEAKGYKEVKKDLIIKLPKYSLFELENGRKRMLASAGELQKGNELALPSKYVNFLYLASHYEKLKGSPEDNEQKQLFVEQHKHYLDEIIEQISEFSKRVILADANLDKVLSAYNKHRDKPIREQAENIIHLFTLTNLGAPAAFKYFDTTIDRKRYTSTKEVLDATLIHQSITGLYETRIDLSQLGGDGGGGSEAAAKGGGGGTAPLEEEYRLFLEAPIQNVTLLEQWKREIPKVWAEINPPGLASTQAPIHVQLLSTALPVRVRQYPITLEAKRSLRETIRKFRAAGILRPVHSPWNTPLLPVRKSGTSEYRMVQDLREVNKRVETIHPTVPNPYTLLSLLPPDRIWYSVLDLKDAFFCIPLAPESQLIFAFEWADAEEGESGQLTWTRLPQGFKNSPTLFNEALNRDLQGFRLDHPSVSLLQYVDDLLIAADTQAACLSATRDLLMTLAELGYRVSGKKAQLCQEEVTYLGFKIHKGSRSLSNSRTQAILQIPVPKTKRQVREFLGKIGYCRLFIPGFAELAQPLYAATRPGNDPLVWGEKEEEAFQSLKLALTQPPALALPSLDKPFQLFVEETSGAAKGVLTQALGPWKRPVAYLSKRLDPVAAGWPRCLRAIAAAALLTREASKLTFGQDIEITSSHNLESLLRSPPDKWLTNARITQYQVLLLDPPRVRFKQTAALNPATLLPETDDTLPIHHCLDTLDSLTSTRPDLTDQPLAQAEATLFTDGSSYIRDGKRYAGAAVVTLDSVIWAEPLPIGTSAQKAELIALTKALEWSKDKSVNIYTDSRYAFATLHVHGMIYRERGWLTAGGKAIKNAPEILALLTAVWLPKRVAVMHCKGHQKDDAPTSTGNRRADEVAREVAIRPLSTQATISAGKRTADGSEFEKRTADGSEFESPKKKAKVE

SEQ ID NO: 1426 - protein, 2117 aa, synthetic construct
MPAAKRVKLDGGDKKYSIGLDIGTNSVGWAVITDEYKVPSKKFKVLGNTDRHSIKKNLIGALLFDSGETAEATRLKRTARRRYTRRKNRICYLQEIFSNEMAKVDDSFFHRLEESFLVEEDKKHERHPIFGNIVDEVAYHEKYPTIYHLRKKLVDSTDKADLRLIYLALAHMIKFRGHFLIEGDLNPDNSDVDKLFIQLVQTYNQLFEENPINASGVDAKAILSARLSKSRRLENLIAQLPGEKKNGLFGNLIALSLGLTPNFKSNFDLAEDAKLQLSKDTYDDDLDNLLAQIGDQYADLFLAAKNLSDAILLSDILRVNTEITKAPLSASMIKRYDEHHQDLTLLKALVRQQLPEKYKEIFFDQSKNGYAGYIDGGASQEEFYKFIKPILEKMDGTEELLVKLNREDLLRKQRTFDNGSIPHQIHLGELHAILRRQEDFYPFLKDNREKIEKILTFRIPYYVGPLARGNSRFAWMTRKSEETITPWNFEEVVDKGASAQSFIERMTNFDKNLPNEKVLPKHSLLYEYFTVYNELTKVKYVTEGMRKPAFLSGEQKKAIVDLLFKTNRKVTVKQLKEDYFKKIECFDSVEISGVEDRFNASLGTYHDLLKIIKDKDFLDNEENEDILEDIVLTLTLFEDREMIEERLKTYAHLFDDKVMKQLKRRRYTGWGRLSRKLINGIRDKQSGKTILDFLKSDGFANRNFMQLIHDDSLTFKEDIQKAQVSGQGDSLHEHIANLAGSPAIKKGILQTVKVVDELVKVMGRHKPENIVIEMARENQTTQKGQKNSRERMKRIEEGIKELGSQILKEHPVENTQLQNEKLYLYYLQNGRDMYVDQELDINRLSDYDVDHIVPQSFLKDDSIDNKVLTRSDKARGKSDNVPSEEVVKKMKNYWRQLLNAKLITQRKFDNLTKAERGGLSELDKAGFIKRQLVETRQITKHVAQILDSRMNTKYDENDKLIREVKVITLKSKLVSDFRKDFQFYKVREINNYHHAHDAYLNAVVGTALIKKYPKLESEFVYGDYKVYDVRKMIAKSEQEIGKATAKYFFYSNIMNFFKTEITLANGEIRKRPLIETNGETGEIVWDKGRDFATVRKVLSMPQVNIVKKTEVQTGGFSKESILPKRNSDKLIARKKDWDPKKYGGFDSPTVAYSVLVVAKVEKGKSKKLKSVKELLGITIMERSSFEKNPIDFLEAKGYKEVKKDLIIKLPKYSLFELENGRKRMLASAGELQKGNELALPSKYVNFLYLASHYEKLKGSPEDNEQKQLFVEQHKHYLDEIIEQISEFSKRVILADANLDKVLSAYNKHRDKPIREQAENIIHLFTLTNLGAPAAFKYFDTTIDRKRYTSTKEVLDATLIHQSITGLYETRIDLSQLGGDGGEAAAKEAAAKEAAAKEAAAKEAAAKEAAAKGGTAPLEEEYRLFLEAPIQNVTLLEQWKREIPKVWAEINPPGLASTQAPIHVQLLSTALPVRVRQYPITLEAKRSLRETIRKFRAAGILRPVHSPWNTPLLPVRKSGTSEYRMVQDLREVNKRVETIHPTVPNPYTLLSLLPPDRIWYSVLDLKDAFFCIPLAPESQLIFAFEWADAEEGESGQLTWTRLPQGFKNSPTLFNEALNRDLQGFRLDHPSVSLLQYVDDLLIAADTQAACLSATRDLLMTLAELGYRVSGKKAQLCQEEVTYLGFKIHKGSRSLSNSRTQAILQIPVPKTKRQVREFLGKIGYCRLFIPGFAELAQPLYAATRPGNDPLVWGEKEEEAFQSLKLALTQPPALALPSLDKPFQLFVEETSGAAKGVLTQALGPWKRPVAYLSKRLDPVAAGWPRCLRAIAAAALLTREASKLTFGQDIEITSSHNLESLLRSPPDKWLTNARITQYQVLLLDPPRVRFKQTAALNPATLLPETDDTLPIHHCLDTLDSLTSTRPDLTDQPLAQAEATLFTDGSSYIRDGKRYAGAAVVTLDSVIWAEPLPIGTSAQKAELIALTKALEWSKDKSVNIYTDSRYAFATLHVHGMIYRERGWLTAGGKAIKNAPEILALLTAVWLPKRVAVMHCKGHQKDDAPTSTGNRRADEVAREVAIRPLSTQATISAGKRTADGSEFEKRTADGSEFESPKKKAKVE

SEQ ID NO: 1427 - protein, 2098 aa, synthetic construct
MPAAKRVKLDGGDKKYSIGLDIGTNSVGWAVITDEYKVPSKKFKVLGNTDRHSIKKNLIGALLFDSGETAEATRLKRTARRRYTRRKNRICYLQEIFSNEMAKVDDSFFHRLEESFLVEEDKKHERHPIFGNIVDEVAYHEKYPTIYHLRKKLVDSTDKADLRLIYLALAHMIKFRGHFLIEGDLNPDNSDVDKLFIQLVQTYNQLFEENPINASGVDAKAILSARLSKSRRLENLIAQLPGEKKNGLFGNLIALSLGLTPNFKSNFDLAEDAKLQLSKDTYDDDLDNLLAQIGDQYADLFLAAKNLSDAILLSDILRVNTEITKAPLSASMIKRYDEHHQDLTLLKALVRQQLPEKYKEIFFDQSKNGYAGYIDGGASQEEFYKFIKPILEKMDGTEELLVKLNREDLLRKQRTFDNGSIPHQIHLGELHAILRRQEDFYPFLKDNREKIEKILTFRIPYYVGPLARGNSRFAWMTRKSEETITPWNFEEVVDKGASAQSFIERMTNFDKNLPNEKVLPKHSLLYEYFTVYNELTKVKYVTEGMRKPAFLSGEQKKAIVDLLFKTNRKVTVKQLKEDYFKKIECFDSVEISGVEDRFNASLGTYHDLLKIIKDKDFLDNEENEDILEDIVLTLTLFEDREMIEERLKTYAHLFDDKVMKQLKRRRYTGWGRLSRKLINGIRDKQSGKTILDFLKSDGFANRNFMQLIHDDSLTFKEDIQKAQVSGQGDSLHEHIANLAGSPAIKKGILQTVKVVDELVKVMGRHKPENIVIEMARENQTTQKGQKNSRERMKRIEEGIKELGSQILKEHPVENTQLQNEKLYLYYLQNGRDMYVDQELDINRLSDYDVDHIVPQSFLKDDSIDNKVLTRSDKARGKSDNVPSEEVVKKMKNYWRQLLNAKLITQRKFDNLTKAERGGLSELDKAGFIKRQLVETRQITKHVAQILDSRMNTKYDENDKLIREVKVITLKSKLVSDFRKDFQFYKVREINNYHHAHDAYLNAVVGTALIKKYPKLESEFVYGDYKVYDVRKMIAKSEQEIGKATAKYFFYSNIMNFFKTEITLANGEIRKRPLIETNGETGEIVWDKGRDFATVRKVLSMPQVNIVKKTEVQTGGFSKESILPKRNSDKLIARKKDWDPKKYGGFDSPTVAYSVLVVAKVEKGKSKKLKSVKELLGITIMERSSFEKNPIDFLEAKGYKEVKKDLIIKLPKYSLFELENGRKRMLASAGELQKGNELALPSKYVNFLYLASHYEKLKGSPEDNEQKQLFVEQHKHYLDEIIEQISEFSKRVILADANLDKVLSAYNKHRDKPIREQAENIIHLFTLTNLGAPAAFKYFDTTIDRKRYTSTKEVLDATLIHQSITGLYETRIDLSQLGGDGGGGGGGSEAAAKGGTAPLEEEYRLFLEAPIQNVTLLEQWKREIPKVWAEINPPGLASTQAPIHVQLLSTALPVRVRQYPITLEAKRSLRETIRKFRAAGILRPVHSPWNTPLLPVRKSGTSEYRMVQDLREVNKRVETIHPTVPNPYTLLSLLPPDRIWYSVLDLKDAFFCIPLAPESQLIFAFEWADAEEGESGQLTWTRLPQGFKNSPTLFNEALNRDLQGFRLDHPSVSLLQYVDDLLIAADTQAACLSATRDLLMTLAELGYRVSGKKAQLCQEEVTYLGFKIHKGSRSLSNSRTQAILQIPVPKTKRQVREFLGKIGYCRLFIPGFAELAQPLYAATRPGNDPLVWGEKEEEAFQSLKLALTQPPALALPSLDKPFQLFVEETSGAAKGVLTQALGPWKRPVAYLSKRLDPVAAGWPRCLRAIAAAALLTREASKLTFGQDIEITSSHNLESLLRSPPDKWLTNARITQYQVLLLDPPRVRFKQTAALNPATLLPETDDTLPIHHCLDTLDSLTSTRPDLTDQPLAQAEATLFTDGSSYIRDGKRYAGAAVVTLDSVIWAEPLPIGTSAQKAELIALTKALEWSKDKSVNIYTDSRYAFATLHVHGMIYRERGWLTAGGKAIKNAPEILALLTAVWLPKRVAVMHCKGHQKDDAPTSTGNRRADEVAREVAIRPLSTQATISAGKRTADGSEFEKRTADGSEFESPKKKAKVE

SEQ ID NO: 1428 - protein, 2095 aa, synthetic construct
MPAAKRVKLDGGDKKYSIGLDIGTNSVGWAVITDEYKVPSKKFKVLGNTDRHSIKKNLIGALLFDSGETAEATRLKRTARRRYTRRKNRICYLQEIFSNEMAKVDDSFFHRLEESFLVEEDKKHERHPIFGNIVDEVAYHEKYPTIYHLRKKLVDSTDKADLRLIYLALAHMIKFRGHFLIEGDLNPDNSDVDKLFIQLVQTYNQLFEENPINASGVDAKAILSARLSKSRRLENLIAQLPGEKKNGLFGNLIALSLGLTPNFKSNFDLAEDAKLQLSKDTYDDDLDNLLAQIGDQYADLFLAAKNLSDAILLSDILRVNTEITKAPLSASMIKRYDEHHQDLTLLKALVRQQLPEKYKEIFFDQSKNGYAGYIDGGASQEEFYKFIKPILEKMDGTEELLVKLNREDLLRKQRTFDNGSIPHQIHLGELHAILRRQEDFYPFLKDNREKIEKILTFRIPYYVGPLARGNSRFAWMTRKSEETITPWNFEEVVDKGASAQSFIERMTNFDKNLPNEKVLPKHSLLYEYFTVYNELTKVKYVTEGMRKPAFLSGEQKKAIVDLLFKTNRKVTVKQLKEDYFKKIECFDSVEISGVEDRFNASLGTYHDLLKIIKDKDFLDNEENEDILEDIVLTLTLFEDREMIEERLKTYAHLFDDKVMKQLKRRRYTGWGRLSRKLINGIRDKQSGKTILDFLKSDGFANRNFMQLIHDDSLTFKEDIQKAQVSGQGDSLHEHIANLAGSPAIKKGILQTVKVVDELVKVMGRHKPENIVIEMARENQTTQKGQKNSRERMKRIEEGIKELGSQILKEHPVENTQLQNEKLYLYYLQNGRDMYVDQELDINRLSDYDVDHIVPQSFLKDDSIDNKVLTRSDKARGKSDNVPSEEVVKKMKNYWRQLLNAKLITQRKFDNLTKAERGGLSELDKAGFIKRQLVETRQITKHVAQILDSRMNTKYDENDKLIREVKVITLKSKLVSDFRKDFQFYKVREINNYHHAHDAYLNAVVGTALIKKYPKLESEFVYGDYKVYDVRKMIAKSEQEIGKATAKYFFYSNIMNFFKTEITLANGEIRKRPLIETNGETGEIVWDKGRDFATVRKVLSMPQVNIVKKTEVQTGGFSKESILPKRNSDKLIARKKDWDPKKYGGFDSPTVAYSVLVVAKVEKGKSKKLKSVKELLGITIMERSSFEKNPIDFLEAKGYKEVKKDLIIKLPKYSLFELENGRKRMLASAGELQKGNELALPSKYVNFLYLASHYEKLKGSPEDNEQKQLFVEQHKHYLDEIIEQISEFSKRVILADANLDKVLSAYNKHRDKPIREQAENIIHLFTLTNLGAPAAFKYFDTTIDRKRYTSTKEVLDATLIHQSITGLYETRIDLSQLGGDGGEAAAKGGSGGTAPLEEEYRLFLEAPIQNVTLLEQWKREIPKVWAEINPPGLASTQAPIHVQLLSTALPVRVRQYPITLEAKRSLRETIRKFRAAGILRPVHSPWNTPLLPVRKSGTSEYRMVQDLREVNKRVETIHPTVPNPYTLLSLLPPDRIWYSVLDLKDAFFCIPLAPESQLIFAFEWADAEEGESGQLTWTRLPQGFKNSPTLFNEALNRDLQGFRLDHPSVSLLQYVDDLLIAADTQAACLSATRDLLMTLAELGYRVSGKKAQLCQEEVTYLGFKIHKGSRSLSNSRTQAILQIPVPKTKRQVREFLGKIGYCRLFIPGFAELAQPLYAATRPGNDPLVWGEKEEEAFQSLKLALTQPPALALPSLDKPFQLFVEETSGAAKGVLTQALGPWKRPVAYLSKRLDPVAAGWPRCLRAIAAAALLTREASKLTFGQDIEITSSHNLESLLRSPPDKWLTNARITQYQVLLLDPPRVRFKQTAALNPATLLPETDDTLPIHHCLDTLDSLTSTRPDLTDQPLAQAEATLFTDGSSYIRDGKRYAGAAVVTLDSVIWAEPLPIGTSAQKAELIALTKALEWSKDKSVNIYTDSRYAFATLHVHGMIYRERGWLTAGGKAIKNAPEILALLTAVWLPKRVAVMHCKGHQKDDAPTSTGNRRADEVAREVAIRPLSTQATISAGKRTADGSEFEKRTADGSEFESPKKKAKVE

SEQ ID NO: 1429 - protein, 2096 aa, synthetic construct
MPAAKRVKLDGGDKKYSIGLDIGTNSVGWAVITDEYKVPSKKFKVLGNTDRHSIKKNLIGALLFDSGETAEATRLKRTARRRYTRRKNRICYLQEIFSNEMAKVDDSFFHRLEESFLVEEDKKHERHPIFGNIVDEVAYHEKYPTIYHLRKKLVDSTDKADLRLIYLALAHMIKFRGHFLIEGDLNPDNSDVDKLFIQLVQTYNQLFEENPINASGVDAKAILSARLSKSRRLENLIAQLPGEKKNGLFGNLIALSLGLTPNFKSNFDLAEDAKLQLSKDTYDDDLDNLLAQIGDQYADLFLAAKNLSDAILLSDILRVNTEITKAPLSASMIKRYDEHHQDLTLLKALVRQQLPEKYKEIFFDQSKNGYAGYIDGGASQEEFYKFIKPILEKMDGTEELLVKLNREDLLRKQRTFDNGSIPHQIHLGELHAILRRQEDFYPFLKDNREKIEKILTFRIPYYVGPLARGNSRFAWMTRKSEETITPWNFEEVVDKGASAQSFIERMTNFDKNLPNEKVLPKHSLLYEYFTVYNELTKVKYVTEGMRKPAFLSGEQKKAIVDLLFKTNRKVTVKQLKEDYFKKIECFDSVEISGVEDRFNASLGTYHDLLKIIKDKDFLDNEENEDILEDIVLTLTLFEDREMIEERLKTYAHLFDDKVMKQLKRRRYTGWGRLSRKLINGIRDKQSGKTILDFLKSDGFANRNFMQLIHDDSLTFKEDIQKAQVSGQGDSLHEHIANLAGSPAIKKGILQTVKVVDELVKVMGRHKPENIVIEMARENQTTQKGQKNSRERMKRIEEGIKELGSQILKEHPVENTQLQNEKLYLYYLQNGRDMYVDQELDINRLSDYDVDHIVPQSFLKDDSIDNKVLTRSDKARGKSDNVPSEEVVKKMKNYWRQLLNAKLITQRKFDNLTKAERGGLSELDKAGFIKRQLVETRQITKHVAQILDSRMNTKYDENDKLIREVKVITLKSKLVSDFRKDFQFYKVREINNYHHAHDAYLNAVVGTALIKKYPKLESEFVYGDYKVYDVRKMIAKSEQEIGKATAKYFFYSNIMNFFKTEITLANGEIRKRPLIETNGETGEIVWDKGRDFATVRKVLSMPQVNIVKKTEVQTGGFSKESILPKRNSDKLIARKKDWDPKKYGGFDSPTVAYSVLVVAKVEKGKSKKLKSVKELLGITIMERSSFEKNPIDFLEAKGYKEVKKDLIIKLPKYSLFELENGRKRMLASAGELQKGNELALPSKYVNFLYLASHYEKLKGSPEDNEQKQLFVEQHKHYLDEIIEQISEFSKRVILADANLDKVLSAYNKHRDKPIREQAENIIHLFTLTNLGAPAAFKYFDTTIDRKRYTSTKEVLDATLIHQSITGLYETRIDLSQLGGDGGPAPAPAPAPGGTAPLEEEYRLFLEAPIQNVTLLEQWKREIPKVWAEINPPGLASTQAPIHVQLLSTALPVRVRQYPITLEAKRSLRETIRKFRAAGILRPVHSPWNTPLLPVRKSGTSEYRMVQDLREVNKRVETIHPTVPNPYTLLSLLPPDRIWYSVLDLKDAFFCIPLAPESQLIFAFEWADAEEGESGQLTWTRLPQGFKNSPTLFNEALNRDLQGFRLDHPSVSLLQYVDDLLIAADTQAACLSATRDLLMTLAELGYRVSGKKAQLCQEEVTYLGFKIHKGSRSLSNSRTQAILQIPVPKTKRQVREFLGKIGYCRLFIPGFAELAQPLYAATRPGNDPLVWGEKEEEAFQSLKLALTQPPALALPSLDKPFQLFVEETSGAAKGVLTQALGPWKRPVAYLSKRLDPVAAGWPRCLRAIAAAALLTREASKLTFGQDIEITSSHNLESLLRSPPDKWLTNARITQYQVLLLDPPRVRFKQTAALNPATLLPETDDTLPIHHCLDTLDSLTSTRPDLTDQPLAQAEATLFTDGSSYIRDGKRYAGAAVVTLDSVIWAEPLPIGTSAQKAELIALTKALEWSKDKSVNIYTDSRYAFATLHVHGMIYRERGWLTAGGKAIKNAPEILALLTAVWLPKRVAVMHCKGHQKDDAPTSTGNRRADEVAREVAIRPLSTQATISAGKRTADGSEFEKRTADGSEFESPKKKAKVE

SEQ ID NO: 1430 - protein, 2093 aa, synthetic construct
MPAAKRVKLDGGDKKYSIGLDIGTNSVGWAVITDEYKVPSKKFKVLGNTDRHSIKKNLIGALLFDSGETAEATRLKRTARRRYTRRKNRICYLQEIFSNEMAKVDDSFFHRLEESFLVEEDKKHERHPIFGNIVDEVAYHEKYPTIYHLRKKLVDSTDKADLRLIYLALAHMIKFRGHFLIEGDLNPDNSDVDKLFIQLVQTYNQLFEENPINASGVDAKAILSARLSKSRRLENLIAQLPGEKKNGLFGNLIALSLGLTPNFKSNFDLAEDAKLQLSKDTYDDDLDNLLAQIGDQYADLFLAAKNLSDAILLSDILRVNTEITKAPLSASMIKRYDEHHQDLTLLKALVRQQLPEKYKEIFFDQSKNGYAGYIDGGASQEEFYKFIKPILEKMDGTEELLVKLNREDLLRKQRTFDNGSIPHQIHLGELHAILRRQEDFYPFLKDNREKIEKILTFRIPYYVGPLARGNSRFAWMTRKSEETITPWNFEEVVDKGASAQSFIERMTNFDKNLPNEKVLPKHSLLYEYFTVYNELTKVKYVTEGMRKPAFLSGEQKKAIVDLLFKTNRKVTVKQLKEDYFKKIECFDSVEISGVEDRFNASLGTYHDLLKIIKDKDFLDNEENEDILEDIVLTLTLFEDREMIEERLKTYAHLFDDKVMKQLKRRRYTGWGRLSRKLINGIRDKQSGKTILDFLKSDGFANRNFMQLIHDDSLTFKEDIQKAQVSGQGDSLHEHIANLAGSPAIKKGILQTVKVVDELVKVMGRHKPENIVIEMARENQTTQKGQKNSRERMKRIEEGIKELGSQILKEHPVENTQLQNEKLYLYYLQNGRDMYVDQELDINRLSDYDVDHIVPQSFLKDDSIDNKVLTRSDKARGKSDNVPSEEVVKKMKNYWRQLLNAKLITQRKFDNLTKAERGGLSELDKAGFIKRQLVETRQITKHVAQILDSRMNTKYDENDKLIREVKVITLKSKLVSDFRKDFQFYKVREINNYHHAHDAYLNAVVGTALIKKYPKLESEFVYGDYKVYDVRKMIAKSEQEIGKATAKYFFYSNIMNFFKTEITLANGEIRKRPLIETNGETGEIVWDKGRDFATVRKVLSMPQVNIVKKTEVQTGGFSKESILPKRNSDKLIARKKDWDPKKYGGFDSPTVAYSVLVVAKVEKGKSKKLKSVKELLGITIMERSSFEKNPIDFLEAKGYKEVKKDLIIKLPKYSLFELENGRKRMLASAGELQKGNELALPSKYVNFLYLASHYEKLKGSPEDNEQKQLFVEQHKHYLDEIIEQISEFSKRVILADANLDKVLSAYNKHRDKPIREQAENIIHLFTLTNLGAPAAFKYFDTTIDRKRYTSTKEVLDATLIHQSITGLYETRIDLSQLGGDGGGSSGGGGGTAPLEEEYRLFLEAPIQNVTLLEQWKREIPKVWAEINPPGLASTQAPIHVQLLSTALPVRVRQYPITLEAKRSLRETIRKFRAAGILRPVHSPWNTPLLPVRKSGTSEYRMVQDLREVNKRVETIHPTVPNPYTLLSLLPPDRIWYSVLDLKDAFFCIPLAPESQLIFAFEWADAEEGESGQLTWTRLPQGFKNSPTLFNEALNRDLQGFRLDHPSVSLLQYVDDLLIAADTQAACLSATRDLLMTLAELGYRVSGKKAQLCQEEVTYLGFKIHKGSRSLSNSRTQAILQIPVPKTKRQVREFLGKIGYCRLFIPGFAELAQPLYAATRPGNDPLVWGEKEEEAFQSLKLALTQPPALALPSLDKPFQLFVEETSGAAKGVLTQALGPWKRPVAYLSKRLDPVAAGWPRCLRAIAAAALLTREASKLTFGQDIEITSSHNLESLLRSPPDKWLTNARITQYQVLLLDPPRVRFKQTAALNPATLLPETDDTLPIHHCLDTLDSLTSTRPDLTDQPLAQAEATLFTDGSSYIRDGKRYAGAAVVTLDSVIWAEPLPIGTSAQKAELIALTKALEWSKDKSVNIYTDSRYAFATLHVHGMIYRERGWLTAGGKAIKNAPEILALLTAVWLPKRVAVMHCKGHQKDDAPTSTGNRRADEVAREVAIRPLSTQATISAGKRTADGSEFEKRTADGSEFESPKKKAKVE

SEQ ID NO: 1431 - protein, 2098 aa, synthetic construct
MPAAKRVKLDGGDKKYSIGLDIGTNSVGWAVITDEYKVPSKKFKVLGNTDRHSIKKNLIGALLFDSGETAEATRLKRTARRRYTRRKNRICYLQEIFSNEMAKVDDSFFHRLEESFLVEEDKKHERHPIFGNIVDEVAYHEKYPTIYHLRKKLVDSTDKADLRLIYLALAHMIKFRGHFLIEGDLNPDNSDVDKLFIQLVQTYNQLFEENPINASGVDAKAILSARLSKSRRLENLIAQLPGEKKNGLFGNLIALSLGLTPNFKSNFDLAEDAKLQLSKDTYDDDLDNLLAQIGDQYADLFLAAKNLSDAILLSDILRVNTEITKAPLSASMIKRYDEHHQDLTLLKALVRQQLPEKYKEIFFDQSKNGYAGYIDGGASQEEFYKFIKPILEKMDGTEELLVKLNREDLLRKQRTFDNGSIPHQIHLGELHAILRRQEDFYPFLKDNREKIEKILTFRIPYYVGPLARGNSRFAWMTRKSEETITPWNFEEVVDKGASAQSFIERMTNFDKNLPNEKVLPKHSLLYEYFTVYNELTKVKYVTEGMRKPAFLSGEQKKAIVDLLFKTNRKVTVKQLKEDYFKKIECFDSVEISGVEDRFNASLGTYHDLLKIIKDKDFLDNEENEDILEDIVLTLTLFEDREMIEERLKTYAHLFDDKVMKQLKRRRYTGWGRLSRKLINGIRDKQSGKTILDFLKSDGFANRNFMQLIHDDSLTFKEDIQKAQVSGQGDSLHEHIANLAGSPAIKKGILQTVKVVDELVKVMGRHKPENIVIEMARENQTTQKGQKNSRERMKRIEEGIKELGSQILKEHPVENTQLQNEKLYLYYLQNGRDMYVDQELDINRLSDYDVDHIVPQSFLKDDSIDNKVLTRSDKARGKSDNVPSEEVVKKMKNYWRQLLNAKLITQRKFDNLTKAERGGLSELDKAGFIKRQLVETRQITKHVAQILDSRMNTKYDENDKLIREVKVITLKSKLVSDFRKDFQFYKVREINNYHHAHDAYLNAVVGTALIKKYPKLESEFVYGDYKVYDVRKMIAKSEQEIGKATAKYFFYSNIMNFFKTEITLANGEIRKRPLIETNGETGEIVWDKGRDFATVRKVLSMPQVNIVKKTEVQTGGFSKESILPKRNSDKLIARKKDWDPKKYGGFDSPTVAYSVLVVAKVEKGKSKKLKSVKELLGITIMERSSFEKNPIDFLEAKGYKEVKKDLIIKLPKYSLFELENGRKRMLASAGELQKGNELALPSKYVNFLYLASHYEKLKGSPEDNEQKQLFVEQHKHYLDEIIEQISEFSKRVILADANLDKVLSAYNKHRDKPIREQAENIIHLFTLTNLGAPAAFKYFDTTIDRKRYTSTKEVLDATLIHQSITGLYETRIDLSQLGGDGGEAAAKGGSPAPGGTAPLEEEYRLFLEAPIQNVTLLEQWKREIPKVWAEINPPGLASTQAPIHVQLLSTALPVRVRQYPITLEAKRSLRETIRKFRAAGILRPVHSPWNTPLLPVRKSGTSEYRMVQDLREVNKRVETIHPTVPNPYTLLSLLPPDRIWYSVLDLKDAFFCIPLAPESQLIFAFEWADAEEGESGQLTWTRLPQGFKNSPTLFNEALNRDLQGFRLDHPSVSLLQYVDDLLIAADTQAACLSATRDLLMTLAELGYRVSGKKAQLCQEEVTYLGFKIHKGSRSLSNSRTQAILQIPVPKTKRQVREFLGKIGYCRLFIPGFAELAQPLYAATRPGNDPLVWGEKEEEAFQSLKLALTQPPALALPSLDKPFQLFVEETSGAAKGVLTQALGPWKRPVAYLSKRLDPVAAGWPRCLRAIAAAALLTREASKLTFGQDIEITSSHNLESLLRSPPDKWLTNARITQYQVLLLDPPRVRFKQTAALNPATLLPETDDTLPIHHCLDTLDSLTSTRPDLTDQPLAQAEATLFTDGSSYIRDGKRYAGAAVVTLDSVIWAEPLPIGTSAQKAELIALTKALEWSKDKSVNIYTDSRYAFATLHVHGMIYRERGWLTAGGKAIKNAPEILALLTAVWLPKRVAVMHCKGHQKDDAPTSTGNRRADEVAREVAIRPLSTQATISAGKRTADGSEFEKRTADGSEFESPKKKAKVE

SEQ ID NO: 1432 - protein, 2096 aa, synthetic construct
MPAAKRVKLDGGDKKYSIGLDIGTNSVGWAVITDEYKVPSKKFKVLGNTDRHSIKKNLIGALLFDSGETAEATRLKRTARRRYTRRKNRICYLQEIFSNEMAKVDDSFFHRLEESFLVEEDKKHERHPIFGNIVDEVAYHEKYPTIYHLRKKLVDSTDKADLRLIYLALAHMIKFRGHFLIEGDLNPDNSDVDKLFIQLVQTYNQLFEENPINASGVDAKAILSARLSKSRRLENLIAQLPGEKKNGLFGNLIALSLGLTPNFKSNFDLAEDAKLQLSKDTYDDDLDNLLAQIGDQYADLFLAAKNLSDAILLSDILRVNTEITKAPLSASMIKRYDEHHQDLTLLKALVRQQLPEKYKEIFFDQSKNGYAGYIDGGASQEEFYKFIKPILEKMDGTEELLVKLNREDLLRKQRTFDNGSIPHQIHLGELHAILRRQEDFYPFLKDNREKIEKILTFRIPYYVGPLARGNSRFAWMTRKSEETITPWNFEEVVDKGASAQSFIERMTNFDKNLPNEKVLPKHSLLYEYFTVYNELTKVKYVTEGMRKPAFLSGEQKKAIVDLLFKTNRKVTVKQLKEDYFKKIECFDSVEISGVEDRFNASLGTYHDLLKIIKDKDFLDNEENEDILEDIVLTLTLFEDREMIEERLKTYAHLFDDKVMKQLKRRRYTGWGRLSRKLINGIRDKQSGKTILDFLKSDGFANRNFMQLIHDDSLTFKEDIQKAQVSGQGDSLHEHIANLAGSPAIKKGILQTVKVVDELVKVMGRHKPENIVIEMARENQTTQKGQKNSRERMKRIEEGIKELGSQILKEHPVENTQLQNEKLYLYYLQNGRDMYVDQELDINRLSDYDVDHIVPQSFLKDDSIDNKVLTRSDKARGKSDNVPSEEVVKKMKNYWRQLLNAKLITQRKFDNLTKAERGGLSELDKAGFIKRQLVETRQITKHVAQILDSRMNTKYDENDKLIREVKVITLKSKLVSDFRKDFQFYKVREINNYHHAHDAYLNAVVGTALIKKYPKLESEFVYGDYKVYDVRKMIAKSEQEIGKATAKYFFYSNIMNFFKTEITLANGEIRKRPLIETNGETGEIVWDKGRDFATVRKVLSMPQVNIVKKTEVQTGGFSKESILPKRNSDKLIARKKDWDPKKYGGFDSPTVAYSVLVVAKVEKGKSKKLKSVKELLGITIMERSSFEKNPIDFLEAKGYKEVKKDLIIKLPKYSLFELENGRKRMLASAGELQKGNELALPSKYVNFLYLASHYEKLKGSPEDNEQKQLFVEQHKHYLDEIIEQISEFSKRVILADANLDKVLSAYNKHRDKPIREQAENIIHLFTLTNLGAPAAFKYFDTTIDRKRYTSTKEVLDATLIHQSITGLYETRIDLSQLGGDGGGGGGGSPAPGGTAPLEEEYRLFLEAPIQNVTLLEQWKREIPKVWAEINPPGLASTQAPIHVQLLSTALPVRVRQYPITLEAKRSLRETIRKFRAAGILRPVHSPWNTPLLPVRKSGTSEYRMVQDLREVNKRVETIHPTVPNPYTLLSLLPPDRIWYSVLDLKDAFFCIPLAPESQLIFAFEWADAEEGESGQLTWTRLPQGFKNSPTLFNEALNRDLQGFRLDHPSVSLLQYVDDLLIAADTQAACLSATRDLLMTLAELGYRVSGKKAQLCQEEVTYLGFKIHKGSRSLSNSRTQAILQIPVPKTKRQVREFLGKIGYCRLFIPGFAELAQPLYAATRPGNDPLVWGEKEEEAFQSLKLALTQPPALALPSLDKPFQLFVEETSGAAKGVLTQALGPWKRPVAYLSKRLDPVAAGWPRCLRAIAAAALLTREASKLTFGQDIEITSSHNLESLLRSPPDKWLTNARITQYQVLLLDPPRVRFKQTAALNPATLLPETDDTLPIHHCLDTLDSLTSTRPDLTDQPLAQAEATLFTDGSSYIRDGKRYAGAAVVTLDSVIWAEPLPIGTSAQKAELIALTKALEWSKDKSVNIYTDSRYAFATLHVHGMIYRERGWLTAGGKAIKNAPEILALLTAVWLPKRVAVMHCKGHQKDDAPTSTGNRRADEVAREVAIRPLSTQATISAGKRTADGSEFEKRTADGSEFESPKKKAKVE

SEQ ID NO: 1433 - protein, 2098 aa, synthetic construct
MPAAKRVKLDGGDKKYSIGLDIGTNSVGWAVITDEYKVPSKKFKVLGNTDRHSIKKNLIGALLFDSGETAEATRLKRTARRRYTRRKNRICYLQEIFSNEMAKVDDSFFHRLEESFLVEEDKKHERHPIFGNIVDEVAYHEKYPTIYHLRKKLVDSTDKADLRLIYLALAHMIKFRGHFLIEGDLNPDNSDVDKLFIQLVQTYNQLFEENPINASGVDAKAILSARLSKSRRLENLIAQLPGEKKNGLFGNLIALSLGLTPNFKSNFDLAEDAKLQLSKDTYDDDLDNLLAQIGDQYADLFLAAKNLSDAILLSDILRVNTEITKAPLSASMIKRYDEHHQDLTLLKALVRQQLPEKYKEIFFDQSKNGYAGYIDGGASQEEFYKFIKPILEKMDGTEELLVKLNREDLLRKQRTFDNGSIPHQIHLGELHAILRRQEDFYPFLKDNREKIEKILTFRIPYYVGPLARGNSRFAWMTRKSEETITPWNFEEVVDKGASAQSFIERMTNFDKNLPNEKVLPKHSLLYEYFTVYNELTKVKYVTEGMRKPAFLSGEQKKAIVDLLFKTNRKVTVKQLKEDYFKKIECFDSVEISGVEDRFNASLGTYHDLLKIIKDKDFLDNEENEDILEDIVLTLTLFEDREMIEERLKTYAHLFDDKVMKQLKRRRYTGWGRLSRKLINGIRDKQSGKTILDFLKSDGFANRNFMQLIHDDSLTFKEDIQKAQVSGQGDSLHEHIANLAGSPAIKKGILQTVKVVDELVKVMGRHKPENIVIEMARENQTTQKGQKNSRERMKRIEEGIKELGSQILKEHPVENTQLQNEKLYLYYLQNGRDMYVDQELDINRLSDYDVDHIVPQSFLKDDSIDNKVLTRSDKARGKSDNVPSEEVVKKMKNYWRQLLNAKLITQRKFDNLTKAERGGLSELDKAGFIKRQLVETRQITKHVAQILDSRMNTKYDENDKLIREVKVITLKSKLVSDFRKDFQFYKVREINNYHHAHDAYLNAVVGTALIKKYPKLESEFVYGDYKVYDVRKMIAKSEQEIGKATAKYFFYSNIMNFFKTEITLANGEIRKRPLIETNGETGEIVWDKGRDFATVRKVLSMPQVNIVKKTEVQTGGFSKESILPKRNSDKLIARKKDWDPKKYGGFDSPTVAYSVLVVAKVEKGKSKKLKSVKELLGITIMERSSFEKNPIDFLEAKGYKEVKKDLIIKLPKYSLFELENGRKRMLASAGELQKGNELALPSKYVNFLYLASHYEKLKGSPEDNEQKQLFVEQHKHYLDEIIEQISEFSKRVILADANLDKVLSAYNKHRDKPIREQAENIIHLFTLTNLGAPAAFKYFDTTIDRKRYTSTKEVLDATLIHQSITGLYETRIDLSQLGGDGGGGSEAAAKPAPGGTAPLEEEYRLFLEAPIQNVTLLEQWKREIPKVWAEINPPGLASTQAPIHVQLLSTALPVRVRQYPITLEAKRSLRETIRKFRAAGILRPVHSPWNTPLLPVRKSGTSEYRMVQDLREVNKRVETIHPTVPNPYTLLSLLPPDRIWYSVLDLKDAFFCIPLAPESQLIFAFEWADAEEGESGQLTWTRLPQGFKNSPTLFNEALNRDLQGFRLDHPSVSLLQYVDDLLIAADTQAACLSATRDLLMTLAELGYRVSGKKAQLCQEEVTYLGFKIHKGSRSLSNSRTQAILQIPVPKTKRQVREFLGKIGYCRLFIPGFAELAQPLYAATRPGNDPLVWGEKEEEAFQSLKLALTQPPALALPSLDKPFQLFVEETSGAAKGVLTQALGPWKRPVAYLSKRLDPVAAGWPRCLRAIAAAALLTREASKLTFGQDIEITSSHNLESLLRSPPDKWLTNARITQYQVLLLDPPRVRFKQTAALNPATLLPETDDTLPIHHCLDTLDSLTSTRPDLTDQPLAQAEATLFTDGSSYIRDGKRYAGAAVVTLDSVIWAEPLPIGTSAQKAELIALTKALEWSKDKSVNIYTDSRYAFATLHVHGMIYRERGWLTAGGKAIKNAPEILALLTAVWLPKRVAVMHCKGHQKDDAPTSTGNRRADEVAREVAIRPLSTQATISAGKRTADGSEFEKRTADGSEFESPKKKAKVE

SEQ ID NO: 1434 - protein, 2093 aa, synthetic construct
MPAAKRVKLDGGDKKYSIGLDIGTNSVGWAVITDEYKVPSKKFKVLGNTDRHSIKKNLIGALLFDSGETAEATRLKRTARRRYTRRKNRICYLQEIFSNEMAKVDDSFFHRLEESFLVEEDKKHERHPIFGNIVDEVAYHEKYPTIYHLRKKLVDSTDKADLRLIYLALAHMIKFRGHFLIEGDLNPDNSDVDKLFIQLVQTYNQLFEENPINASGVDAKAILSARLSKSRRLENLIAQLPGEKKNGLFGNLIALSLGLTPNFKSNFDLAEDAKLQLSKDTYDDDLDNLLAQIGDQYADLFLAAKNLSDAILLSDILRVNTEITKAPLSASMIKRYDEHHQDLTLLKALVRQQLPEKYKEIFFDQSKNGYAGYIDGGASQEEFYKFIKPILEKMDGTEELLVKLNREDLLRKQRTFDNGSIPHQIHLGELHAILRRQEDFYPFLKDNREKIEKILTFRIPYYVGPLARGNSRFAWMTRKSEETITPWNFEEVVDKGASAQSFIERMTNFDKNLPNEKVLPKHSLLYEYFTVYNELTKVKYVTEGMRKPAFLSGEQKKAIVDLLFKTNRKVTVKQLKEDYFKKIECFDSVEISGVEDRFNASLGTYHDLLKIIKDKDFLDNEENEDILEDIVLTLTLFEDREMIEERLKTYAHLFDDKVMKQLKRRRYTGWGRLSRKLINGIRDKQSGKTILDFLKSDGFANRNFMQLIHDDSLTFKEDIQKAQVSGQGDSLHEHIANLAGSPAIKKGILQTVKVVDELVKVMGRHKPENIVIEMARENQTTQKGQKNSRERMKRIEEGIKELGSQILKEHPVENTQLQNEKLYLYYLQNGRDMYVDQELDINRLSDYDVDHIVPQSFLKDDSIDNKVLTRSDKARGKSDNVPSEEVVKKMKNYWRQLLNAKLITQRKFDNLTKAERGGLSELDKAGFIKRQLVETRQITKHVAQILDSRMNTKYDENDKLIREVKVITLKSKLVSDFRKDFQFYKVREINNYHHAHDAYLNAVVGTALIKKYPKLESEFVYGDYKVYDVRKMIAKSEQEIGKATAKYFFYSNIMNFFKTEITLANGEIRKRPLIETNGETGEIVWDKGRDFATVRKVLSMPQVNIVKKTEVQTGGFSKESILPKRNSDKLIARKKDWDPKKYGGFDSPTVAYSVLVVAKVEKGKSKKLKSVKELLGITIMERSSFEKNPIDFLEAKGYKEVKKDLIIKLPKYSLFELENGRKRMLASAGELQKGNELALPSKYVNFLYLASHYEKLKGSPEDNEQKQLFVEQHKHYLDEIIEQISEFSKRVILADANLDKVLSAYNKHRDKPIREQAENIIHLFTLTNLGAPAAFKYFDTTIDRKRYTSTKEVLDATLIHQSITGLYETRIDLSQLGGDGGGGSGGSGGTAPLEEEYRLFLEAPIQNVTLLEQWKREIPKVWAEINPPGLASTQAPIHVQLLSTALPVRVRQYPITLEAKRSLRETIRKFRAAGILRPVHSPWNTPLLPVRKSGTSEYRMVQDLREVNKRVETIHPTVPNPYTLLSLLPPDRIWYSVLDLKDAFFCIPLAPESQLIFAFEWADAEEGESGQLTWTRLPQGFKNSPTLFNEALNRDLQGFRLDHPSVSLLQYVDDLLIAADTQAACLSATRDLLMTLAELGYRVSGKKAQLCQEEVTYLGFKIHKGSRSLSNSRTQAILQIPVPKTKRQVREFLGKIGYCRLFIPGFAELAQPLYAATRPGNDPLVWGEKEEEAFQSLKLALTQPPALALPSLDKPFQLFVEETSGAAKGVLTQALGPWKRPVAYLSKRLDPVAAGWPRCLRAIAAAALLTREASKLTFGQDIEITSSHNLESLLRSPPDKWLTNARITQYQVLLLDPPRVRFKQTAALNPATLLPETDDTLPIHHCLDTLDSLTSTRPDLTDQPLAQAEATLFTDGSSYIRDGKRYAGAAVVTLDSVIWAEPLPIGTSAQKAELIALTKALEWSKDKSVNIYTDSRYAFATLHVHGMIYRERGWLTAGGKAIKNAPEILALLTAVWLPKRVAVMHCKGHQKDDAPTSTGNRRADEVAREVAIRPLSTQATISAGKRTADGSEFEKRTADGSEFESPKKKAKVE

SEQ ID NO: 1435 - protein, 2091 aa, synthetic construct
MPAAKRVKLDGGDKKYSIGLDIGTNSVGWAVITDEYKVPSKKFKVLGNTDRHSIKKNLIGALLFDSGETAEATRLKRTARRRYTRRKNRICYLQEIFSNEMAKVDDSFFHRLEESFLVEEDKKHERHPIFGNIVDEVAYHEKYPTIYHLRKKLVDSTDKADLRLIYLALAHMIKFRGHFLIEGDLNPDNSDVDKLFIQLVQTYNQLFEENPINASGVDAKAILSARLSKSRRLENLIAQLPGEKKNGLFGNLIALSLGLTPNFKSNFDLAEDAKLQLSKDTYDDDLDNLLAQIGDQYADLFLAAKNLSDAILLSDILRVNTEITKAPLSASMIKRYDEHHQDLTLLKALVRQQLPEKYKEIFFDQSKNGYAGYIDGGASQEEFYKFIKPILEKMDGTEELLVKLNREDLLRKQRTFDNGSIPHQIHLGELHAILRRQEDFYPFLKDNREKIEKILTFRIPYYVGPLARGNSRFAWMTRKSEETITPWNFEEVVDKGASAQSFIERMTNFDKNLPNEKVLPKHSLLYEYFTVYNELTKVKYVTEGMRKPAFLSGEQKKAIVDLLFKTNRKVTVKQLKEDYFKKIECFDSVEISGVEDRFNASLGTYHDLLKIIKDKDFLDNEENEDILEDIVLTLTLFEDREMIEERLKTYAHLFDDKVMKQLKRRRYTGWGRLSRKLINGIRDKQSGKTILDFLKSDGFANRNFMQLIHDDSLTFKEDIQKAQVSGQGDSLHEHIANLAGSPAIKKGILQTVKVVDELVKVMGRHKPENIVIEMARENQTTQKGQKNSRERMKRIEEGIKELGSQILKEHPVENTQLQNEKLYLYYLQNGRDMYVDQELDINRLSDYDVDHIVPQSFLKDDSIDNKVLTRSDKARGKSDNVPSEEVVKKMKNYWRQLLNAKLITQRKFDNLTKAERGGLSELDKAGFIKRQLVETRQITKHVAQILDSRMNTKYDENDKLIREVKVITLKSKLVSDFRKDFQFYKVREINNYHHAHDAYLNAVVGTALIKKYPKLESEFVYGDYKVYDVRKMIAKSEQEIGKATAKYFFYSNIMNFFKTEITLANGEIRKRPLIETNGETGEIVWDKGRDFATVRKVLSMPQVNIVKKTEVQTGGFSKESILPKRNSDKLIARKKDWDPKKYGGFDSPTVAYSVLVVAKVEKGKSKKLKSVKELLGITIMERSSFEKNPIDFLEAKGYKEVKKDLIIKLPKYSLFELENGRKRMLASAGELQKGNELALPSKYVNFLYLASHYEKLKGSPEDNEQKQLFVEQHKHYLDEIIEQISEFSKRVILADANLDKVLSAYNKHRDKPIREQAENIIHLFTLTNLGAPAAFKYFDTTIDRKRYTSTKEVLDATLIHQSITGLYETRIDLSQLGGDGGGGGGGGTAPLEEEYRLFLEAPIQNVTLLEQWKREIPKVWAEINPPGLASTQAPIHVQLLSTALPVRVRQYPITLEAKRSLRETIRKFRAAGILRPVHSPWNTPLLPVRKSGTSEYRMVQDLREVNKRVETIHPTVPNPYTLLSLLPPDRIWYSVLDLKDAFFCIPLAPESQLIFAFEWADAEEGESGQLTWTRLPQGFKNSPTLFNEALNRDLQGFRLDHPSVSLLQYVDDLLIAADTQAACLSATRDLLMTLAELGYRVSGKKAQLCQEEVTYLGFKIHKGSRSLSNSRTQAILQIPVPKTKRQVREFLGKIGYCRLFIPGFAELAQPLYAATRPGNDPLVWGEKEEEAFQSLKLALTQPPALALPSLDKPFQLFVEETSGAAKGVLTQALGPWKRPVAYLSKRLDPVAAGWPRCLRAIAAAALLTREASKLTFGQDIEITSSHNLESLLRSPPDKWLTNARITQYQVLLLDPPRVRFKQTAALNPATLLPETDDTLPIHHCLDTLDSLTSTRPDLTDQPLAQAEATLFTDGSSYIRDGKRYAGAAVVTLDSVIWAEPLPIGTSAQKAELIALTKALEWSKDKSVNIYTDSRYAFATLHVHGMIYRERGWLTAGGKAIKNAPEILALLTAVWLPKRVAVMHCKGHQKDDAPTSTGNRRADEVAREVAIRPLSTQATISAGKRTADGSEFEKRTADGSEFESPKKKAKVE

SEQ ID NO: 1436 - protein, 2096 aa, synthetic construct
MPAAKRVKLDGGDKKYSIGLDIGTNSVGWAVITDEYKVPSKKFKVLGNTDRHSIKKNLIGALLFDSGETAEATRLKRTARRRYTRRKNRICYLQEIFSNEMAKVDDSFFHRLEESFLVEEDKKHERHPIFGNIVDEVAYHEKYPTIYHLRKKLVDSTDKADLRLIYLALAHMIKFRGHFLIEGDLNPDNSDVDKLFIQLVQTYNQLFEENPINASGVDAKAILSARLSKSRRLENLIAQLPGEKKNGLFGNLIALSLGLTPNFKSNFDLAEDAKLQLSKDTYDDDLDNLLAQIGDQYADLFLAAKNLSDAILLSDILRVNTEITKAPLSASMIKRYDEHHQDLTLLKALVRQQLPEKYKEIFFDQSKNGYAGYIDGGASQEEFYKFIKPILEKMDGTEELLVKLNREDLLRKQRTFDNGSIPHQIHLGELHAILRRQEDFYPFLKDNREKIEKILTFRIPYYVGPLARGNSRFAWMTRKSEETITPWNFEEVVDKGASAQSFIERMTNFDKNLPNEKVLPKHSLLYEYFTVYNELTKVKYVTEGMRKPAFLSGEQKKAIVDLLFKTNRKVTVKQLKEDYFKKIECFDSVEISGVEDRFNASLGTYHDLLKIIKDKDFLDNEENEDILEDIVLTLTLFEDREMIEERLKTYAHLFDDKVMKQLKRRRYTGWGRLSRKLINGIRDKQSGKTILDFLKSDGFANRNFMQLIHDDSLTFKEDIQKAQVSGQGDSLHEHIANLAGSPAIKKGILQTVKVVDELVKVMGRHKPENIVIEMARENQTTQKGQKNSRERMKRIEEGIKELGSQILKEHPVENTQLQNEKLYLYYLQNGRDMYVDQELDINRLSDYDVDHIVPQSFLKDDSIDNKVLTRSDKARGKSDNVPSEEVVKKMKNYWRQLLNAKLITQRKFDNLTKAERGGLSELDKAGFIKRQLVETRQITKHVAQILDSRMNTKYDENDKLIREVKVITLKSKLVSDFRKDFQFYKVREINNYHHAHDAYLNAVVGTALIKKYPKLESEFVYGDYKVYDVRKMIAKSEQEIGKATAKYFFYSNIMNFFKTEITLANGEIRKRPLIETNGETGEIVWDKGRDFATVRKVLSMPQVNIVKKTEVQTGGFSKESILPKRNSDKLIARKKDWDPKKYGGFDSPTVAYSVLVVAKVEKGKSKKLKSVKELLGITIMERSSFEKNPIDFLEAKGYKEVKKDLIIKLPKYSLFELENGRKRMLASAGELQKGNELALPSKYVNFLYLASHYEKLKGSPEDNEQKQLFVEQHKHYLDEIIEQISEFSKRVILADANLDKVLSAYNKHRDKPIREQAENIIHLFTLTNLGAPAAFKYFDTTIDRKRYTSTKEVLDATLIHQSITGLYETRIDLSQLGGDGGPAPGGGGGSGGTAPLEEEYRLFLEAPIQNVTLLEQWKREIPKVWAEINPPGLASTQAPIHVQLLSTALPVRVRQYPITLEAKRSLRETIRKFRAAGILRPVHSPWNTPLLPVRKSGTSEYRMVQDLREVNKRVETIHPTVPNPYTLLSLLPPDRIWYSVLDLKDAFFCIPLAPESQLIFAFEWADAEEGESGQLTWTRLPQGFKNSPTLFNEALNRDLQGFRLDHPSVSLLQYVDDLLIAADTQAACLSATRDLLMTLAELGYRVSGKKAQLCQEEVTYLGFKIHKGSRSLSNSRTQAILQIPVPKTKRQVREFLGKIGYCRLFIPGFAELAQPLYAATRPGNDPLVWGEKEEEAFQSLKLALTQPPALALPSLDKPFQLFVEETSGAAKGVLTQALGPWKRPVAYLSKRLDPVAAGWPRCLRAIAAAALLTREASKLTFGQDIEITSSHNLESLLRSPPDKWLTNARITQYQVLLLDPPRVRFKQTAALNPATLLPETDDTLPIHHCLDTLDSLTSTRPDLTDQPLAQAEATLFTDGSSYIRDGKRYAGAAVVTLDSVIWAEPLPIGTSAQKAELIALTKALEWSKDKSVNIYTDSRYAFATLHVHGMIYRERGWLTAGGKAIKNAPEILALLTAVWLPKRVAVMHCKGHQKDDAPTSTGNRRADEVAREVAIRPLSTQATISAGKRTADGSEFEKRTADGSEFESPKKKAKVE

SEQ ID NO: 1437 - protein, 2096 aa, synthetic construct
MPAAKRVKLDGGDKKYSIGLDIGTNSVGWAVITDEYKVPSKKFKVLGNTDRHSIKKNLIGALLFDSGETAEATRLKRTARRRYTRRKNRICYLQEIFSNEMAKVDDSFFHRLEESFLVEEDKKHERHPIFGNIVDEVAYHEKYPTIYHLRKKLVDSTDKADLRLIYLALAHMIKFRGHFLIEGDLNPDNSDVDKLFIQLVQTYNQLFEENPINASGVDAKAILSARLSKSRRLENLIAQLPGEKKNGLFGNLIALSLGLTPNFKSNFDLAEDAKLQLSKDTYDDDLDNLLAQIGDQYADLFLAAKNLSDAILLSDILRVNTEITKAPLSASMIKRYDEHHQDLTLLKALVRQQLPEKYKEIFFDQSKNGYAGYIDGGASQEEFYKFIKPILEKMDGTEELLVKLNREDLLRKQRTFDNGSIPHQIHLGELHAILRRQEDFYPFLKDNREKIEKILTFRIPYYVGPLARGNSRFAWMTRKSEETITPWNFEEVVDKGASAQSFIERMTNFDKNLPNEKVLPKHSLLYEYFTVYNELTKVKYVTEGMRKPAFLSGEQKKAIVDLLFKTNRKVTVKQLKEDYFKKIECFDSVEISGVEDRFNASLGTYHDLLKIIKDKDFLDNEENEDILEDIVLTLTLFEDREMIEERLKTYAHLFDDKVMKQLKRRRYTGWGRLSRKLINGIRDKQSGKTILDFLKSDGFANRNFMQLIHDDSLTFKEDIQKAQVSGQGDSLHEHIANLAGSPAIKKGILQTVKVVDELVKVMGRHKPENIVIEMARENQTTQKGQKNSRERMKRIEEGIKELGSQILKEHPVENTQLQNEKLYLYYLQNGRDMYVDQELDINRLSDYDVDHIVPQSFLKDDSIDNKVLTRSDKARGKSDNVPSEEVVKKMKNYWRQLLNAKLITQRKFDNLTKAERGGLSELDKAGFIKRQLVETRQITKHVAQILDSRMNTKYDENDKLIREVKVITLKSKLVSDFRKDFQFYKVREINNYHHAHDAYLNAVVGTALIKKYPKLESEFVYGDYKVYDVRKMIAKSEQEIGKATAKYFFYSNIMNFFKTEITLANGEIRKRPLIETNGETGEIVWDKGRDFATVRKVLSMPQVNIVKKTEVQTGGFSKESILPKRNSDKLIARKKDWDPKKYGGFDSPTVAYSVLVVAKVEKGKSKKLKSVKELLGITIMERSSFEKNPIDFLEAKGYKEVKKDLIIKLPKYSLFELENGRKRMLASAGELQKGNELALPSKYVNFLYLASHYEKLKGSPEDNEQKQLFVEQHKHYLDEIIEQISEFSKRVILADANLDKVLSAYNKHRDKPIREQAENIIHLFTLTNLGAPAAFKYFDTTIDRKRYTSTKEVLDATLIHQSITGLYETRIDLSQLGGDGGGSSGGSGGGGGTAPLEEEYRLFLEAPIQNVTLLEQWKREIPKVWAEINPPGLASTQAPIHVQLLSTALPVRVRQYPITLEAKRSLRETIRKFRAAGILRPVHSPWNTPLLPVRKSGTSEYRMVQDLREVNKRVETIHPTVPNPYTLLSLLPPDRIWYSVLDLKDAFFCIPLAPESQLIFAFEWADAEEGESGQLTWTRLPQGFKNSPTLFNEALNRDLQGFRLDHPSVSLLQYVDDLLIAADTQAACLSATRDLLMTLAELGYRVSGKKAQLCQEEVTYLGFKIHKGSRSLSNSRTQAILQIPVPKTKRQVREFLGKIGYCRLFIPGFAELAQPLYAATRPGNDPLVWGEKEEEAFQSLKLALTQPPALALPSLDKPFQLFVEETSGAAKGVLTQALGPWKRPVAYLSKRLDPVAAGWPRCLRAIAAAALLTREASKLTFGQDIEITSSHNLESLLRSPPDKWLTNARITQYQVLLLDPPRVRFKQTAALNPATLLPETDDTLPIHHCLDTLDSLTSTRPDLTDQPLAQAEATLFTDGSSYIRDGKRYAGAAVVTLDSVIWAEPLPIGTSAQKAELIALTKALEWSKDKSVNIYTDSRYAFATLHVHGMIYRERGWLTAGGKAIKNAPEILALLTAVWLPKRVAVMHCKGHQKDDAPTSTGNRRADEVAREVAIRPLSTQATISAGKRTADGSEFEKRTADGSEFESPKKKAKVE

SEQ ID NO: 1438 - protein, 2092 aa, synthetic construct
MPAAKRVKLDGGDKKYSIGLDIGTNSVGWAVITDEYKVPSKKFKVLGNTDRHSIKKNLIGALLFDSGETAEATRLKRTARRRYTRRKNRICYLQEIFSNEMAKVDDSFFHRLEESFLVEEDKKHERHPIFGNIVDEVAYHEKYPTIYHLRKKLVDSTDKADLRLIYLALAHMIKFRGHFLIEGDLNPDNSDVDKLFIQLVQTYNQLFEENPINASGVDAKAILSARLSKSRRLENLIAQLPGEKKNGLFGNLIALSLGLTPNFKSNFDLAEDAKLQLSKDTYDDDLDNLLAQIGDQYADLFLAAKNLSDAILLSDILRVNTEITKAPLSASMIKRYDEHHQDLTLLKALVRQQLPEKYKEIFFDQSKNGYAGYIDGGASQEEFYKFIKPILEKMDGTEELLVKLNREDLLRKQRTFDNGSIPHQIHLGELHAILRRQEDFYPFLKDNREKIEKILTFRIPYYVGPLARGNSRFAWMTRKSEETITPWNFEEVVDKGASAQSFIERMTNFDKNLPNEKVLPKHSLLYEYFTVYNELTKVKYVTEGMRKPAFLSGEQKKAIVDLLFKTNRKVTVKQLKEDYFKKIECFDSVEISGVEDRFNASLGTYHDLLKIIKDKDFLDNEENEDILEDIVLTLTLFEDREMIEERLKTYAHLFDDKVMKQLKRRRYTGWGRLSRKLINGIRDKQSGKTILDFLKSDGFANRNFMQLIHDDSLTFKEDIQKAQVSGQGDSLHEHIANLAGSPAIKKGILQTVKVVDELVKVMGRHKPENIVIEMARENQTTQKGQKNSRERMKRIEEGIKELGSQILKEHPVENTQLQNEKLYLYYLQNGRDMYVDQELDINRLSDYDVDHIVPQSFLKDDSIDNKVLTRSDKARGKSDNVPSEEVVKKMKNYWRQLLNAKLITQRKFDNLTKAERGGLSELDKAGFIKRQLVETRQITKHVAQILDSRMNTKYDENDKLIREVKVITLKSKLVSDFRKDFQFYKVREINNYHHAHDAYLNAVVGTALIKKYPKLESEFVYGDYKVYDVRKMIAKSEQEIGKATAKYFFYSNIMNFFKTEITLANGEIRKRPLIETNGETGEIVWDKGRDFATVRKVLSMPQVNIVKKTEVQTGGFSKESILPKRNSDKLIARKKDWDPKKYGGFDSPTVAYSVLVVAKVEKGKSKKLKSVKELLGITIMERSSFEKNPIDFLEAKGYKEVKKDLIIKLPKYSLFELENGRKRMLASAGELQKGNELALPSKYVNFLYLASHYEKLKGSPEDNEQKQLFVEQHKHYLDEIIEQISEFSKRVILADANLDKVLSAYNKHRDKPIREQAENIIHLFTLTNLGAPAAFKYFDTTIDRKRYTSTKEVLDATLIHQSITGLYETRIDLSQLGGDGGGGGGGGGTAPLEEEYRLFLEAPIQNVTLLEQWKREIPKVWAEINPPGLASTQAPIHVQLLSTALPVRVRQYPITLEAKRSLRETIRKFRAAGILRPVHSPWNTPLLPVRKSGTSEYRMVQDLREVNKRVETIHPTVPNPYTLLSLLPPDRIWYSVLDLKDAFFCIPLAPESQLIFAFEWADAEEGESGQLTWTRLPQGFKNSPTLFNEALNRDLQGFRLDHPSVSLLQYVDDLLIAADTQAACLSATRDLLMTLAELGYRVSGKKAQLCQEEVTYLGFKIHKGSRSLSNSRTQAILQIPVPKTKRQVREFLGKIGYCRLFIPGFAELAQPLYAATRPGNDPLVWGEKEEEAFQSLKLALTQPPALALPSLDKPFQLFVEETSGAAKGVLTQALGPWKRPVAYLSKRLDPVAAGWPRCLRAIAAAALLTREASKLTFGQDIEITSSHNLESLLRSPPDKWLTNARITQYQVLLLDPPRVRFKQTAALNPATLLPETDDTLPIHHCLDTLDSLTSTRPDLTDQPLAQAEATLFTDGSSYIRDGKRYAGAAVVTLDSVIWAEPLPIGTSAQKAELIALTKALEWSKDKSVNIYTDSRYAFATLHVHGMIYRERGWLTAGGKAIKNAPEILALLTAVWLPKRVAVMHCKGHQKDDAPTSTGNRRADEVAREVAIRPLSTQATISAGKRTADGSEFEKRTADGSEFESPKKKAKVE

SEQ ID NO: 1439 - protein, 2098 aa, synthetic construct
MPAAKRVKLDGGDKKYSIGLDIGTNSVGWAVITDEYKVPSKKFKVLGNTDRHSIKKNLIGALLFDSGETAEATRLKRTARRRYTRRKNRICYLQEIFSNEMAKVDDSFFHRLEESFLVEEDKKHERHPIFGNIVDEVAYHEKYPTIYHLRKKLVDSTDKADLRLIYLALAHMIKFRGHFLIEGDLNPDNSDVDKLFIQLVQTYNQLFEENPINASGVDAKAILSARLSKSRRLENLIAQLPGEKKNGLFGNLIALSLGLTPNFKSNFDLAEDAKLQLSKDTYDDDLDNLLAQIGDQYADLFLAAKNLSDAILLSDILRVNTEITKAPLSASMIKRYDEHHQDLTLLKALVRQQLPEKYKEIFFDQSKNGYAGYIDGGASQEEFYKFIKPILEKMDGTEELLVKLNREDLLRKQRTFDNGSIPHQIHLGELHAILRRQEDFYPFLKDNREKIEKILTFRIPYYVGPLARGNSRFAWMTRKSEETITPWNFEEVVDKGASAQSFIERMTNFDKNLPNEKVLPKHSLLYEYFTVYNELTKVKYVTEGMRKPAFLSGEQKKAIVDLLFKTNRKVTVKQLKEDYFKKIECFDSVEISGVEDRFNASLGTYHDLLKIIKDKDFLDNEENEDILEDIVLTLTLFEDREMIEERLKTYAHLFDDKVMKQLKRRRYTGWGRLSRKLINGIRDKQSGKTILDFLKSDGFANRNFMQLIHDDSLTFKEDIQKAQVSGQGDSLHEHIANLAGSPAIKKGILQTVKVVDELVKVMGRHKPENIVIEMARENQTTQKGQKNSRERMKRIEEGIKELGSQILKEHPVENTQLQNEKLYLYYLQNGRDMYVDQELDINRLSDYDVDHIVPQSFLKDDSIDNKVLTRSDKARGKSDNVPSEEVVKKMKNYWRQLLNAKLITQRKFDNLTKAERGGLSELDKAGFIKRQLVETRQITKHVAQILDSRMNTKYDENDKLIREVKVITLKSKLVSDFRKDFQFYKVREINNYHHAHDAYLNAVVGTALIKKYPKLESEFVYGDYKVYDVRKMIAKSEQEIGKATAKYFFYSNIMNFFKTEITLANGEIRKRPLIETNGETGEIVWDKGRDFATVRKVLSMPQVNIVKKTEVQTGGFSKESILPKRNSDKLIARKKDWDPKKYGGFDSPTVAYSVLVVAKVEKGKSKKLKSVKELLGITIMERSSFEKNPIDFLEAKGYKEVKKDLIIKLPKYSLFELENGRKRMLASAGELQKGNELALPSKYVNFLYLASHYEKLKGSPEDNEQKQLFVEQHKHYLDEIIEQISEFSKRVILADANLDKVLSAYNKHRDKPIREQAENIIHLFTLTNLGAPAAFKYFDTTIDRKRYTSTKEVLDATLIHQSITGLYETRIDLSQLGGDGGEAAAKPAPGGSGGTAPLEEEYRLFLEAPIQNVTLLEQWKREIPKVWAEINPPGLASTQAPIHVQLLSTALPVRVRQYPITLEAKRSLRETIRKFRAAGILRPVHSPWNTPLLPVRKSGTSEYRMVQDLREVNKRVETIHPTVPNPYTLLSLLPPDRIWYSVLDLKDAFFCIPLAPESQLIFAFEWADAEEGESGQLTWTRLPQGFKNSPTLFNEALNRDLQGFRLDHPSVSLLQYVDDLLIAADTQAACLSATRDLLMTLAELGYRVSGKKAQLCQEEVTYLGFKIHKGSRSLSNSRTQAILQIPVPKTKRQVREFLGKIGYCRLFIPGFAELAQPLYAATRPGNDPLVWGEKEEEAFQSLKLALTQPPALALPSLDKPFQLFVEETSGAAKGVLTQALGPWKRPVAYLSKRLDPVAAGWPRCLRAIAAAALLTREASKLTFGQDIEITSSHNLESLLRSPPDKWLTNARITQYQVLLLDPPRVRFKQTAALNPATLLPETDDTLPIHHCLDTLDSLTSTRPDLTDQPLAQAEATLFTDGSSYIRDGKRYAGAAVVTLDSVIWAEPLPIGTSAQKAELIALTKALEWSKDKSVNIYTDSRYAFATLHVHGMIYRERGWLTAGGKAIKNAPEILALLTAVWLPKRVAVMHCKGHQKDDAPTSTGNRRADEVAREVAIRPLSTQATISAGKRTADGSEFEKRTADGSEFESPKKKAKVE

SEQ ID NO: 1440 - protein, 2094 aa, synthetic construct
MPAAKRVKLDGGDKKYSIGLDIGTNSVGWAVITDEYKVPSKKFKVLGNTDRHSIKKNLIGALLFDSGETAEATRLKRTARRRYTRRKNRICYLQEIFSNEMAKVDDSFFHRLEESFLVEEDKKHERHPIFGNIVDEVAYHEKYPTIYHLRKKLVDSTDKADLRLIYLALAHMIKFRGHFLIEGDLNPDNSDVDKLFIQLVQTYNQLFEENPINASGVDAKAILSARLSKSRRLENLIAQLPGEKKNGLFGNLIALSLGLTPNFKSNFDLAEDAKLQLSKDTYDDDLDNLLAQIGDQYADLFLAAKNLSDAILLSDILRVNTEITKAPLSASMIKRYDEHHQDLTLLKALVRQQLPEKYKEIFFDQSKNGYAGYIDGGASQEEFYKFIKPILEKMDGTEELLVKLNREDLLRKQRTFDNGSIPHQIHLGELHAILRRQEDFYPFLKDNREKIEKILTFRIPYYVGPLARGNSRFAWMTRKSEETITPWNFEEVVDKGASAQSFIERMTNFDKNLPNEKVLPKHSLLYEYFTVYNELTKVKYVTEGMRKPAFLSGEQKKAIVDLLFKTNRKVTVKQLKEDYFKKIECFDSVEISGVEDRFNASLGTYHDLLKIIKDKDFLDNEENEDILEDIVLTLTLFEDREMIEERLKTYAHLFDDKVMKQLKRRRYTGWGRLSRKLINGIRDKQSGKTILDFLKSDGFANRNFMQLIHDDSLTFKEDIQKAQVSGQGDSLHEHIANLAGSPAIKKGILQTVKVVDELVKVMGRHKPENIVIEMARENQTTQKGQKNSRERMKRIEEGIKELGSQILKEHPVENTQLQNEKLYLYYLQNGRDMYVDQELDINRLSDYDVDHIVPQSFLKDDSIDNKVLTRSDKARGKSDNVPSEEVVKKMKNYWRQLLNAKLITQRKFDNLTKAERGGLSELDKAGFIKRQLVETRQITKHVAQILDSRMNTKYDENDKLIREVKVITLKSKLVSDFRKDFQFYKVREINNYHHAHDAYLNAVVGTALIKKYPKLESEFVYGDYKVYDVRKMIAKSEQEIGKATAKYFFYSNIMNFFKTEITLANGEIRKRPLIETNGETGEIVWDKGRDFATVRKVLSMPQVNIVKKTEVQTGGFSKESILPKRNSDKLIARKKDWDPKKYGGFDSPTVAYSVLVVAKVEKGKSKKLKSVKELLGITIMERSSFEKNPIDFLEAKGYKEVKKDLIIKLPKYSLFELENGRKRMLASAGELQKGNELALPSKYVNFLYLASHYEKLKGSPEDNEQKQLFVEQHKHYLDEIIEQISEFSKRVILADANLDKVLSAYNKHRDKPIREQAENIIHLFTLTNLGAPAAFKYFDTTIDRKRYTSTKEVLDATLIHQSITGLYETRIDLSQLGGDGGPAPAPAPGGTAPLEEEYRLFLEAPIQNVTLLEQWKREIPKVWAEINPPGLASTQAPIHVQLLSTALPVRVRQYPITLEAKRSLRETIRKFRAAGILRPVHSPWNTPLLPVRKSGTSEYRMVQDLREVNKRVETIHPTVPNPYTLLSLLPPDRIWYSVLDLKDAFFCIPLAPESQLIFAFEWADAEEGESGQLTWTRLPQGFKNSPTLFNEALNRDLQGFRLDHPSVSLLQYVDDLLIAADTQAACLSATRDLLMTLAELGYRVSGKKAQLCQEEVTYLGFKIHKGSRSLSNSRTQAILQIPVPKTKRQVREFLGKIGYCRLFIPGFAELAQPLYAATRPGNDPLVWGEKEEEAFQSLKLALTQPPALALPSLDKPFQLFVEETSGAAKGVLTQALGPWKRPVAYLSKRLDPVAAGWPRCLRAIAAAALLTREASKLTFGQDIEITSSHNLESLLRSPPDKWLTNARITQYQVLLLDPPRVRFKQTAALNPATLLPETDDTLPIHHCLDTLDSLTSTRPDLTDQPLAQAEATLFTDGSSYIRDGKRYAGAAVVTLDSVIWAEPLPIGTSAQKAELIALTKALEWSKDKSVNIYTDSRYAFATLHVHGMIYRERGWLTAGGKAIKNAPEILALLTAVWLPKRVAVMHCKGHQKDDAPTSTGNRRADEVAREVAIRPLSTQATISAGKRTADGSEFEKRTADGSEFESPKKKAKVE

SEQ ID NO: 1441 - protein, 2098 aa, synthetic construct
MPAAKRVKLDGGDKKYSIGLDIGTNSVGWAVITDEYKVPSKKFKVLGNTDRHSIKKNLIGALLFDSGETAEATRLKRTARRRYTRRKNRICYLQEIFSNEMAKVDDSFFHRLEESFLVEEDKKHERHPIFGNIVDEVAYHEKYPTIYHLRKKLVDSTDKADLRLIYLALAHMIKFRGHFLIEGDLNPDNSDVDKLFIQLVQTYNQLFEENPINASGVDAKAILSARLSKSRRLENLIAQLPGEKKNGLFGNLIALSLGLTPNFKSNFDLAEDAKLQLSKDTYDDDLDNLLAQIGDQYADLFLAAKNLSDAILLSDILRVNTEITKAPLSASMIKRYDEHHQDLTLLKALVRQQLPEKYKEIFFDQSKNGYAGYIDGGASQEEFYKFIKPILEKMDGTEELLVKLNREDLLRKQRTFDNGSIPHQIHLGELHAILRRQEDFYPFLKDNREKIEKILTFRIPYYVGPLARGNSRFAWMTRKSEETITPWNFEEVVDKGASAQSFIERMTNFDKNLPNEKVLPKHSLLYEYFTVYNELTKVKYVTEGMRKPAFLSGEQKKAIVDLLFKTNRKVTVKQLKEDYFKKIECFDSVEISGVEDRFNASLGTYHDLLKIIKDKDFLDNEENEDILEDIVLTLTLFEDREMIEERLKTYAHLFDDKVMKQLKRRRYTGWGRLSRKLINGIRDKQSGKTILDFLKSDGFANRNFMQLIHDDSLTFKEDIQKAQVSGQGDSLHEHIANLAGSPAIKKGILQTVKVVDELVKVMGRHKPENIVIEMARENQTTQKGQKNSRERMKRIEEGIKELGSQILKEHPVENTQLQNEKLYLYYLQNGRDMYVDQELDINRLSDYDVDHIVPQSFLKDDSIDNKVLTRSDKARGKSDNVPSEEVVKKMKNYWRQLLNAKLITQRKFDNLTKAERGGLSELDKAGFIKRQLVETRQITKHVAQILDSRMNTKYDENDKLIREVKVITLKSKLVSDFRKDFQFYKVREINNYHHAHDAYLNAVVGTALIKKYPKLESEFVYGDYKVYDVRKMIAKSEQEIGKATAKYFFYSNIMNFFKTEITLANGEIRKRPLIETNGETGEIVWDKGRDFATVRKVLSMPQVNIVKKTEVQTGGFSKESILPKRNSDKLIARKKDWDPKKYGGFDSPTVAYSVLVVAKVEKGKSKKLKSVKELLGITIMERSSFEKNPIDFLEAKGYKEVKKDLIIKLPKYSLFELENGRKRMLASAGELQKGNELALPSKYVNFLYLASHYEKLKGSPEDNEQKQLFVEQHKHYLDEIIEQISEFSKRVILADANLDKVLSAYNKHRDKPIREQAENIIHLFTLTNLGAPAAFKYFDTTIDRKRYTSTKEVLDATLIHQSITGLYETRIDLSQLGGDGGEAAAKGGSGGGGGTAPLEEEYRLFLEAPIQNVTLLEQWKREIPKVWAEINPPGLASTQAPIHVQLLSTALPVRVRQYPITLEAKRSLRETIRKFRAAGILRPVHSPWNTPLLPVRKSGTSEYRMVQDLREVNKRVETIHPTVPNPYTLLSLLPPDRIWYSVLDLKDAFFCIPLAPESQLIFAFEWADAEEGESGQLTWTRLPQGFKNSPTLFNEALNRDLQGFRLDHPSVSLLQYVDDLLIAADTQAACLSATRDLLMTLAELGYRVSGKKAQLCQEEVTYLGFKIHKGSRSLSNSRTQAILQIPVPKTKRQVREFLGKIGYCRLFIPGFAELAQPLYAATRPGNDPLVWGEKEEEAFQSLKLALTQPPALALPSLDKPFQLFVEETSGAAKGVLTQALGPWKRPVAYLSKRLDPVAAGWPRCLRAIAAAALLTREASKLTFGQDIEITSSHNLESLLRSPPDKWLTNARITQYQVLLLDPPRVRFKQTAALNPATLLPETDDTLPIHHCLDTLDSLTSTRPDLTDQPLAQAEATLFTDGSSYIRDGKRYAGAAVVTLDSVIWAEPLPIGTSAQKAELIALTKALEWSKDKSVNIYTDSRYAFATLHVHGMIYRERGWLTAGGKAIKNAPEILALLTAVWLPKRVAVMHCKGHQKDDAPTSTGNRRADEVAREVAIRPLSTQATISAGKRTADGSEFEKRTADGSEFESPKKKAKVE

SEQ ID NO: 1442 - protein, 2098 aa, synthetic construct
MPAAKRVKLDGGDKKYSIGLDIGTNSVGWAVITDEYKVPSKKFKVLGNTDRHSIKKNLIGALLFDSGETAEATRLKRTARRRYTRRKNRICYLQEIFSNEMAKVDDSFFHRLEESFLVEEDKKHERHPIFGNIVDEVAYHEKYPTIYHLRKKLVDSTDKADLRLIYLALAHMIKFRGHFLIEGDLNPDNSDVDKLFIQLVQTYNQLFEENPINASGVDAKAILSARLSKSRRLENLIAQLPGEKKNGLFGNLIALSLGLTPNFKSNFDLAEDAKLQLSKDTYDDDLDNLLAQIGDQYADLFLAAKNLSDAILLSDILRVNTEITKAPLSASMIKRYDEHHQDLTLLKALVRQQLPEKYKEIFFDQSKNGYAGYIDGGASQEEFYKFIKPILEKMDGTEELLVKLNREDLLRKQRTFDNGSIPHQIHLGELHAILRRQEDFYPFLKDNREKIEKILTFRIPYYVGPLARGNSRFAWMTRKSEETITPWNFEEVVDKGASAQSFIERMTNFDKNLPNEKVLPKHSLLYEYFTVYNELTKVKYVTEGMRKPAFLSGEQKKAIVDLLFKTNRKVTVKQLKEDYFKKIECFDSVEISGVEDRFNASLGTYHDLLKIIKDKDFLDNEENEDILEDIVLTLTLFEDREMIEERLKTYAHLFDDKVMKQLKRRRYTGWGRLSRKLINGIRDKQSGKTILDFLKSDGFANRNFMQLIHDDSLTFKEDIQKAQVSGQGDSLHEHIANLAGSPAIKKGILQTVKVVDELVKVMGRHKPENIVIEMARENQTTQKGQKNSRERMKRIEEGIKELGSQILKEHPVENTQLQNEKLYLYYLQNGRDMYVDQELDINRLSDYDVDHIVPQSFLKDDSIDNKVLTRSDKARGKSDNVPSEEVVKKMKNYWRQLLNAKLITQRKFDNLTKAERGGLSELDKAGFIKRQLVETRQITKHVAQILDSRMNTKYDENDKLIREVKVITLKSKLVSDFRKDFQFYKVREINNYHHAHDAYLNAVVGTALIKKYPKLESEFVYGDYKVYDVRKMIAKSEQEIGKATAKYFFYSNIMNFFKTEITLANGEIRKRPLIETNGETGEIVWDKGRDFATVRKVLSMPQVNIVKKTEVQTGGFSKESILPKRNSDKLIARKKDWDPKKYGGFDSPTVAYSVLVVAKVEKGKSKKLKSVKELLGITIMERSSFEKNPIDFLEAKGYKEVKKDLIIKLPKYSLFELENGRKRMLASAGELQKGNELALPSKYVNFLYLASHYEKLKGSPEDNEQKQLFVEQHKHYLDEIIEQISEFSKRVILADANLDKVLSAYNKHRDKPIREQAENIIHLFTLTNLGAPAAFKYFDTTIDRKRYTSTKEVLDATLIHQSITGLYETRIDLSQLGGDGGGGSGGGEAAAKGGTAPLEEEYRLFLEAPIQNVTLLEQWKREIPKVWAEINPPGLASTQAPIHVQLLSTALPVRVRQYPITLEAKRSLRETIRKFRAAGILRPVHSPWNTPLLPVRKSGTSEYRMVQDLREVNKRVETIHPTVPNPYTLLSLLPPDRIWYSVLDLKDAFFCIPLAPESQLIFAFEWADAEEGESGQLTWTRLPQGFKNSPTLFNEALNRDLQGFRLDHPSVSLLQYVDDLLIAADTQAACLSATRDLLMTLAELGYRVSGKKAQLCQEEVTYLGFKIHKGSRSLSNSRTQAILQIPVPKTKRQVREFLGKIGYCRLFIPGFAELAQPLYAATRPGNDPLVWGEKEEEAFQSLKLALTQPPALALPSLDKPFQLFVEETSGAAKGVLTQALGPWKRPVAYLSKRLDPVAAGWPRCLRAIAAAALLTREASKLTFGQDIEITSSHNLESLLRSPPDKWLTNARITQYQVLLLDPPRVRFKQTAALNPATLLPETDDTLPIHHCLDTLDSLTSTRPDLTDQPLAQAEATLFTDGSSYIRDGKRYAGAAVVTLDSVIWAEPLPIGTSAQKAELIALTKALEWSKDKSVNIYTDSRYAFATLHVHGMIYRERGWLTAGGKAIKNAPEILALLTAVWLPKRVAVMHCKGHQKDDAPTSTGNRRADEVAREVAIRPLSTQATISAGKRTADGSEFEKRTADGSEFESPKKKAKVE

SEQ ID NO: 1443 - protein, 2093 aa, synthetic construct
MPAAKRVKLDGGDKKYSIGLDIGTNSVGWAVITDEYKVPSKKFKVLGNTDRHSIKKNLIGALLFDSGETAEATRLKRTARRRYTRRKNRICYLQEIFSNEMAKVDDSFFHRLEESFLVEEDKKHERHPIFGNIVDEVAYHEKYPTIYHLRKKLVDSTDKADLRLIYLALAHMIKFRGHFLIEGDLNPDNSDVDKLFIQLVQTYNQLFEENPINASGVDAKAILSARLSKSRRLENLIAQLPGEKKNGLFGNLIALSLGLTPNFKSNFDLAEDAKLQLSKDTYDDDLDNLLAQIGDQYADLFLAAKNLSDAILLSDILRVNTEITKAPLSASMIKRYDEHHQDLTLLKALVRQQLPEKYKEIFFDQSKNGYAGYIDGGASQEEFYKFIKPILEKMDGTEELLVKLNREDLLRKQRTFDNGSIPHQIHLGELHAILRRQEDFYPFLKDNREKIEKILTFRIPYYVGPLARGNSRFAWMTRKSEETITPWNFEEVVDKGASAQSFIERMTNFDKNLPNEKVLPKHSLLYEYFTVYNELTKVKYVTEGMRKPAFLSGEQKKAIVDLLFKTNRKVTVKQLKEDYFKKIECFDSVEISGVEDRFNASLGTYHDLLKIIKDKDFLDNEENEDILEDIVLTLTLFEDREMIEERLKTYAHLFDDKVMKQLKRRRYTGWGRLSRKLINGIRDKQSGKTILDFLKSDGFANRNFMQLIHDDSLTFKEDIQKAQVSGQGDSLHEHIANLAGSPAIKKGILQTVKVVDELVKVMGRHKPENIVIEMARENQTTQKGQKNSRERMKRIEEGIKELGSQILKEHPVENTQLQNEKLYLYYLQNGRDMYVDQELDINRLSDYDVDHIVPQSFLKDDSIDNKVLTRSDKARGKSDNVPSEEVVKKMKNYWRQLLNAKLITQRKFDNLTKAERGGLSELDKAGFIKRQLVETRQITKHVAQILDSRMNTKYDENDKLIREVKVITLKSKLVSDFRKDFQFYKVREINNYHHAHDAYLNAVVGTALIKKYPKLESEFVYGDYKVYDVRKMIAKSEQEIGKATAKYFFYSNIMNFFKTEITLANGEIRKRPLIETNGETGEIVWDKGRDFATVRKVLSMPQVNIVKKTEVQTGGFSKESILPKRNSDKLIARKKDWDPKKYGGFDSPTVAYSVLVVAKVEKGKSKKLKSVKELLGITIMERSSFEKNPIDFLEAKGYKEVKKDLIIKLPKYSLFELENGRKRMLASAGELQKGNELALPSKYVNFLYLASHYEKLKGSPEDNEQKQLFVEQHKHYLDEIIEQISEFSKRVILADANLDKVLSAYNKHRDKPIREQAENIIHLFTLTNLGAPAAFKYFDTTIDRKRYTSTKEVLDATLIHQSITGLYETRIDLSQLGGDGGGSSGSSGGTAPLEEEYRLFLEAPIQNVTLLEQWKREIPKVWAEINPPGLASTQAPIHVQLLSTALPVRVRQYPITLEAKRSLRETIRKFRAAGILRPVHSPWNTPLLPVRKSGTSEYRMVQDLREVNKRVETIHPTVPNPYTLLSLLPPDRIWYSVLDLKDAFFCIPLAPESQLIFAFEWADAEEGESGQLTWTRLPQGFKNSPTLFNEALNRDLQGFRLDHPSVSLLQYVDDLLIAADTQAACLSATRDLLMTLAELGYRVSGKKAQLCQEEVTYLGFKIHKGSRSLSNSRTQAILQIPVPKTKRQVREFLGKIGYCRLFIPGFAELAQPLYAATRPGNDPLVWGEKEEEAFQSLKLALTQPPALALPSLDKPFQLFVEETSGAAKGVLTQALGPWKRPVAYLSKRLDPVAAGWPRCLRAIAAAALLTREASKLTFGQDIEITSSHNLESLLRSPPDKWLTNARITQYQVLLLDPPRVRFKQTAALNPATLLPETDDTLPIHHCLDTLDSLTSTRPDLTDQPLAQAEATLFTDGSSYIRDGKRYAGAAVVTLDSVIWAEPLPIGTSAQKAELIALTKALEWSKDKSVNIYTDSRYAFATLHVHGMIYRERGWLTAGGKAIKNAPEILALLTAVWLPKRVAVMHCKGHQKDDAPTSTGNRRADEVAREVAIRPLSTQATISAGKRTADGSEFEKRTADGSEFESPKKKAKVE

SEQ ID NO: 1444 - protein, 2093 aa, synthetic construct
MPAAKRVKLDGGDKKYSIGLDIGTNSVGWAVITDEYKVPSKKFKVLGNTDRHSIKKNLIGALLFDSGETAEATRLKRTARRRYTRRKNRICYLQEIFSNEMAKVDDSFFHRLEESFLVEEDKKHERHPIFGNIVDEVAYHEKYPTIYHLRKKLVDSTDKADLRLIYLALAHMIKFRGHFLIEGDLNPDNSDVDKLFIQLVQTYNQLFEENPINASGVDAKAILSARLSKSRRLENLIAQLPGEKKNGLFGNLIALSLGLTPNFKSNFDLAEDAKLQLSKDTYDDDLDNLLAQIGDQYADLFLAAKNLSDAILLSDILRVNTEITKAPLSASMIKRYDEHHQDLTLLKALVRQQLPEKYKEIFFDQSKNGYAGYIDGGASQEEFYKFIKPILEKMDGTEELLVKLNREDLLRKQRTFDNGSIPHQIHLGELHAILRRQEDFYPFLKDNREKIEKILTFRIPYYVGPLARGNSRFAWMTRKSEETITPWNFEEVVDKGASAQSFIERMTNFDKNLPNEKVLPKHSLLYEYFTVYNELTKVKYVTEGMRKPAFLSGEQKKAIVDLLFKTNRKVTVKQLKEDYFKKIECFDSVEISGVEDRFNASLGTYHDLLKIIKDKDFLDNEENEDILEDIVLTLTLFEDREMIEERLKTYAHLFDDKVMKQLKRRRYTGWGRLSRKLINGIRDKQSGKTILDFLKSDGFANRNFMQLIHDDSLTFKEDIQKAQVSGQGDSLHEHIANLAGSPAIKKGILQTVKVVDELVKVMGRHKPENIVIEMARENQTTQKGQKNSRERMKRIEEGIKELGSQILKEHPVENTQLQNEKLYLYYLQNGRDMYVDQELDINRLSDYDVDHIVPQSFLKDDSIDNKVLTRSDKARGKSDNVPSEEVVKKMKNYWRQLLNAKLITQRKFDNLTKAERGGLSELDKAGFIKRQLVETRQITKHVAQILDSRMNTKYDENDKLIREVKVITLKSKLVSDFRKDFQFYKVREINNYHHAHDAYLNAVVGTALIKKYPKLESEFVYGDYKVYDVRKMIAKSEQEIGKATAKYFFYSNIMNFFKTEITLANGEIRKRPLIETNGETGEIVWDKGRDFATVRKVLSMPQVNIVKKTEVQTGGFSKESILPKRNSDKLIARKKDWDPKKYGGFDSPTVAYSVLVVAKVEKGKSKKLKSVKELLGITIMERSSFEKNPIDFLEAKGYKEVKKDLIIKLPKYSLFELENGRKRMLASAGELQKGNELALPSKYVNFLYLASHYEKLKGSPEDNEQKQLFVEQHKHYLDEIIEQISEFSKRVILADANLDKVLSAYNKHRDKPIREQAENIIHLFTLTNLGAPAAFKYFDTTIDRKRYTSTKEVLDATLIHQSITGLYETRIDLSQLGGDGGGGGGSSGGTAPLEEEYRLFLEAPIQNVTLLEQWKREIPKVWAEINPPGLASTQAPIHVQLLSTALPVRVRQYPITLEAKRSLRETIRKFRAAGILRPVHSPWNTPLLPVRKSGTSEYRMVQDLREVNKRVETIHPTVPNPYTLLSLLPPDRIWYSVLDLKDAFFCIPLAPESQLIFAFEWADAEEGESGQLTWTRLPQGFKNSPTLFNEALNRDLQGFRLDHPSVSLLQYVDDLLIAADTQAACLSATRDLLMTLAELGYRVSGKKAQLCQEEVTYLGFKIHKGSRSLSNSRTQAILQIPVPKTKRQVREFLGKIGYCRLFIPGFAELAQPLYAATRPGNDPLVWGEKEEEAFQSLKLALTQPPALALPSLDKPFQLFVEETSGAAKGVLTQALGPWKRPVAYLSKRLDPVAAGWPRCLRAIAAAALLTREASKLTFGQDIEITSSHNLESLLRSPPDKWLTNARITQYQVLLLDPPRVRFKQTAALNPATLLPETDDTLPIHHCLDTLDSLTSTRPDLTDQPLAQAEATLFTDGSSYIRDGKRYAGAAVVTLDSVIWAEPLPIGTSAQKAELIALTKALEWSKDKSVNIYTDSRYAFATLHVHGMIYRERGWLTAGGKAIKNAPEILALLTAVWLPKRVAVMHCKGHQKDDAPTSTGNRRADEVAREVAIRPLSTQATISAGKRTADGSEFEKRTADGSEFESPKKKAKVE

SEQ ID NO: 1445 - protein, 2093 aa, synthetic construct
MPAAKRVKLDGGDKKYSIGLDIGTNSVGWAVITDEYKVPSKKFKVLGNTDRHSIKKNLIGALLFDSGETAEATRLKRTARRRYTRRKNRICYLQEIFSNEMAKVDDSFFHRLEESFLVEEDKKHERHPIFGNIVDEVAYHEKYPTIYHLRKKLVDSTDKADLRLIYLALAHMIKFRGHFLIEGDLNPDNSDVDKLFIQLVQTYNQLFEENPINASGVDAKAILSARLSKSRRLENLIAQLPGEKKNGLFGNLIALSLGLTPNFKSNFDLAEDAKLQLSKDTYDDDLDNLLAQIGDQYADLFLAAKNLSDAILLSDILRVNTEITKAPLSASMIKRYDEHHQDLTLLKALVRQQLPEKYKEIFFDQSKNGYAGYIDGGASQEEFYKFIKPILEKMDGTEELLVKLNREDLLRKQRTFDNGSIPHQIHLGELHAILRRQEDFYPFLKDNREKIEKILTFRIPYYVGPLARGNSRFAWMTRKSEETITPWNFEEVVDKGASAQSFIERMTNFDKNLPNEKVLPKHSLLYEYFTVYNELTKVKYVTEGMRKPAFLSGEQKKAIVDLLFKTNRKVTVKQLKEDYFKKIECFDSVEISGVEDRFNASLGTYHDLLKIIKDKDFLDNEENEDILEDIVLTLTLFEDREMIEERLKTYAHLFDDKVMKQLKRRRYTGWGRLSRKLINGIRDKQSGKTILDFLKSDGFANRNFMQLIHDDSLTFKEDIQKAQVSGQGDSLHEHIANLAGSPAIKKGILQTVKVVDELVKVMGRHKPENIVIEMARENQTTQKGQKNSRERMKRIEEGIKELGSQILKEHPVENTQLQNEKLYLYYLQNGRDMYVDQELDINRLSDYDVDHIVPQSFLKDDSIDNKVLTRSDKARGKSDNVPSEEVVKKMKNYWRQLLNAKLITQRKFDNLTKAERGGLSELDKAGFIKRQLVETRQITKHVAQILDSRMNTKYDENDKLIREVKVITLKSKLVSDFRKDFQFYKVREINNYHHAHDAYLNAVVGTALIKKYPKLESEFVYGDYKVYDVRKMIAKSEQEIGKATAKYFFYSNIMNFFKTEITLANGEIRKRPLIETNGETGEIVWDKGRDFATVRKVLSMPQVNIVKKTEVQTGGFSKESILPKRNSDKLIARKKDWDPKKYGGFDSPTVAYSVLVVAKVEKGKSKKLKSVKELLGITIMERSSFEKNPIDFLEAKGYKEVKKDLIIKLPKYSLFELENGRKRMLASAGELQKGNELALPSKYVNFLYLASHYEKLKGSPEDNEQKQLFVEQHKHYLDEIIEQISEFSKRVILADANLDKVLSAYNKHRDKPIREQAENIIHLFTLTNLGAPAAFKYFDTTIDRKRYTSTKEVLDATLIHQSITGLYETRIDLSQLGGDGGGSSGGSGGTAPLEEEYRLFLEAPIQNVTLLEQWKREIPKVWAEINPPGLASTQAPIHVQLLSTALPVRVRQYPITLEAKRSLRETIRKFRAAGILRPVHSPWNTPLLPVRKSGTSEYRMVQDLREVNKRVETIHPTVPNPYTLLSLLPPDRIWYSVLDLKDAFFCIPLAPESQLIFAFEWADAEEGESGQLTWTRLPQGFKNSPTLFNEALNRDLQGFRLDHPSVSLLQYVDDLLIAADTQAACLSATRDLLMTLAELGYRVSGKKAQLCQEEVTYLGFKIHKGSRSLSNSRTQAILQIPVPKTKRQVREFLGKIGYCRLFIPGFAELAQPLYAATRPGNDPLVWGEKEEEAFQSLKLALTQPPALALPSLDKPFQLFVEETSGAAKGVLTQALGPWKRPVAYLSKRLDPVAAGWPRCLRAIAAAALLTREASKLTFGQDIEITSSHNLESLLRSPPDKWLTNARITQYQVLLLDPPRVRFKQTAALNPATLLPETDDTLPIHHCLDTLDSLTSTRPDLTDQPLAQAEATLFTDGSSYIRDGKRYAGAAVVTLDSVIWAEPLPIGTSAQKAELIALTKALEWSKDKSVNIYTDSRYAFATLHVHGMIYRERGWLTAGGKAIKNAPEILALLTAVWLPKRVAVMHCKGHQKDDAPTSTGNRRADEVAREVAIRPLSTQATISAGKRTADGSEFEKRTADGSEFESPKKKAKVE

SEQ ID NO: 1446 - protein, 2095 aa, synthetic construct
MPAAKRVKLDGGDKKYSIGLDIGTNSVGWAVITDEYKVPSKKFKVLGNTDRHSIKKNLIGALLFDSGETAEATRLKRTARRRYTRRKNRICYLQEIFSNEMAKVDDSFFHRLEESFLVEEDKKHERHPIFGNIVDEVAYHEKYPTIYHLRKKLVDSTDKADLRLIYLALAHMIKFRGHFLIEGDLNPDNSDVDKLFIQLVQTYNQLFEENPINASGVDAKAILSARLSKSRRLENLIAQLPGEKKNGLFGNLIALSLGLTPNFKSNFDLAEDAKLQLSKDTYDDDLDNLLAQIGDQYADLFLAAKNLSDAILLSDILRVNTEITKAPLSASMIKRYDEHHQDLTLLKALVRQQLPEKYKEIFFDQSKNGYAGYIDGGASQEEFYKFIKPILEKMDGTEELLVKLNREDLLRKQRTFDNGSIPHQIHLGELHAILRRQEDFYPFLKDNREKIEKILTFRIPYYVGPLARGNSRFAWMTRKSEETITPWNFEEVVDKGASAQSFIERMTNFDKNLPNEKVLPKHSLLYEYFTVYNELTKVKYVTEGMRKPAFLSGEQKKAIVDLLFKTNRKVTVKQLKEDYFKKIECFDSVEISGVEDRFNASLGTYHDLLKIIKDKDFLDNEENEDILEDIVLTLTLFEDREMIEERLKTYAHLFDDKVMKQLKRRRYTGWGRLSRKLINGIRDKQSGKTILDFLKSDGFANRNFMQLIHDDSLTFKEDIQKAQVSGQGDSLHEHIANLAGSPAIKKGILQTVKVVDELVKVMGRHKPENIVIEMARENQTTQKGQKNSRERMKRIEEGIKELGSQILKEHPVENTQLQNEKLYLYYLQNGRDMYVDQELDINRLSDYDVDHIVPQSFLKDDSIDNKVLTRSDKARGKSDNVPSEEVVKKMKNYWRQLLNAKLITQRKFDNLTKAERGGLSELDKAGFIKRQLVETRQITKHVAQILDSRMNTKYDENDKLIREVKVITLKSKLVSDFRKDFQFYKVREINNYHHAHDAYLNAVVGTALIKKYPKLESEFVYGDYKVYDVRKMIAKSEQEIGKATAKYFFYSNIMNFFKTEITLANGEIRKRPLIETNGETGEIVWDKGRDFATVRKVLSMPQVNIVKKTEVQTGGFSKESILPKRNSDKLIARKKDWDPKKYGGFDSPTVAYSVLVVAKVEKGKSKKLKSVKELLGITIMERSSFEKNPIDFLEAKGYKEVKKDLIIKLPKYSLFELENGRKRMLASAGELQKGNELALPSKYVNFLYLASHYEKLKGSPEDNEQKQLFVEQHKHYLDEIIEQISEFSKRVILADANLDKVLSAYNKHRDKPIREQAENIIHLFTLTNLGAPAAFKYFDTTIDRKRYTSTKEVLDATLIHQSITGLYETRIDLSQLGGDGGGGGEAAAKGGTAPLEEEYRLFLEAPIQNVTLLEQWKREIPKVWAEINPPGLASTQAPIHVQLLSTALPVRVRQYPITLEAKRSLRETIRKFRAAGILRPVHSPWNTPLLPVRKSGTSEYRMVQDLREVNKRVETIHPTVPNPYTLLSLLPPDRIWYSVLDLKDAFFCIPLAPESQLIFAFEWADAEEGESGQLTWTRLPQGFKNSPTLFNEALNRDLQGFRLDHPSVSLLQYVDDLLIAADTQAACLSATRDLLMTLAELGYRVSGKKAQLCQEEVTYLGFKIHKGSRSLSNSRTQAILQIPVPKTKRQVREFLGKIGYCRLFIPGFAELAQPLYAATRPGNDPLVWGEKEEEAFQSLKLALTQPPALALPSLDKPFQLFVEETSGAAKGVLTQALGPWKRPVAYLSKRLDPVAAGWPRCLRAIAAAALLTREASKLTFGQDIEITSSHNLESLLRSPPDKWLTNARITQYQVLLLDPPRVRFKQTAALNPATLLPETDDTLPIHHCLDTLDSLTSTRPDLTDQPLAQAEATLFTDGSSYIRDGKRYAGAAVVTLDSVIWAEPLPIGTSAQKAELIALTKALEWSKDKSVNIYTDSRYAFATLHVHGMIYRERGWLTAGGKAIKNAPEILALLTAVWLPKRVAVMHCKGHQKDDAPTSTGNRRADEVAREVAIRPLSTQATISAGKRTADGSEFEKRTADGSEFESPKKKAKVE

SEQ ID NO: 1447 - protein, 2096 aa, synthetic construct
MPAAKRVKLDGGDKKYSIGLDIGTNSVGWAVITDEYKVPSKKFKVLGNTDRHSIKKNLIGALLFDSGETAEATRLKRTARRRYTRRKNRICYLQEIFSNEMAKVDDSFFHRLEESFLVEEDKKHERHPIFGNIVDEVAYHEKYPTIYHLRKKLVDSTDKADLRLIYLALAHMIKFRGHFLIEGDLNPDNSDVDKLFIQLVQTYNQLFEENPINASGVDAKAILSARLSKSRRLENLIAQLPGEKKNGLFGNLIALSLGLTPNFKSNFDLAEDAKLQLSKDTYDDDLDNLLAQIGDQYADLFLAAKNLSDAILLSDILRVNTEITKAPLSASMIKRYDEHHQDLTLLKALVRQQLPEKYKEIFFDQSKNGYAGYIDGGASQEEFYKFIKPILEKMDGTEELLVKLNREDLLRKQRTFDNGSIPHQIHLGELHAILRRQEDFYPFLKDNREKIEKILTFRIPYYVGPLARGNSRFAWMTRKSEETITPWNFEEVVDKGASAQSFIERMTNFDKNLPNEKVLPKHSLLYEYFTVYNELTKVKYVTEGMRKPAFLSGEQKKAIVDLLFKTNRKVTVKQLKEDYFKKIECFDSVEISGVEDRFNASLGTYHDLLKIIKDKDFLDNEENEDILEDIVLTLTLFEDREMIEERLKTYAHLFDDKVMKQLKRRRYTGWGRLSRKLINGIRDKQSGKTILDFLKSDGFANRNFMQLIHDDSLTFKEDIQKAQVSGQGDSLHEHIANLAGSPAIKKGILQTVKVVDELVKVMGRHKPENIVIEMARENQTTQKGQKNSRERMKRIEEGIKELGSQILKEHPVENTQLQNEKLYLYYLQNGRDMYVDQELDINRLSDYDVDHIVPQSFLKDDSIDNKVLTRSDKARGKSDNVPSEEVVKKMKNYWRQLLNAKLITQRKFDNLTKAERGGLSELDKAGFIKRQLVETRQITKHVAQILDSRMNTKYDENDKLIREVKVITLKSKLVSDFRKDFQFYKVREINNYHHAHDAYLNAVVGTALIKKYPKLESEFVYGDYKVYDVRKMIAKSEQEIGKATAKYFFYSNIMNFFKTEITLANGEIRKRPLIETNGETGEIVWDKGRDFATVRKVLSMPQVNIVKKTEVQTGGFSKESILPKRNSDKLIARKKDWDPKKYGGFDSPTVAYSVLVVAKVEKGKSKKLKSVKELLGITIMERSSFEKNPIDFLEAKGYKEVKKDLIIKLPKYSLFELENGRKRMLASAGELQKGNELALPSKYVNFLYLASHYEKLKGSPEDNEQKQLFVEQHKHYLDEIIEQISEFSKRVILADANLDKVLSAYNKHRDKPIREQAENIIHLFTLTNLGAPAAFKYFDTTIDRKRYTSTKEVLDATLIHQSITGLYETRIDLSQLGGDGGPAPGGGGSSGGTAPLEEEYRLFLEAPIQNVTLLEQWKREIPKVWAEINPPGLASTQAPIHVQLLSTALPVRVRQYPITLEAKRSLRETIRKFRAAGILRPVHSPWNTPLLPVRKSGTSEYRMVQDLREVNKRVETIHPTVPNPYTLLSLLPPDRIWYSVLDLKDAFFCIPLAPESQLIFAFEWADAEEGESGQLTWTRLPQGFKNSPTLFNEALNRDLQGFRLDHPSVSLLQYVDDLLIAADTQAACLSATRDLLMTLAELGYRVSGKKAQLCQEEVTYLGFKIHKGSRSLSNSRTQAILQIPVPKTKRQVREFLGKIGYCRLFIPGFAELAQPLYAATRPGNDPLVWGEKEEEAFQSLKLALTQPPALALPSLDKPFQLFVEETSGAAKGVLTQALGPWKRPVAYLSKRLDPVAAGWPRCLRAIAAAALLTREASKLTFGQDIEITSSHNLESLLRSPPDKWLTNARITQYQVLLLDPPRVRFKQTAALNPATLLPETDDTLPIHHCLDTLDSLTSTRPDLTDQPLAQAEATLFTDGSSYIRDGKRYAGAAVVTLDSVIWAEPLPIGTSAQKAELIALTKALEWSKDKSVNIYTDSRYAFATLHVHGMIYRERGWLTAGGKAIKNAPEILALLTAVWLPKRVAVMHCKGHQKDDAPTSTGNRRADEVAREVAIRPLSTQATISAGKRTADGSEFEKRTADGSEFESPKKKAKVE

SEQ ID NO: 1448 - protein, 2129 aa, synthetic construct
MPAAKRVKLDGGDKKYSIGLDIGTNSVGWAVITDEYKVPSKKFKVLGNTDRHSIKKNLIGALLFDSGETAEATRLKRTARRRYTRRKNRICYLQEIFSNEMAKVDDSFFHRLEESFLVEEDKKHERHPIFGNIVDEVAYHEKYPTIYHLRKKLVDSTDKADLRLIYLALAHMIKFRGHFLIEGDLNPDNSDVDKLFIQLVQTYNQLFEENPINASGVDAKAILSARLSKSRRLENLIAQLPGEKKNGLFGNLIALSLGLTPNFKSNFDLAEDAKLQLSKDTYDDDLDNLLAQIGDQYADLFLAAKNLSDAILLSDILRVNTEITKAPLSASMIKRYDEHHQDLTLLKALVRQQLPEKYKEIFFDQSKNGYAGYIDGGASQEEFYKFIKPILEKMDGTEELLVKLNREDLLRKQRTFDNGSIPHQIHLGELHAILRRQEDFYPFLKDNREKIEKILTFRIPYYVGPLARGNSRFAWMTRKSEETITPWNFEEVVDKGASAQSFIERMTNFDKNLPNEKVLPKHSLLYEYFTVYNELTKVKYVTEGMRKPAFLSGEQKKAIVDLLFKTNRKVTVKQLKEDYFKKIECFDSVEISGVEDRFNASLGTYHDLLKIIKDKDFLDNEENEDILEDIVLTLTLFEDREMIEERLKTYAHLFDDKVMKQLKRRRYTGWGRLSRKLINGIRDKQSGKTILDFLKSDGFANRNFMQLIHDDSLTFKEDIQKAQVSGQGDSLHEHIANLAGSPAIKKGILQTVKVVDELVKVMGRHKPENIVIEMARENQTTQKGQKNSRERMKRIEEGIKELGSQILKEHPVENTQLQNEKLYLYYLQNGRDMYVDQELDINRLSDYDVDHIVPQSFLKDDSIDNKVLTRSDKARGKSDNVPSEEVVKKMKNYWRQLLNAKLITQRKFDNLTKAERGGLSELDKAGFIKRQLVETRQITKHVAQILDSRMNTKYDENDKLIREVKVITLKSKLVSDFRKDFQFYKVREINNYHHAHDAYLNAVVGTALIKKYPKLESEFVYGDYKVYDVRKMIAKSEQEIGKATAKYFFYSNIMNFFKTEITLANGEIRKRPLIETNGETGEIVWDKGRDFATVRKVLSMPQVNIVKKTEVQTGGFSKESILPKRNSDKLIARKKDWDPKKYGGFDSPTVAYSVLVVAKVEKGKSKKLKSVKELLGITIMERSSFEKNPIDFLEAKGYKEVKKDLIIKLPKYSLFELENGRKRMLASAGELQKGNELALPSKYVNFLYLASHYEKLKGSPEDNEQKQLFVEQHKHYLDEIIEQISEFSKRVILADANLDKVLSAYNKHRDKPIREQAENIIHLFTLTNLGAPAAFKYFDTTIDRKRYTSTKEVLDATLIHQSITGLYETRIDLSQLGGDGGAEAAAKEAAAKEAAAKEAAAKALEAEAAAKEAAAKEAAAKEAAAKAGGVLNLEEEYRLHEKPVPSSIDPSWLQLFPTVWAERAGMGLANQVPPVVVELRSGASPVAVRQYPMSKEAREGIRPHIQKFLDLGVLVPCRSPWNTPLLPVKKPGTNDYRPVQDLREINKRVQDIHPTVPNPYNLLSSLPPSYTWYSVLDLKDAFFCLRLHPNSQPLFAFEWKDPEKGNTGQLTWTRLPQGFKNSPTLFNEALHRDLAPFRALNPQVVLLQYVDDLLVAAPTYEDCKKGTQKLLQELSKLGYRVSAKKAQLCQREVTYLGYLLKEGKRWLTPARKATVMKIPVPTTPRQVREFLGKAGFCRLFIPGFASLAAPLYPLTKPSIPFIWTEEHQQAFDHIKKALLSAPALALPDLTKPFTLYIDERAGVARGVLTQTLGPWRRPVAYLSKKLDPVASGWPTCLKAVAAVALLLKDADKLTLGQNVTVIASHSLESIVRQPPDRWMTNARMTHYQSLLLNERVSFAPPAVLNPATLLPVESEATPVHRCSEILAEETGTRRDLEDQPLPGVPTWYTDGSSFITEGKRRAGAPIVDGKRTVWASSLPEGTSAQKAELVALTQALRLAEGKNINIYTDSRYAFATAHIHGAIYKQRGWLTSAGKDIKNKEEILALLEAIHLPRRVAIIHCPGHQRGSNPVATGNRRADEAAKQAALSTRVLAGTTKPAGKRTADGSEFEKRTADGSEFESPKKKAKVE

SEQ ID NO: 1449 - protein, 2092 aa, synthetic construct
MPAAKRVKLDGGDKKYSIGLDIGTNSVGWAVITDEYKVPSKKFKVLGNTDRHSIKKNLIGALLFDSGETAEATRLKRTARRRYTRRKNRICYLQEIFSNEMAKVDDSFFHRLEESFLVEEDKKHERHPIFGNIVDEVAYHEKYPTIYHLRKKLVDSTDKADLRLIYLALAHMIKFRGHFLIEGDLNPDNSDVDKLFIQLVQTYNQLFEENPINASGVDAKAILSARLSKSRRLENLIAQLPGEKKNGLFGNLIALSLGLTPNFKSNFDLAEDAKLQLSKDTYDDDLDNLLAQIGDQYADLFLAAKNLSDAILLSDILRVNTEITKAPLSASMIKRYDEHHQDLTLLKALVRQQLPEKYKEIFFDQSKNGYAGYIDGGASQEEFYKFIKPILEKMDGTEELLVKLNREDLLRKQRTFDNGSIPHQIHLGELHAILRRQEDFYPFLKDNREKIEKILTFRIPYYVGPLARGNSRFAWMTRKSEETITPWNFEEVVDKGASAQSFIERMTNFDKNLPNEKVLPKHSLLYEYFTVYNELTKVKYVTEGMRKPAFLSGEQKKAIVDLLFKTNRKVTVKQLKEDYFKKIECFDSVEISGVEDRFNASLGTYHDLLKIIKDKDFLDNEENEDILEDIVLTLTLFEDREMIEERLKTYAHLFDDKVMKQLKRRRYTGWGRLSRKLINGIRDKQSGKTILDFLKSDGFANRNFMQLIHDDSLTFKEDIQKAQVSGQGDSLHEHIANLAGSPAIKKGILQTVKVVDELVKVMGRHKPENIVIEMARENQTTQKGQKNSRERMKRIEEGIKELGSQILKEHPVENTQLQNEKLYLYYLQNGRDMYVDQELDINRLSDYDVDHIVPQSFLKDDSIDNKVLTRSDKARGKSDNVPSEEVVKKMKNYWRQLLNAKLITQRKFDNLTKAERGGLSELDKAGFIKRQLVETRQITKHVAQILDSRMNTKYDENDKLIREVKVITLKSKLVSDFRKDFQFYKVREINNYHHAHDAYLNAVVGTALIKKYPKLESEFVYGDYKVYDVRKMIAKSEQEIGKATAKYFFYSNIMNFFKTEITLANGEIRKRPLIETNGETGEIVWDKGRDFATVRKVLSMPQVNIVKKTEVQTGGFSKESILPKRNSDKLIARKKDWDPKKYGGFDSPTVAYSVLVVAKVEKGKSKKLKSVKELLGITIMERSSFEKNPIDFLEAKGYKEVKKDLIIKLPKYSLFELENGRKRMLASAGELQKGNELALPSKYVNFLYLASHYEKLKGSPEDNEQKQLFVEQHKHYLDEIIEQISEFSKRVILADANLDKVLSAYNKHRDKPIREQAENIIHLFTLTNLGAPAAFKYFDTTIDRKRYTSTKEVLDATLIHQSITGLYETRIDLSQLGGDGGGGSGGSGGSGGVLNLEEEYRLHEKPVPSSIDPSWLQLFPTVWAERAGMGLANQVPPVVVELRSGASPVAVRQYPMSKEAREGIRPHIQKFLDLGVLVPCRSPWNTPLLPVKKPGTNDYRPVQDLREINKRVQDIHPTVPNPYNLLSSLPPSYTWYSVLDLKDAFFCLRLHPNSQPLFAFEWKDPEKGNTGQLTWTRLPQGFKNSPTLFNEALHRDLAPFRALNPQVVLLQYVDDLLVAAPTYEDCKKGTQKLLQELSKLGYRVSAKKAQLCQREVTYLGYLLKEGKRWLTPARKATVMKIPVPTTPRQVREFLGKAGFCRLFIPGFASLAAPLYPLTKPSIPFIWTEEHQQAFDHIKKALLSAPALALPDLTKPFTLYIDERAGVARGVLTQTLGPWRRPVAYLSKKLDPVASGWPTCLKAVAAVALLLKDADKLTLGQNVTVIASHSLESIVRQPPDRWMTNARMTHYQSLLLNERVSFAPPAVLNPATLLPVESEATPVHRCSEILAEETGTRRDLEDQPLPGVPTWYTDGSSFITEGKRRAGAPIVDGKRTVWASSLPEGTSAQKAELVALTQALRLAEGKNINIYTDSRYAFATAHIHGAIYKQRGWLTSAGKDIKNKEEILALLEAIHLPRRVAIIHCPGHQRGSNPVATGNRRADEAAKQAALSTRVLAGTTKPAGKRTADGSEFEKRTADGSEFESPKKKAKVE

SEQ ID NO: 1450 - protein, 2089 aa, synthetic construct
MPAAKRVKLDGGDKKYSIGLDIGTNSVGWAVITDEYKVPSKKFKVLGNTDRHSIKKNLIGALLFDSGETAEATRLKRTARRRYTRRKNRICYLQEIFSNEMAKVDDSFFHRLEESFLVEEDKKHERHPIFGNIVDEVAYHEKYPTIYHLRKKLVDSTDKADLRLIYLALAHMIKFRGHFLIEGDLNPDNSDVDKLFIQLVQTYNQLFEENPINASGVDAKAILSARLSKSRRLENLIAQLPGEKKNGLFGNLIALSLGLTPNFKSNFDLAEDAKLQLSKDTYDDDLDNLLAQIGDQYADLFLAAKNLSDAILLSDILRVNTEITKAPLSASMIKRYDEHHQDLTLLKALVRQQLPEKYKEIFFDQSKNGYAGYIDGGASQEEFYKFIKPILEKMDGTEELLVKLNREDLLRKQRTFDNGSIPHQIHLGELHAILRRQEDFYPFLKDNREKIEKILTFRIPYYVGPLARGNSRFAWMTRKSEETITPWNFEEVVDKGASAQSFIERMTNFDKNLPNEKVLPKHSLLYEYFTVYNELTKVKYVTEGMRKPAFLSGEQKKAIVDLLFKTNRKVTVKQLKEDYFKKIECFDSVEISGVEDRFNASLGTYHDLLKIIKDKDFLDNEENEDILEDIVLTLTLFEDREMIEERLKTYAHLFDDKVMKQLKRRRYTGWGRLSRKLINGIRDKQSGKTILDFLKSDGFANRNFMQLIHDDSLTFKEDIQKAQVSGQGDSLHEHIANLAGSPAIKKGILQTVKVVDELVKVMGRHKPENIVIEMARENQTTQKGQKNSRERMKRIEEGIKELGSQILKEHPVENTQLQNEKLYLYYLQNGRDMYVDQELDINRLSDYDVDHIVPQSFLKDDSIDNKVLTRSDKARGKSDNVPSEEVVKKMKNYWRQLLNAKLITQRKFDNLTKAERGGLSELDKAGFIKRQLVETRQITKHVAQILDSRMNTKYDENDKLIREVKVITLKSKLVSDFRKDFQFYKVREINNYHHAHDAYLNAVVGTALIKKYPKLESEFVYGDYKVYDVRKMIAKSEQEIGKATAKYFFYSNIMNFFKTEITLANGEIRKRPLIETNGETGEIVWDKGRDFATVRKVLSMPQVNIVKKTEVQTGGFSKESILPKRNSDKLIARKKDWDPKKYGGFDSPTVAYSVLVVAKVEKGKSKKLKSVKELLGITIMERSSFEKNPIDFLEAKGYKEVKKDLIIKLPKYSLFELENGRKRMLASAGELQKGNELALPSKYVNFLYLASHYEKLKGSPEDNEQKQLFVEQHKHYLDEIIEQISEFSKRVILADANLDKVLSAYNKHRDKPIREQAENIIHLFTLTNLGAPAAFKYFDTTIDRKRYTSTKEVLDATLIHQSITGLYETRIDLSQLGGDGGGGSGSSGGVLNLEEEYRLHEKPVPSSIDPSWLQLFPTVWAERAGMGLANQVPPVVVELRSGASPVAVRQYPMSKEAREGIRPHIQKFLDLGVLVPCRSPWNTPLLPVKKPGTNDYRPVQDLREINKRVQDIHPTVPNPYNLLSSLPPSYTWYSVLDLKDAFFCLRLHPNSQPLFAFEWKDPEKGNTGQLTWTRLPQGFKNSPTLFNEALHRDLAPFRALNPQVVLLQYVDDLLVAAPTYEDCKKGTQKLLQELSKLGYRVSAKKAQLCQREVTYLGYLLKEGKRWLTPARKATVMKIPVPTTPRQVREFLGKAGFCRLFIPGFASLAAPLYPLTKPSIPFIWTEEHQQAFDHIKKALLSAPALALPDLTKPFTLYIDERAGVARGVLTQTLGPWRRPVAYLSKKLDPVASGWPTCLKAVAAVALLLKDADKLTLGQNVTVIASHSLESIVRQPPDRWMTNARMTHYQSLLLNERVSFAPPAVLNPATLLPVESEATPVHRCSEILAEETGTRRDLEDQPLPGVPTWYTDGSSFITEGKRRAGAPIVDGKRTVWASSLPEGTSAQKAELVALTQALRLAEGKNINIYTDSRYAFATAHIHGAIYKQRGWLTSAGKDIKNKEEILALLEAIHLPRRVAIIHCPGHQRGSNPVATGNRRADEAAKQAALSTRVLAGTTKPAGKRTADGSEFEKRTADGSEFESPKKKAKVE

SEQ ID NO: 1451 - protein, 2094 aa, synthetic construct
MPAAKRVKLDGGDKKYSIGLDIGTNSVGWAVITDEYKVPSKKFKVLGNTDRHSIKKNLIGALLFDSGETAEATRLKRTARRRYTRRKNRICYLQEIFSNEMAKVDDSFFHRLEESFLVEEDKKHERHPIFGNIVDEVAYHEKYPTIYHLRKKLVDSTDKADLRLIYLALAHMIKFRGHFLIEGDLNPDNSDVDKLFIQLVQTYNQLFEENPINASGVDAKAILSARLSKSRRLENLIAQLPGEKKNGLFGNLIALSLGLTPNFKSNFDLAEDAKLQLSKDTYDDDLDNLLAQIGDQYADLFLAAKNLSDAILLSDILRVNTEITKAPLSASMIKRYDEHHQDLTLLKALVRQQLPEKYKEIFFDQSKNGYAGYIDGGASQEEFYKFIKPILEKMDGTEELLVKLNREDLLRKQRTFDNGSIPHQIHLGELHAILRRQEDFYPFLKDNREKIEKILTFRIPYYVGPLARGNSRFAWMTRKSEETITPWNFEEVVDKGASAQSFIERMTNFDKNLPNEKVLPKHSLLYEYFTVYNELTKVKYVTEGMRKPAFLSGEQKKAIVDLLFKTNRKVTVKQLKEDYFKKIECFDSVEISGVEDRFNASLGTYHDLLKIIKDKDFLDNEENEDILEDIVLTLTLFEDREMIEERLKTYAHLFDDKVMKQLKRRRYTGWGRLSRKLINGIRDKQSGKTILDFLKSDGFANRNFMQLIHDDSLTFKEDIQKAQVSGQGDSLHEHIANLAGSPAIKKGILQTVKVVDELVKVMGRHKPENIVIEMARENQTTQKGQKNSRERMKRIEEGIKELGSQILKEHPVENTQLQNEKLYLYYLQNGRDMYVDQELDINRLSDYDVDHIVPQSFLKDDSIDNKVLTRSDKARGKSDNVPSEEVVKKMKNYWRQLLNAKLITQRKFDNLTKAERGGLSELDKAGFIKRQLVETRQITKHVAQILDSRMNTKYDENDKLIREVKVITLKSKLVSDFRKDFQFYKVREINNYHHAHDAYLNAVVGTALIKKYPKLESEFVYGDYKVYDVRKMIAKSEQEIGKATAKYFFYSNIMNFFKTEITLANGEIRKRPLIETNGETGEIVWDKGRDFATVRKVLSMPQVNIVKKTEVQTGGFSKESILPKRNSDKLIARKKDWDPKKYGGFDSPTVAYSVLVVAKVEKGKSKKLKSVKELLGITIMERSSFEKNPIDFLEAKGYKEVKKDLIIKLPKYSLFELENGRKRMLASAGELQKGNELALPSKYVNFLYLASHYEKLKGSPEDNEQKQLFVEQHKHYLDEIIEQISEFSKRVILADANLDKVLSAYNKHRDKPIREQAENIIHLFTLTNLGAPAAFKYFDTTIDRKRYTSTKEVLDATLIHQSITGLYETRIDLSQLGGDGGEAAAKGGGGGSGGVLNLEEEYRLHEKPVPSSIDPSWLQLFPTVWAERAGMGLANQVPPVVVELRSGASPVAVRQYPMSKEAREGIRPHIQKFLDLGVLVPCRSPWNTPLLPVKKPGTNDYRPVQDLREINKRVQDIHPTVPNPYNLLSSLPPSYTWYSVLDLKDAFFCLRLHPNSQPLFAFEWKDPEKGNTGQLTWTRLPQGFKNSPTLFNEALHRDLAPFRALNPQVVLLQYVDDLLVAAPTYEDCKKGTQKLLQELSKLGYRVSAKKAQLCQREVTYLGYLLKEGKRWLTPARKATVMKIPVPTTPRQVREFLGKAGFCRLFIPGFASLAAPLYPLTKPSIPFIWTEEHQQAFDHIKKALLSAPALALPDLTKPFTLYIDERAGVARGVLTQTLGPWRRPVAYLSKKLDPVASGWPTCLKAVAAVALLLKDADKLTLGQNVTVIASHSLESIVRQPPDRWMTNARMTHYQSLLLNERVSFAPPAVLNPATLLPVESEATPVHRCSEILAEETGTRRDLEDQPLPGVPTWYTDGSSFITEGKRRAGAPIVDGKRTVWASSLPEGTSAQKAELVALTQALRLAEGKNINIYTDSRYAFATAHIHGAIYKQRGWLTSAGKDIKNKEEILALLEAIHLPRRVAIIHCPGHQRGSNPVATGNRRADEAAKQAALSTRVLAGTTKPAGKRTADGSEFEKRTADGSEFESPKKKAKVE

SEQ ID NO: 1452 - protein, 2098 aa, synthetic construct
MPAAKRVKLDGGDKKYSIGLDIGTNSVGWAVITDEYKVPSKKFKVLGNTDRHSIKKNLIGALLFDSGETAEATRLKRTARRRYTRRKNRICYLQEIFSNEMAKVDDSFFHRLEESFLVEEDKKHERHPIFGNIVDEVAYHEKYPTIYHLRKKLVDSTDKADLRLIYLALAHMIKFRGHFLIEGDLNPDNSDVDKLFIQLVQTYNQLFEENPINASGVDAKAILSARLSKSRRLENLIAQLPGEKKNGLFGNLIALSLGLTPNFKSNFDLAEDAKLQLSKDTYDDDLDNLLAQIGDQYADLFLAAKNLSDAILLSDILRVNTEITKAPLSASMIKRYDEHHQDLTLLKALVRQQLPEKYKEIFFDQSKNGYAGYIDGGASQEEFYKFIKPILEKMDGTEELLVKLNREDLLRKQRTFDNGSIPHQIHLGELHAILRRQEDFYPFLKDNREKIEKILTFRIPYYVGPLARGNSRFAWMTRKSEETITPWNFEEVVDKGASAQSFIERMTNFDKNLPNEKVLPKHSLLYEYFTVYNELTKVKYVTEGMRKPAFLSGEQKKAIVDLLFKTNRKVTVKQLKEDYFKKIECFDSVEISGVEDRFNASLGTYHDLLKIIKDKDFLDNEENEDILEDIVLTLTLFEDREMIEERLKTYAHLFDDKVMKQLKRRRYTGWGRLSRKLINGIRDKQSGKTILDFLKSDGFANRNFMQLIHDDSLTFKEDIQKAQVSGQGDSLHEHIANLAGSPAIKKGILQTVKVVDELVKVMGRHKPENIVIEMARENQTTQKGQKNSRERMKRIEEGIKELGSQILKEHPVENTQLQNEKLYLYYLQNGRDMYVDQELDINRLSDYDVDHIVPQSFLKDDSIDNKVLTRSDKARGKSDNVPSEEVVKKMKNYWRQLLNAKLITQRKFDNLTKAERGGLSELDKAGFIKRQLVETRQITKHVAQILDSRMNTKYDENDKLIREVKVITLKSKLVSDFRKDFQFYKVREINNYHHAHDAYLNAVVGTALIKKYPKLESEFVYGDYKVYDVRKMIAKSEQEIGKATAKYFFYSNIMNFFKTEITLANGEIRKRPLIETNGETGEIVWDKGRDFATVRKVLSMPQVNIVKKTEVQTGGFSKESILPKRNSDKLIARKKDWDPKKYGGFDSPTVAYSVLVVAKVEKGKSKKLKSVKELLGITIMERSSFEKNPIDFLEAKGYKEVKKDLIIKLPKYSLFELENGRKRMLASAGELQKGNELALPSKYVNFLYLASHYEKLKGSPEDNEQKQLFVEQHKHYLDEIIEQISEFSKRVILADANLDKVLSAYNKHRDKPIREQAENIIHLFTLTNLGAPAAFKYFDTTIDRKRYTSTKEVLDATLIHQSITGLYETRIDLSQLGGDGGEAAAKEAAAKEAAAKGGVLNLEEEYRLHEKPVPSSIDPSWLQLFPTVWAERAGMGLANQVPPVVVELRSGASPVAVRQYPMSKEAREGIRPHIQKFLDLGVLVPCRSPWNTPLLPVKKPGTNDYRPVQDLREINKRVQDIHPTVPNPYNLLSSLPPSYTWYSVLDLKDAFFCLRLHPNSQPLFAFEWKDPEKGNTGQLTWTRLPQGFKNSPTLFNEALHRDLAPFRALNPQVVLLQYVDDLLVAAPTYEDCKKGTQKLLQELSKLGYRVSAKKAQLCQREVTYLGYLLKEGKRWLTPARKATVMKIPVPTTPRQVREFLGKAGFCRLFIPGFASLAAPLYPLTKPSIPFIWTEEHQQAFDHIKKALLSAPALALPDLTKPFTLYIDERAGVARGVLTQTLGPWRRPVAYLSKKLDPVASGWPTCLKAVAAVALLLKDADKLTLGQNVTVIASHSLESIVRQPPDRWMTNARMTHYQSLLLNERVSFAPPAVLNPATLLPVESEATPVHRCSEILAEETGTRRDLEDQPLPGVPTWYTDGSSFITEGKRRAGAPIVDGKRTVWASSLPEGTSAQKAELVALTQALRLAEGKNINIYTDSRYAFATAHIHGAIYKQRGWLTSAGKDIKNKEEILALLEAIHLPRRVAIIHCPGHQRGSNPVATGNRRADEAAKQAALSTRVLAGTTKPAGKRTADGSEFEKRTADGSEFESPKKKAKVE

SEQ ID NO: 1453 - protein, 2094 aa, synthetic construct
MPAAKRVKLDGGDKKYSIGLDIGTNSVGWAVITDEYKVPSKKFKVLGNTDRHSIKKNLIGALLFDSGETAEATRLKRTARRRYTRRKNRICYLQEIFSNEMAKVDDSFFHRLEESFLVEEDKKHERHPIFGNIVDEVAYHEKYPTIYHLRKKLVDSTDKADLRLIYLALAHMIKFRGHFLIEGDLNPDNSDVDKLFIQLVQTYNQLFEENPINASGVDAKAILSARLSKSRRLENLIAQLPGEKKNGLFGNLIALSLGLTPNFKSNFDLAEDAKLQLSKDTYDDDLDNLLAQIGDQYADLFLAAKNLSDAILLSDILRVNTEITKAPLSASMIKRYDEHHQDLTLLKALVRQQLPEKYKEIFFDQSKNGYAGYIDGGASQEEFYKFIKPILEKMDGTEELLVKLNREDLLRKQRTFDNGSIPHQIHLGELHAILRRQEDFYPFLKDNREKIEKILTFRIPYYVGPLARGNSRFAWMTRKSEETITPWNFEEVVDKGASAQSFIERMTNFDKNLPNEKVLPKHSLLYEYFTVYNELTKVKYVTEGMRKPAFLSGEQKKAIVDLLFKTNRKVTVKQLKEDYFKKIECFDSVEISGVEDRFNASLGTYHDLLKIIKDKDFLDNEENEDILEDIVLTLTLFEDREMIEERLKTYAHLFDDKVMKQLKRRRYTGWGRLSRKLINGIRDKQSGKTILDFLKSDGFANRNFMQLIHDDSLTFKEDIQKAQVSGQGDSLHEHIANLAGSPAIKKGILQTVKVVDELVKVMGRHKPENIVIEMARENQTTQKGQKNSRERMKRIEEGIKELGSQILKEHPVENTQLQNEKLYLYYLQNGRDMYVDQELDINRLSDYDVDHIVPQSFLKDDSIDNKVLTRSDKARGKSDNVPSEEVVKKMKNYWRQLLNAKLITQRKFDNLTKAERGGLSELDKAGFIKRQLVETRQITKHVAQILDSRMNTKYDENDKLIREVKVITLKSKLVSDFRKDFQFYKVREINNYHHAHDAYLNAVVGTALIKKYPKLESEFVYGDYKVYDVRKMIAKSEQEIGKATAKYFFYSNIMNFFKTEITLANGEIRKRPLIETNGETGEIVWDKGRDFATVRKVLSMPQVNIVKKTEVQTGGFSKESILPKRNSDKLIARKKDWDPKKYGGFDSPTVAYSVLVVAKVEKGKSKKLKSVKELLGITIMERSSFEKNPIDFLEAKGYKEVKKDLIIKLPKYSLFELENGRKRMLASAGELQKGNELALPSKYVNFLYLASHYEKLKGSPEDNEQKQLFVEQHKHYLDEIIEQISEFSKRVILADANLDKVLSAYNKHRDKPIREQAENIIHLFTLTNLGAPAAFKYFDTTIDRKRYTSTKEVLDATLIHQSITGLYETRIDLSQLGGDGGPAPAPAPAPAPGGVLNLEEEYRLHEKPVPSSIDPSWLQLFPTVWAERAGMGLANQVPPVVVELRSGASPVAVRQYPMSKEAREGIRPHIQKFLDLGVLVPCRSPWNTPLLPVKKPGTNDYRPVQDLREINKRVQDIHPTVPNPYNLLSSLPPSYTWYSVLDLKDAFFCLRLHPNSQPLFAFEWKDPEKGNTGQLTWTRLPQGFKNSPTLFNEALHRDLAPFRALNPQVVLLQYVDDLLVAAPTYEDCKKGTQKLLQELSKLGYRVSAKKAQLCQREVTYLGYLLKEGKRWLTPARKATVMKIPVPTTPRQVREFLGKAGFCRLFIPGFASLAAPLYPLTKPSIPFIWTEEHQQAFDHIKKALLSAPALALPDLTKPFTLYIDERAGVARGVLTQTLGPWRRPVAYLSKKLDPVASGWPTCLKAVAAVALLLKDADKLTLGQNVTVIASHSLESIVRQPPDRWMTNARMTHYQSLLLNERVSFAPPAVLNPATLLPVESEATPVHRCSEILAEETGTRRDLEDQPLPGVPTWYTDGSSFITEGKRRAGAPIVDGKRTVWASSLPEGTSAQKAELVALTQALRLAEGKNINIYTDSRYAFATAHIHGAIYKQRGWLTSAGKDIKNKEEILALLEAIHLPRRVAIIHCPGHQRGSNPVATGNRRADEAAKQAALSTRVLAGTTKPAGKRTADGSEFEKRTADGSEFESPKKKAKVE

SEQ ID NO: 1454 - protein, 2113 aa, synthetic construct
MPAAKRVKLDGGDKKYSIGLDIGTNSVGWAVITDEYKVPSKKFKVLGNTDRHSIKKNLIGALLFDSGETAEATRLKRTARRRYTRRKNRICYLQEIFSNEMAKVDDSFFHRLEESFLVEEDKKHERHPIFGNIVDEVAYHEKYPTIYHLRKKLVDSTDKADLRLIYLALAHMIKFRGHFLIEGDLNPDNSDVDKLFIQLVQTYNQLFEENPINASGVDAKAILSARLSKSRRLENLIAQLPGEKKNGLFGNLIALSLGLTPNFKSNFDLAEDAKLQLSKDTYDDDLDNLLAQIGDQYADLFLAAKNLSDAILLSDILRVNTEITKAPLSASMIKRYDEHHQDLTLLKALVRQQLPEKYKEIFFDQSKNGYAGYIDGGASQEEFYKFIKPILEKMDGTEELLVKLNREDLLRKQRTFDNGSIPHQIHLGELHAILRRQEDFYPFLKDNREKIEKILTFRIPYYVGPLARGNSRFAWMTRKSEETITPWNFEEVVDKGASAQSFIERMTNFDKNLPNEKVLPKHSLLYEYFTVYNELTKVKYVTEGMRKPAFLSGEQKKAIVDLLFKTNRKVTVKQLKEDYFKKIECFDSVEISGVEDRFNASLGTYHDLLKIIKDKDFLDNEENEDILEDIVLTLTLFEDREMIEERLKTYAHLFDDKVMKQLKRRRYTGWGRLSRKLINGIRDKQSGKTILDFLKSDGFANRNFMQLIHDDSLTFKEDIQKAQVSGQGDSLHEHIANLAGSPAIKKGILQTVKVVDELVKVMGRHKPENIVIEMARENQTTQKGQKNSRERMKRIEEGIKELGSQILKEHPVENTQLQNEKLYLYYLQNGRDMYVDQELDINRLSDYDVDHIVPQSFLKDDSIDNKVLTRSDKARGKSDNVPSEEVVKKMKNYWRQLLNAKLITQRKFDNLTKAERGGLSELDKAGFIKRQLVETRQITKHVAQILDSRMNTKYDENDKLIREVKVITLKSKLVSDFRKDFQFYKVREINNYHHAHDAYLNAVVGTALIKKYPKLESEFVYGDYKVYDVRKMIAKSEQEIGKATAKYFFYSNIMNFFKTEITLANGEIRKRPLIETNGETGEIVWDKGRDFATVRKVLSMPQVNIVKKTEVQTGGFSKESILPKRNSDKLIARKKDWDPKKYGGFDSPTVAYSVLVVAKVEKGKSKKLKSVKELLGITIMERSSFEKNPIDFLEAKGYKEVKKDLIIKLPKYSLFELENGRKRMLASAGELQKGNELALPSKYVNFLYLASHYEKLKGSPEDNEQKQLFVEQHKHYLDEIIEQISEFSKRVILADANLDKVLSAYNKHRDKPIREQAENIIHLFTLTNLGAPAAFKYFDTTIDRKRYTSTKEVLDATLIHQSITGLYETRIDLSQLGGDGGEAAAKEAAAKEAAAKEAAAKEAAAKEAAAKGGVLNLEEEYRLHEKPVPSSIDPSWLQLFPTVWAERAGMGLANQVPPVVVELRSGASPVAVRQYPMSKEAREGIRPHIQKFLDLGVLVPCRSPWNTPLLPVKKPGTNDYRPVQDLREINKRVQDIHPTVPNPYNLLSSLPPSYTWYSVLDLKDAFFCLRLHPNSQPLFAFEWKDPEKGNTGQLTWTRLPQGFKNSPTLFNEALHRDLAPFRALNPQVVLLQYVDDLLVAAPTYEDCKKGTQKLLQELSKLGYRVSAKKAQLCQREVTYLGYLLKEGKRWLTPARKATVMKIPVPTTPRQVREFLGKAGFCRLFIPGFASLAAPLYPLTKPSIPFIWTEEHQQAFDHIKKALLSAPALALPDLTKPFTLYIDERAGVARGVLTQTLGPWRRPVAYLSKKLDPVASGWPTCLKAVAAVALLLKDADKLTLGQNVTVIASHSLESIVRQPPDRWMTNARMTHYQSLLLNERVSFAPPAVLNPATLLPVESEATPVHRCSEILAEETGTRRDLEDQPLPGVPTWYTDGSSFITEGKRRAGAPIVDGKRTVWASSLPEGTSAQKAELVALTQALRLAEGKNINIYTDSRYAFATAHIHGAIYKQRGWLTSAGKDIKNKEEILALLEAIHLPRRVAIIHCPGHQRGSNPVATGNRRADEAAKQAALSTRVLAGTTKPAGKRTADGSEFEKRTADGSEFESPKKKAKVE

SEQ ID NO: 1455 - protein, 2094 aa, synthetic construct
MPAAKRVKLDGGDKKYSIGLDIGTNSVGWAVITDEYKVPSKKFKVLGNTDRHSIKKNLIGALLFDSGETAEATRLKRTARRRYTRRKNRICYLQEIFSNEMAKVDDSFFHRLEESFLVEEDKKHERHPIFGNIVDEVAYHEKYPTIYHLRKKLVDSTDKADLRLIYLALAHMIKFRGHFLIEGDLNPDNSDVDKLFIQLVQTYNQLFEENPINASGVDAKAILSARLSKSRRLENLIAQLPGEKKNGLFGNLIALSLGLTPNFKSNFDLAEDAKLQLSKDTYDDDLDNLLAQIGDQYADLFLAAKNLSDAILLSDILRVNTEITKAPLSASMIKRYDEHHQDLTLLKALVRQQLPEKYKEIFFDQSKNGYAGYIDGGASQEEFYKFIKPILEKMDGTEELLVKLNREDLLRKQRTFDNGSIPHQIHLGELHAILRRQEDFYPFLKDNREKIEKILTFRIPYYVGPLARGNSRFAWMTRKSEETITPWNFEEVVDKGASAQSFIERMTNFDKNLPNEKVLPKHSLLYEYFTVYNELTKVKYVTEGMRKPAFLSGEQKKAIVDLLFKTNRKVTVKQLKEDYFKKIECFDSVEISGVEDRFNASLGTYHDLLKIIKDKDFLDNEENEDILEDIVLTLTLFEDREMIEERLKTYAHLFDDKVMKQLKRRRYTGWGRLSRKLINGIRDKQSGKTILDFLKSDGFANRNFMQLIHDDSLTFKEDIQKAQVSGQGDSLHEHIANLAGSPAIKKGILQTVKVVDELVKVMGRHKPENIVIEMARENQTTQKGQKNSRERMKRIEEGIKELGSQILKEHPVENTQLQNEKLYLYYLQNGRDMYVDQELDINRLSDYDVDHIVPQSFLKDDSIDNKVLTRSDKARGKSDNVPSEEVVKKMKNYWRQLLNAKLITQRKFDNLTKAERGGLSELDKAGFIKRQLVETRQITKHVAQILDSRMNTKYDENDKLIREVKVITLKSKLVSDFRKDFQFYKVREINNYHHAHDAYLNAVVGTALIKKYPKLESEFVYGDYKVYDVRKMIAKSEQEIGKATAKYFFYSNIMNFFKTEITLANGEIRKRPLIETNGETGEIVWDKGRDFATVRKVLSMPQVNIVKKTEVQTGGFSKESILPKRNSDKLIARKKDWDPKKYGGFDSPTVAYSVLVVAKVEKGKSKKLKSVKELLGITIMERSSFEKNPIDFLEAKGYKEVKKDLIIKLPKYSLFELENGRKRMLASAGELQKGNELALPSKYVNFLYLASHYEKLKGSPEDNEQKQLFVEQHKHYLDEIIEQISEFSKRVILADANLDKVLSAYNKHRDKPIREQAENIIHLFTLTNLGAPAAFKYFDTTIDRKRYTSTKEVLDATLIHQSITGLYETRIDLSQLGGDGGEAAAKGGGGSSGGVLNLEEEYRLHEKPVPSSIDPSWLQLFPTVWAERAGMGLANQVPPVVVELRSGASPVAVRQYPMSKEAREGIRPHIQKFLDLGVLVPCRSPWNTPLLPVKKPGTNDYRPVQDLREINKRVQDIHPTVPNPYNLLSSLPPSYTWYSVLDLKDAFFCLRLHPNSQPLFAFEWKDPEKGNTGQLTWTRLPQGFKNSPTLFNEALHRDLAPFRALNPQVVLLQYVDDLLVAAPTYEDCKKGTQKLLQELSKLGYRVSAKKAQLCQREVTYLGYLLKEGKRWLTPARKATVMKIPVPTTPRQVREFLGKAGFCRLFIPGFASLAAPLYPLTKPSIPFIWTEEHQQAFDHIKKALLSAPALALPDLTKPFTLYIDERAGVARGVLTQTLGPWRRPVAYLSKKLDPVASGWPTCLKAVAAVALLLKDADKLTLGQNVTVIASHSLESIVRQPPDRWMTNARMTHYQSLLLNERVSFAPPAVLNPATLLPVESEATPVHRCSEILAEETGTRRDLEDQPLPGVPTWYTDGSSFITEGKRRAGAPIVDGKRTVWASSLPEGTSAQKAELVALTQALRLAEGKNINIYTDSRYAFATAHIHGAIYKQRGWLTSAGKDIKNKEEILALLEAIHLPRRVAIIHCPGHQRGSNPVATGNRRADEAAKQAALSTRVLAGTTKPAGKRTADGSEFEKRTADGSEFESPKKKAKVE

SEQ ID NO: 1456 - protein, 2094 aa, synthetic construct
MPAAKRVKLDGGDKKYSIGLDIGTNSVGWAVITDEYKVPSKKFKVLGNTDRHSIKKNLIGALLFDSGETAEATRLKRTARRRYTRRKNRICYLQEIFSNEMAKVDDSFFHRLEESFLVEEDKKHERHPIFGNIVDEVAYHEKYPTIYHLRKKLVDSTDKADLRLIYLALAHMIKFRGHFLIEGDLNPDNSDVDKLFIQLVQTYNQLFEENPINASGVDAKAILSARLSKSRRLENLIAQLPGEKKNGLFGNLIALSLGLTPNFKSNFDLAEDAKLQLSKDTYDDDLDNLLAQIGDQYADLFLAAKNLSDAILLSDILRVNTEITKAPLSASMIKRYDEHHQDLTLLKALVRQQLPEKYKEIFFDQSKNGYAGYIDGGASQEEFYKFIKPILEKMDGTEELLVKLNREDLLRKQRTFDNGSIPHQIHLGELHAILRRQEDFYPFLKDNREKIEKILTFRIPYYVGPLARGNSRFAWMTRKSEETITPWNFEEVVDKGASAQSFIERMTNFDKNLPNEKVLPKHSLLYEYFTVYNELTKVKYVTEGMRKPAFLSGEQKKAIVDLLFKTNRKVTVKQLKEDYFKKIECFDSVEISGVEDRFNASLGTYHDLLKIIKDKDFLDNEENEDILEDIVLTLTLFEDREMIEERLKTYAHLFDDKVMKQLKRRRYTGWGRLSRKLINGIRDKQSGKTILDFLKSDGFANRNFMQLIHDDSLTFKEDIQKAQVSGQGDSLHEHIANLAGSPAIKKGILQTVKVVDELVKVMGRHKPENIVIEMARENQTTQKGQKNSRERMKRIEEGIKELGSQILKEHPVENTQLQNEKLYLYYLQNGRDMYVDQELDINRLSDYDVDHIVPQSFLKDDSIDNKVLTRSDKARGKSDNVPSEEVVKKMKNYWRQLLNAKLITQRKFDNLTKAERGGLSELDKAGFIKRQLVETRQITKHVAQILDSRMNTKYDENDKLIREVKVITLKSKLVSDFRKDFQFYKVREINNYHHAHDAYLNAVVGTALIKKYPKLESEFVYGDYKVYDVRKMIAKSEQEIGKATAKYFFYSNIMNFFKTEITLANGEIRKRPLIETNGETGEIVWDKGRDFATVRKVLSMPQVNIVKKTEVQTGGFSKESILPKRNSDKLIARKKDWDPKKYGGFDSPTVAYSVLVVAKVEKGKSKKLKSVKELLGITIMERSSFEKNPIDFLEAKGYKEVKKDLIIKLPKYSLFELENGRKRMLASAGELQKGNELALPSKYVNFLYLASHYEKLKGSPEDNEQKQLFVEQHKHYLDEIIEQISEFSKRVILADANLDKVLSAYNKHRDKPIREQAENIIHLFTLTNLGAPAAFKYFDTTIDRKRYTSTKEVLDATLIHQSITGLYETRIDLSQLGGDGGGGGGGSEAAAKGGVLNLEEEYRLHEKPVPSSIDPSWLQLFPTVWAERAGMGLANQVPPVVVELRSGASPVAVRQYPMSKEAREGIRPHIQKFLDLGVLVPCRSPWNTPLLPVKKPGTNDYRPVQDLREINKRVQDIHPTVPNPYNLLSSLPPSYTWYSVLDLKDAFFCLRLHPNSQPLFAFEWKDPEKGNTGQLTWTRLPQGFKNSPTLFNEALHRDLAPFRALNPQVVLLQYVDDLLVAAPTYEDCKKGTQKLLQELSKLGYRVSAKKAQLCQREVTYLGYLLKEGKRWLTPARKATVMKIPVPTTPRQVREFLGKAGFCRLFIPGFASLAAPLYPLTKPSIPFIWTEEHQQAFDHIKKALLSAPALALPDLTKPFTLYIDERAGVARGVLTQTLGPWRRPVAYLSKKLDPVASGWPTCLKAVAAVALLLKDADKLTLGQNVTVIASHSLESIVRQPPDRWMTNARMTHYQSLLLNERVSFAPPAVLNPATLLPVESEATPVHRCSEILAEETGTRRDLEDQPLPGVPTWYTDGSSFITEGKRRAGAPIVDGKRTVWASSLPEGTSAQKAELVALTQALRLAEGKNINIYTDSRYAFATAHIHGAIYKQRGWLTSAGKDIKNKEEILALLEAIHLPRRVAIIHCPGHQRGSNPVATGNRRADEAAKQAALSTRVLAGTTKPAGKRTADGSEFEKRTADGSEFESPKKKAKVE

SEQ ID NO: 1457 - protein, 2094 aa, synthetic construct
MPAAKRVKLDGGDKKYSIGLDIGTNSVGWAVITDEYKVPSKKFKVLGNTDRHSIKKNLIGALLFDSGETAEATRLKRTARRRYTRRKNRICYLQEIFSNEMAKVDDSFFHRLEESFLVEEDKKHERHPIFGNIVDEVAYHEKYPTIYHLRKKLVDSTDKADLRLIYLALAHMIKFRGHFLIEGDLNPDNSDVDKLFIQLVQTYNQLFEENPINASGVDAKAILSARLSKSRRLENLIAQLPGEKKNGLFGNLIALSLGLTPNFKSNFDLAEDAKLQLSKDTYDDDLDNLLAQIGDQYADLFLAAKNLSDAILLSDILRVNTEITKAPLSASMIKRYDEHHQDLTLLKALVRQQLPEKYKEIFFDQSKNGYAGYIDGGASQEEFYKFIKPILEKMDGTEELLVKLNREDLLRKQRTFDNGSIPHQIHLGELHAILRRQEDFYPFLKDNREKIEKILTFRIPYYVGPLARGNSRFAWMTRKSEETITPWNFEEVVDKGASAQSFIERMTNFDKNLPNEKVLPKHSLLYEYFTVYNELTKVKYVTEGMRKPAFLSGEQKKAIVDLLFKTNRKVTVKQLKEDYFKKIECFDSVEISGVEDRFNASLGTYHDLLKIIKDKDFLDNEENEDILEDIVLTLTLFEDREMIEERLKTYAHLFDDKVMKQLKRRRYTGWGRLSRKLINGIRDKQSGKTILDFLKSDGFANRNFMQLIHDDSLTFKEDIQKAQVSGQGDSLHEHIANLAGSPAIKKGILQTVKVVDELVKVMGRHKPENIVIEMARENQTTQKGQKNSRERMKRIEEGIKELGSQILKEHPVENTQLQNEKLYLYYLQNGRDMYVDQELDINRLSDYDVDHIVPQSFLKDDSIDNKVLTRSDKARGKSDNVPSEEVVKKMKNYWRQLLNAKLITQRKFDNLTKAERGGLSELDKAGFIKRQLVETRQITKHVAQILDSRMNTKYDENDKLIREVKVITLKSKLVSDFRKDFQFYKVREINNYHHAHDAYLNAVVGTALIKKYPKLESEFVYGDYKVYDVRKMIAKSEQEIGKATAKYFFYSNIMNFFKTEITLANGEIRKRPLIETNGETGEIVWDKGRDFATVRKVLSMPQVNIVKKTEVQTGGFSKESILPKRNSDKLIARKKDWDPKKYGGFDSPTVAYSVLVVAKVEKGKSKKLKSVKELLGITIMERSSFEKNPIDFLEAKGYKEVKKDLIIKLPKYSLFELENGRKRMLASAGELQKGNELALPSKYVNFLYLASHYEKLKGSPEDNEQKQLFVEQHKHYLDEIIEQISEFSKRVILADANLDKVLSAYNKHRDKPIREQAENIIHLFTLTNLGAPAAFKYFDTTIDRKRYTSTKEVLDATLIHQSITGLYETRIDLSQLGGDGGGSSPAPEAAAKGGVLNLEEEYRLHEKPVPSSIDPSWLQLFPTVWAERAGMGLANQVPPVVVELRSGASPVAVRQYPMSKEAREGIRPHIQKFLDLGVLVPCRSPWNTPLLPVKKPGTNDYRPVQDLREINKRVQDIHPTVPNPYNLLSSLPPSYTWYSVLDLKDAFFCLRLHPNSQPLFAFEWKDPEKGNTGQLTWTRLPQGFKNSPTLFNEALHRDLAPFRALNPQVVLLQYVDDLLVAAPTYEDCKKGTQKLLQELSKLGYRVSAKKAQLCQREVTYLGYLLKEGKRWLTPARKATVMKIPVPTTPRQVREFLGKAGFCRLFIPGFASLAAPLYPLTKPSIPFIWTEEHQQAFDHIKKALLSAPALALPDLTKPFTLYIDERAGVARGVLTQTLGPWRRPVAYLSKKLDPVASGWPTCLKAVAAVALLLKDADKLTLGQNVTVIASHSLESIVRQPPDRWMTNARMTHYQSLLLNERVSFAPPAVLNPATLLPVESEATPVHRCSEILAEETGTRRDLEDQPLPGVPTWYTDGSSFITEGKRRAGAPIVDGKRTVWASSLPEGTSAQKAELVALTQALRLAEGKNINIYTDSRYAFATAHIHGAIYKQRGWLTSAGKDIKNKEEILALLEAIHLPRRVAIIHCPGHQRGSNPVATGNRRADEAAKQAALSTRVLAGTTKPAGKRTADGSEFEKRTADGSEFESPKKKAKVE

SEQ ID NO: 1458 - protein, 2098 aa, synthetic construct
MPAAKRVKLDGGDKKYSIGLDIGTNSVGWAVITDEYKVPSKKFKVLGNTDRHSIKKNLIGALLFDSGETAEATRLKRTARRRYTRRKNRICYLQEIFSNEMAKVDDSFFHRLEESFLVEEDKKHERHPIFGNIVDEVAYHEKYPTIYHLRKKLVDSTDKADLRLIYLALAHMIKFRGHFLIEGDLNPDNSDVDKLFIQLVQTYNQLFEENPINASGVDAKAILSARLSKSRRLENLIAQLPGEKKNGLFGNLIALSLGLTPNFKSNFDLAEDAKLQLSKDTYDDDLDNLLAQIGDQYADLFLAAKNLSDAILLSDILRVNTEITKAPLSASMIKRYDEHHQDLTLLKALVRQQLPEKYKEIFFDQSKNGYAGYIDGGASQEEFYKFIKPILEKMDGTEELLVKLNREDLLRKQRTFDNGSIPHQIHLGELHAILRRQEDFYPFLKDNREKIEKILTFRIPYYVGPLARGNSRFAWMTRKSEETITPWNFEEVVDKGASAQSFIERMTNFDKNLPNEKVLPKHSLLYEYFTVYNELTKVKYVTEGMRKPAFLSGEQKKAIVDLLFKTNRKVTVKQLKEDYFKKIECFDSVEISGVEDRFNASLGTYHDLLKIIKDKDFLDNEENEDILEDIVLTLTLFEDREMIEERLKTYAHLFDDKVMKQLKRRRYTGWGRLSRKLINGIRDKQSGKTILDFLKSDGFANRNFMQLIHDDSLTFKEDIQKAQVSGQGDSLHEHIANLAGSPAIKKGILQTVKVVDELVKVMGRHKPENIVIEMARENQTTQKGQKNSRERMKRIEEGIKELGSQILKEHPVENTQLQNEKLYLYYLQNGRDMYVDQELDINRLSDYDVDHIVPQSFLKDDSIDNKVLTRSDKARGKSDNVPSEEVVKKMKNYWRQLLNAKLITQRKFDNLTKAERGGLSELDKAGFIKRQLVETRQITKHVAQILDSRMNTKYDENDKLIREVKVITLKSKLVSDFRKDFQFYKVREINNYHHAHDAYLNAVVGTALIKKYPKLESEFVYGDYKVYDVRKMIAKSEQEIGKATAKYFFYSNIMNFFKTEITLANGEIRKRPLIETNGETGEIVWDKGRDFATVRKVLSMPQVNIVKKTEVQTGGFSKESILPKRNSDKLIARKKDWDPKKYGGFDSPTVAYSVLVVAKVEKGKSKKLKSVKELLGITIMERSSFEKNPIDFLEAKGYKEVKKDLIIKLPKYSLFELENGRKRMLASAGELQKGNELALPSKYVNFLYLASHYEKLKGSPEDNEQKQLFVEQHKHYLDEIIEQISEFSKRVILADANLDKVLSAYNKHRDKPIREQAENIIHLFTLTNLGAPAAFKYFDTTIDRKRYTSTKEVLDATLIHQSITGLYETRIDLSQLGGDGGGGGGSGGGGSGGGGSGGVLNLEEEYRLHEKPVPSSIDPSWLQLFPTVWAERAGMGLANQVPPVVVELRSGASPVAVRQYPMSKEAREGIRPHIQKFLDLGVLVPCRSPWNTPLLPVKKPGTNDYRPVQDLREINKRVQDIHPTVPNPYNLLSSLPPSYTWYSVLDLKDAFFCLRLHPNSQPLFAFEWKDPEKGNTGQLTWTRLPQGFKNSPTLFNEALHRDLAPFRALNPQVVLLQYVDDLLVAAPTYEDCKKGTQKLLQELSKLGYRVSAKKAQLCQREVTYLGYLLKEGKRWLTPARKATVMKIPVPTTPRQVREFLGKAGFCRLFIPGFASLAAPLYPLTKPSIPFIWTEEHQQAFDHIKKALLSAPALALPDLTKPFTLYIDERAGVARGVLTQTLGPWRRPVAYLSKKLDPVASGWPTCLKAVAAVALLLKDADKLTLGQNVTVIASHSLESIVRQPPDRWMTNARMTHYQSLLLNERVSFAPPAVLNPATLLPVESEATPVHRCSEILAEETGTRRDLEDQPLPGVPTWYTDGSSFITEGKRRAGAPIVDGKRTVWASSLPEGTSAQKAELVALTQALRLAEGKNINIYTDSRYAFATAHIHGAIYKQRGWLTSAGKDIKNKEEILALLEAIHLPRRVAIIHCPGHQRGSNPVATGNRRADEAAKQAALSTRVLAGTTKPAGKRTADGSEFEKRTADGSEFESPKKKAKVE

SEQ ID NO: 1459 - protein, 2094 aa, synthetic construct
MPAAKRVKLDGGDKKYSIGLDIGTNSVGWAVITDEYKVPSKKFKVLGNTDRHSIKKNLIGALLFDSGETAEATRLKRTARRRYTRRKNRICYLQEIFSNEMAKVDDSFFHRLEESFLVEEDKKHERHPIFGNIVDEVAYHEKYPTIYHLRKKLVDSTDKADLRLIYLALAHMIKFRGHFLIEGDLNPDNSDVDKLFIQLVQTYNQLFEENPINASGVDAKAILSARLSKSRRLENLIAQLPGEKKNGLFGNLIALSLGLTPNFKSNFDLAEDAKLQLSKDTYDDDLDNLLAQIGDQYADLFLAAKNLSDAILLSDILRVNTEITKAPLSASMIKRYDEHHQDLTLLKALVRQQLPEKYKEIFFDQSKNGYAGYIDGGASQEEFYKFIKPILEKMDGTEELLVKLNREDLLRKQRTFDNGSIPHQIHLGELHAILRRQEDFYPFLKDNREKIEKILTFRIPYYVGPLARGNSRFAWMTRKSEETITPWNFEEVVDKGASAQSFIERMTNFDKNLPNEKVLPKHSLLYEYFTVYNELTKVKYVTEGMRKPAFLSGEQKKAIVDLLFKTNRKVTVKQLKEDYFKKIECFDSVEISGVEDRFNASLGTYHDLLKIIKDKDFLDNEENEDILEDIVLTLTLFEDREMIEERLKTYAHLFDDKVMKQLKRRRYTGWGRLSRKLINGIRDKQSGKTILDFLKSDGFANRNFMQLIHDDSLTFKEDIQKAQVSGQGDSLHEHIANLAGSPAIKKGILQTVKVVDELVKVMGRHKPENIVIEMARENQTTQKGQKNSRERMKRIEEGIKELGSQILKEHPVENTQLQNEKLYLYYLQNGRDMYVDQELDINRLSDYDVDHIVPQSFLKDDSIDNKVLTRSDKARGKSDNVPSEEVVKKMKNYWRQLLNAKLITQRKFDNLTKAERGGLSELDKAGFIKRQLVETRQITKHVAQILDSRMNTKYDENDKLIREVKVITLKSKLVSDFRKDFQFYKVREINNYHHAHDAYLNAVVGTALIKKYPKLESEFVYGDYKVYDVRKMIAKSEQEIGKATAKYFFYSNIMNFFKTEITLANGEIRKRPLIETNGETGEIVWDKGRDFATVRKVLSMPQVNIVKKTEVQTGGFSKESILPKRNSDKLIARKKDWDPKKYGGFDSPTVAYSVLVVAKVEKGKSKKLKSVKELLGITIMERSSFEKNPIDFLEAKGYKEVKKDLIIKLPKYSLFELENGRKRMLASAGELQKGNELALPSKYVNFLYLASHYEKLKGSPEDNEQKQLFVEQHKHYLDEIIEQISEFSKRVILADANLDKVLSAYNKHRDKPIREQAENIIHLFTLTNLGAPAAFKYFDTTIDRKRYTSTKEVLDATLIHQSITGLYETRIDLSQLGGDGGPAPGGGEAAAKGGVLNLEEEYRLHEKPVPSSIDPSWLQLFPTVWAERAGMGLANQVPPVVVELRSGASPVAVRQYPMSKEAREGIRPHIQKFLDLGVLVPCRSPWNTPLLPVKKPGTNDYRPVQDLREINKRVQDIHPTVPNPYNLLSSLPPSYTWYSVLDLKDAFFCLRLHPNSQPLFAFEWKDPEKGNTGQLTWTRLPQGFKNSPTLFNEALHRDLAPFRALNPQVVLLQYVDDLLVAAPTYEDCKKGTQKLLQELSKLGYRVSAKKAQLCQREVTYLGYLLKEGKRWLTPARKATVMKIPVPTTPRQVREFLGKAGFCRLFIPGFASLAAPLYPLTKPSIPFIWTEEHQQAFDHIKKALLSAPALALPDLTKPFTLYIDERAGVARGVLTQTLGPWRRPVAYLSKKLDPVASGWPTCLKAVAAVALLLKDADKLTLGQNVTVIASHSLESIVRQPPDRWMTNARMTHYQSLLLNERVSFAPPAVLNPATLLPVESEATPVHRCSEILAEETGTRRDLEDQPLPGVPTWYTDGSSFITEGKRRAGAPIVDGKRTVWASSLPEGTSAQKAELVALTQALRLAEGKNINIYTDSRYAFATAHIHGAIYKQRGWLTSAGKDIKNKEEILALLEAIHLPRRVAIIHCPGHQRGSNPVATGNRRADEAAKQAALSTRVLAGTTKPAGKRTADGSEFEKRTADGSEFESPKKKAKVE

SEQ ID NO: 1460 - protein, 2092 aa, synthetic construct
MPAAKRVKLDGGDKKYSIGLDIGTNSVGWAVITDEYKVPSKKFKVLGNTDRHSIKKNLIGALLFDSGETAEATRLKRTARRRYTRRKNRICYLQEIFSNEMAKVDDSFFHRLEESFLVEEDKKHERHPIFGNIVDEVAYHEKYPTIYHLRKKLVDSTDKADLRLIYLALAHMIKFRGHFLIEGDLNPDNSDVDKLFIQLVQTYNQLFEENPINASGVDAKAILSARLSKSRRLENLIAQLPGEKKNGLFGNLIALSLGLTPNFKSNFDLAEDAKLQLSKDTYDDDLDNLLAQIGDQYADLFLAAKNLSDAILLSDILRVNTEITKAPLSASMIKRYDEHHQDLTLLKALVRQQLPEKYKEIFFDQSKNGYAGYIDGGASQEEFYKFIKPILEKMDGTEELLVKLNREDLLRKQRTFDNGSIPHQIHLGELHAILRRQEDFYPFLKDNREKIEKILTFRIPYYVGPLARGNSRFAWMTRKSEETITPWNFEEVVDKGASAQSFIERMTNFDKNLPNEKVLPKHSLLYEYFTVYNELTKVKYVTEGMRKPAFLSGEQKKAIVDLLFKTNRKVTVKQLKEDYFKKIECFDSVEISGVEDRFNASLGTYHDLLKIIKDKDFLDNEENEDILEDIVLTLTLFEDREMIEERLKTYAHLFDDKVMKQLKRRRYTGWGRLSRKLINGIRDKQSGKTILDFLKSDGFANRNFMQLIHDDSLTFKEDIQKAQVSGQGDSLHEHIANLAGSPAIKKGILQTVKVVDELVKVMGRHKPENIVIEMARENQTTQKGQKNSRERMKRIEEGIKELGSQILKEHPVENTQLQNEKLYLYYLQNGRDMYVDQELDINRLSDYDVDHIVPQSFLKDDSIDNKVLTRSDKARGKSDNVPSEEVVKKMKNYWRQLLNAKLITQRKFDNLTKAERGGLSELDKAGFIKRQLVETRQITKHVAQILDSRMNTKYDENDKLIREVKVITLKSKLVSDFRKDFQFYKVREINNYHHAHDAYLNAVVGTALIKKYPKLESEFVYGDYKVYDVRKMIAKSEQEIGKATAKYFFYSNIMNFFKTEITLANGEIRKRPLIETNGETGEIVWDKGRDFATVRKVLSMPQVNIVKKTEVQTGGFSKESILPKRNSDKLIARKKDWDPKKYGGFDSPTVAYSVLVVAKVEKGKSKKLKSVKELLGITIMERSSFEKNPIDFLEAKGYKEVKKDLIIKLPKYSLFELENGRKRMLASAGELQKGNELALPSKYVNFLYLASHYEKLKGSPEDNEQKQLFVEQHKHYLDEIIEQISEFSKRVILADANLDKVLSAYNKHRDKPIREQAENIIHLFTLTNLGAPAAFKYFDTTIDRKRYTSTKEVLDATLIHQSITGLYETRIDLSQLGGDGGPAPGGGGGSGGVLNLEEEYRLHEKPVPSSIDPSWLQLFPTVWAERAGMGLANQVPPVVVELRSGASPVAVRQYPMSKEAREGIRPHIQKFLDLGVLVPCRSPWNTPLLPVKKPGTNDYRPVQDLREINKRVQDIHPTVPNPYNLLSSLPPSYTWYSVLDLKDAFFCLRLHPNSQPLFAFEWKDPEKGNTGQLTWTRLPQGFKNSPTLFNEALHRDLAPFRALNPQVVLLQYVDDLLVAAPTYEDCKKGTQKLLQELSKLGYRVSAKKAQLCQREVTYLGYLLKEGKRWLTPARKATVMKIPVPTTPRQVREFLGKAGFCRLFIPGFASLAAPLYPLTKPSIPFIWTEEHQQAFDHIKKALLSAPALALPDLTKPFTLYIDERAGVARGVLTQTLGPWRRPVAYLSKKLDPVASGWPTCLKAVAAVALLLKDADKLTLGQNVTVIASHSLESIVRQPPDRWMTNARMTHYQSLLLNERVSFAPPAVLNPATLLPVESEATPVHRCSEILAEETGTRRDLEDQPLPGVPTWYTDGSSFITEGKRRAGAPIVDGKRTVWASSLPEGTSAQKAELVALTQALRLAEGKNINIYTDSRYAFATAHIHGAIYKQRGWLTSAGKDIKNKEEILALLEAIHLPRRVAIIHCPGHQRGSNPVATGNRRADEAAKQAALSTRVLAGTTKPAGKRTADGSEFEKRTADGSEFESPKKKAKVE

SEQ ID NO: 1461 - protein, 2094 aa, synthetic construct
MPAAKRVKLDGGDKKYSIGLDIGTNSVGWAVITDEYKVPSKKFKVLGNTDRHSIKKNLIGALLFDSGETAEATRLKRTARRRYTRRKNRICYLQEIFSNEMAKVDDSFFHRLEESFLVEEDKKHERHPIFGNIVDEVAYHEKYPTIYHLRKKLVDSTDKADLRLIYLALAHMIKFRGHFLIEGDLNPDNSDVDKLFIQLVQTYNQLFEENPINASGVDAKAILSARLSKSRRLENLIAQLPGEKKNGLFGNLIALSLGLTPNFKSNFDLAEDAKLQLSKDTYDDDLDNLLAQIGDQYADLFLAAKNLSDAILLSDILRVNTEITKAPLSASMIKRYDEHHQDLTLLKALVRQQLPEKYKEIFFDQSKNGYAGYIDGGASQEEFYKFIKPILEKMDGTEELLVKLNREDLLRKQRTFDNGSIPHQIHLGELHAILRRQEDFYPFLKDNREKIEKILTFRIPYYVGPLARGNSRFAWMTRKSEETITPWNFEEVVDKGASAQSFIERMTNFDKNLPNEKVLPKHSLLYEYFTVYNELTKVKYVTEGMRKPAFLSGEQKKAIVDLLFKTNRKVTVKQLKEDYFKKIECFDSVEISGVEDRFNASLGTYHDLLKIIKDKDFLDNEENEDILEDIVLTLTLFEDREMIEERLKTYAHLFDDKVMKQLKRRRYTGWGRLSRKLINGIRDKQSGKTILDFLKSDGFANRNFMQLIHDDSLTFKEDIQKAQVSGQGDSLHEHIANLAGSPAIKKGILQTVKVVDELVKVMGRHKPENIVIEMARENQTTQKGQKNSRERMKRIEEGIKELGSQILKEHPVENTQLQNEKLYLYYLQNGRDMYVDQELDINRLSDYDVDHIVPQSFLKDDSIDNKVLTRSDKARGKSDNVPSEEVVKKMKNYWRQLLNAKLITQRKFDNLTKAERGGLSELDKAGFIKRQLVETRQITKHVAQILDSRMNTKYDENDKLIREVKVITLKSKLVSDFRKDFQFYKVREINNYHHAHDAYLNAVVGTALIKKYPKLESEFVYGDYKVYDVRKMIAKSEQEIGKATAKYFFYSNIMNFFKTEITLANGEIRKRPLIETNGETGEIVWDKGRDFATVRKVLSMPQVNIVKKTEVQTGGFSKESILPKRNSDKLIARKKDWDPKKYGGFDSPTVAYSVLVVAKVEKGKSKKLKSVKELLGITIMERSSFEKNPIDFLEAKGYKEVKKDLIIKLPKYSLFELENGRKRMLASAGELQKGNELALPSKYVNFLYLASHYEKLKGSPEDNEQKQLFVEQHKHYLDEIIEQISEFSKRVILADANLDKVLSAYNKHRDKPIREQAENIIHLFTLTNLGAPAAFKYFDTTIDRKRYTSTKEVLDATLIHQSITGLYETRIDLSQLGGDGGGGGEAAAKGSSGGVLNLEEEYRLHEKPVPSSIDPSWLQLFPTVWAERAGMGLANQVPPVVVELRSGASPVAVRQYPMSKEAREGIRPHIQKFLDLGVLVPCRSPWNTPLLPVKKPGTNDYRPVQDLREINKRVQDIHPTVPNPYNLLSSLPPSYTWYSVLDLKDAFFCLRLHPNSQPLFAFEWKDPEKGNTGQLTWTRLPQGFKNSPTLFNEALHRDLAPFRALNPQVVLLQYVDDLLVAAPTYEDCKKGTQKLLQELSKLGYRVSAKKAQLCQREVTYLGYLLKEGKRWLTPARKATVMKIPVPTTPRQVREFLGKAGFCRLFIPGFASLAAPLYPLTKPSIPFIWTEEHQQAFDHIKKALLSAPALALPDLTKPFTLYIDERAGVARGVLTQTLGPWRRPVAYLSKKLDPVASGWPTCLKAVAAVALLLKDADKLTLGQNVTVIASHSLESIVRQPPDRWMTNARMTHYQSLLLNERVSFAPPAVLNPATLLPVESEATPVHRCSEILAEETGTRRDLEDQPLPGVPTWYTDGSSFITEGKRRAGAPIVDGKRTVWASSLPEGTSAQKAELVALTQALRLAEGKNINIYTDSRYAFATAHIHGAIYKQRGWLTSAGKDIKNKEEILALLEAIHLPRRVAIIHCPGHQRGSNPVATGNRRADEAAKQAALSTRVLAGTTKPAGKRTADGSEFEKRTADGSEFESPKKKAKVE

SEQ ID NO: 1462 - protein, 2088 aa, synthetic construct
MPAAKRVKLDGGDKKYSIGLDIGTNSVGWAVITDEYKVPSKKFKVLGNTDRHSIKKNLIGALLFDSGETAEATRLKRTARRRYTRRKNRICYLQEIFSNEMAKVDDSFFHRLEESFLVEEDKKHERHPIFGNIVDEVAYHEKYPTIYHLRKKLVDSTDKADLRLIYLALAHMIKFRGHFLIEGDLNPDNSDVDKLFIQLVQTYNQLFEENPINASGVDAKAILSARLSKSRRLENLIAQLPGEKKNGLFGNLIALSLGLTPNFKSNFDLAEDAKLQLSKDTYDDDLDNLLAQIGDQYADLFLAAKNLSDAILLSDILRVNTEITKAPLSASMIKRYDEHHQDLTLLKALVRQQLPEKYKEIFFDQSKNGYAGYIDGGASQEEFYKFIKPILEKMDGTEELLVKLNREDLLRKQRTFDNGSIPHQIHLGELHAILRRQEDFYPFLKDNREKIEKILTFRIPYYVGPLARGNSRFAWMTRKSEETITPWNFEEVVDKGASAQSFIERMTNFDKNLPNEKVLPKHSLLYEYFTVYNELTKVKYVTEGMRKPAFLSGEQKKAIVDLLFKTNRKVTVKQLKEDYFKKIECFDSVEISGVEDRFNASLGTYHDLLKIIKDKDFLDNEENEDILEDIVLTLTLFEDREMIEERLKTYAHLFDDKVMKQLKRRRYTGWGRLSRKLINGIRDKQSGKTILDFLKSDGFANRNFMQLIHDDSLTFKEDIQKAQVSGQGDSLHEHIANLAGSPAIKKGILQTVKVVDELVKVMGRHKPENIVIEMARENQTTQKGQKNSRERMKRIEEGIKELGSQILKEHPVENTQLQNEKLYLYYLQNGRDMYVDQELDINRLSDYDVDHIVPQSFLKDDSIDNKVLTRSDKARGKSDNVPSEEVVKKMKNYWRQLLNAKLITQRKFDNLTKAERGGLSELDKAGFIKRQLVETRQITKHVAQILDSRMNTKYDENDKLIREVKVITLKSKLVSDFRKDFQFYKVREINNYHHAHDAYLNAVVGTALIKKYPKLESEFVYGDYKVYDVRKMIAKSEQEIGKATAKYFFYSNIMNFFKTEITLANGEIRKRPLIETNGETGEIVWDKGRDFATVRKVLSMPQVNIVKKTEVQTGGFSKESILPKRNSDKLIARKKDWDPKKYGGFDSPTVAYSVLVVAKVEKGKSKKLKSVKELLGITIMERSSFEKNPIDFLEAKGYKEVKKDLIIKLPKYSLFELENGRKRMLASAGELQKGNELALPSKYVNFLYLASHYEKLKGSPEDNEQKQLFVEQHKHYLDEIIEQISEFSKRVILADANLDKVLSAYNKHRDKPIREQAENIIHLFTLTNLGAPAAFKYFDTTIDRKRYTSTKEVLDATLIHQSITGLYETRIDLSQLGGDGGGGGGSGGVLNLEEEYRLHEKPVPSSIDPSWLQLFPTVWAERAGMGLANQVPPVVVELRSGASPVAVRQYPMSKEAREGIRPHIQKFLDLGVLVPCRSPWNTPLLPVKKPGTNDYRPVQDLREINKRVQDIHPTVPNPYNLLSSLPPSYTWYSVLDLKDAFFCLRLHPNSQPLFAFEWKDPEKGNTGQLTWTRLPQGFKNSPTLFNEALHRDLAPFRALNPQVVLLQYVDDLLVAAPTYEDCKKGTQKLLQELSKLGYRVSAKKAQLCQREVTYLGYLLKEGKRWLTPARKATVMKIPVPTTPRQVREFLGKAGFCRLFIPGFASLAAPLYPLTKPSIPFIWTEEHQQAFDHIKKALLSAPALALPDLTKPFTLYIDERAGVARGVLTQTLGPWRRPVAYLSKKLDPVASGWPTCLKAVAAVALLLKDADKLTLGQNVTVIASHSLESIVRQPPDRWMTNARMTHYQSLLLNERVSFAPPAVLNPATLLPVESEATPVHRCSEILAEETGTRRDLEDQPLPGVPTWYTDGSSFITEGKRRAGAPIVDGKRTVWASSLPEGTSAQKAELVALTQALRLAEGKNINIYTDSRYAFATAHIHGAIYKQRGWLTSAGKDIKNKEEILALLEAIHLPRRVAIIHCPGHQRGSNPVATGNRRADEAAKQAALSTRVLAGTTKPAGKRTADGSEFEKRTADGSEFESPKKKAKVE

SEQ ID NO: 1463 - protein, 2094 aa, synthetic construct
MPAAKRVKLDGGDKKYSIGLDIGTNSVGWAVITDEYKVPSKKFKVLGNTDRHSIKKNLIGALLFDSGETAEATRLKRTARRRYTRRKNRICYLQEIFSNEMAKVDDSFFHRLEESFLVEEDKKHERHPIFGNIVDEVAYHEKYPTIYHLRKKLVDSTDKADLRLIYLALAHMIKFRGHFLIEGDLNPDNSDVDKLFIQLVQTYNQLFEENPINASGVDAKAILSARLSKSRRLENLIAQLPGEKKNGLFGNLIALSLGLTPNFKSNFDLAEDAKLQLSKDTYDDDLDNLLAQIGDQYADLFLAAKNLSDAILLSDILRVNTEITKAPLSASMIKRYDEHHQDLTLLKALVRQQLPEKYKEIFFDQSKNGYAGYIDGGASQEEFYKFIKPILEKMDGTEELLVKLNREDLLRKQRTFDNGSIPHQIHLGELHAILRRQEDFYPFLKDNREKIEKILTFRIPYYVGPLARGNSRFAWMTRKSEETITPWNFEEVVDKGASAQSFIERMTNFDKNLPNEKVLPKHSLLYEYFTVYNELTKVKYVTEGMRKPAFLSGEQKKAIVDLLFKTNRKVTVKQLKEDYFKKIECFDSVEISGVEDRFNASLGTYHDLLKIIKDKDFLDNEENEDILEDIVLTLTLFEDREMIEERLKTYAHLFDDKVMKQLKRRRYTGWGRLSRKLINGIRDKQSGKTILDFLKSDGFANRNFMQLIHDDSLTFKEDIQKAQVSGQGDSLHEHIANLAGSPAIKKGILQTVKVVDELVKVMGRHKPENIVIEMARENQTTQKGQKNSRERMKRIEEGIKELGSQILKEHPVENTQLQNEKLYLYYLQNGRDMYVDQELDINRLSDYDVDHIVPQSFLKDDSIDNKVLTRSDKARGKSDNVPSEEVVKKMKNYWRQLLNAKLITQRKFDNLTKAERGGLSELDKAGFIKRQLVETRQITKHVAQILDSRMNTKYDENDKLIREVKVITLKSKLVSDFRKDFQFYKVREINNYHHAHDAYLNAVVGTALIKKYPKLESEFVYGDYKVYDVRKMIAKSEQEIGKATAKYFFYSNIMNFFKTEITLANGEIRKRPLIETNGETGEIVWDKGRDFATVRKVLSMPQVNIVKKTEVQTGGFSKESILPKRNSDKLIARKKDWDPKKYGGFDSPTVAYSVLVVAKVEKGKSKKLKSVKELLGITIMERSSFEKNPIDFLEAKGYKEVKKDLIIKLPKYSLFELENGRKRMLASAGELQKGNELALPSKYVNFLYLASHYEKLKGSPEDNEQKQLFVEQHKHYLDEIIEQISEFSKRVILADANLDKVLSAYNKHRDKPIREQAENIIHLFTLTNLGAPAAFKYFDTTIDRKRYTSTKEVLDATLIHQSITGLYETRIDLSQLGGDGGGGSEAAAKGGGGGVLNLEEEYRLHEKPVPSSIDPSWLQLFPTVWAERAGMGLANQVPPVVVELRSGASPVAVRQYPMSKEAREGIRPHIQKFLDLGVLVPCRSPWNTPLLPVKKPGTNDYRPVQDLREINKRVQDIHPTVPNPYNLLSSLPPSYTWYSVLDLKDAFFCLRLHPNSQPLFAFEWKDPEKGNTGQLTWTRLPQGFKNSPTLFNEALHRDLAPFRALNPQVVLLQYVDDLLVAAPTYEDCKKGTQKLLQELSKLGYRVSAKKAQLCQREVTYLGYLLKEGKRWLTPARKATVMKIPVPTTPRQVREFLGKAGFCRLFIPGFASLAAPLYPLTKPSIPFIWTEEHQQAFDHIKKALLSAPALALPDLTKPFTLYIDERAGVARGVLTQTLGPWRRPVAYLSKKLDPVASGWPTCLKAVAAVALLLKDADKLTLGQNVTVIASHSLESIVRQPPDRWMTNARMTHYQSLLLNERVSFAPPAVLNPATLLPVESEATPVHRCSEILAEETGTRRDLEDQPLPGVPTWYTDGSSFITEGKRRAGAPIVDGKRTVWASSLPEGTSAQKAELVALTQALRLAEGKNINIYTDSRYAFATAHIHGAIYKQRGWLTSAGKDIKNKEEILALLEAIHLPRRVAIIHCPGHQRGSNPVATGNRRADEAAKQAALSTRVLAGTTKPAGKRTADGSEFEKRTADGSEFESPKKKAKVE

SEQ ID NO: 1464 - protein, 2086 aa, synthetic construct
MPAAKRVKLDGGDKKYSIGLDIGTNSVGWAVITDEYKVPSKKFKVLGNTDRHSIKKNLIGALLFDSGETAEATRLKRTARRRYTRRKNRICYLQEIFSNEMAKVDDSFFHRLEESFLVEEDKKHERHPIFGNIVDEVAYHEKYPTIYHLRKKLVDSTDKADLRLIYLALAHMIKFRGHFLIEGDLNPDNSDVDKLFIQLVQTYNQLFEENPINASGVDAKAILSARLSKSRRLENLIAQLPGEKKNGLFGNLIALSLGLTPNFKSNFDLAEDAKLQLSKDTYDDDLDNLLAQIGDQYADLFLAAKNLSDAILLSDILRVNTEITKAPLSASMIKRYDEHHQDLTLLKALVRQQLPEKYKEIFFDQSKNGYAGYIDGGASQEEFYKFIKPILEKMDGTEELLVKLNREDLLRKQRTFDNGSIPHQIHLGELHAILRRQEDFYPFLKDNREKIEKILTFRIPYYVGPLARGNSRFAWMTRKSEETITPWNFEEVVDKGASAQSFIERMTNFDKNLPNEKVLPKHSLLYEYFTVYNELTKVKYVTEGMRKPAFLSGEQKKAIVDLLFKTNRKVTVKQLKEDYFKKIECFDSVEISGVEDRFNASLGTYHDLLKIIKDKDFLDNEENEDILEDIVLTLTLFEDREMIEERLKTYAHLFDDKVMKQLKRRRYTGWGRLSRKLINGIRDKQSGKTILDFLKSDGFANRNFMQLIHDDSLTFKEDIQKAQVSGQGDSLHEHIANLAGSPAIKKGILQTVKVVDELVKVMGRHKPENIVIEMARENQTTQKGQKNSRERMKRIEEGIKELGSQILKEHPVENTQLQNEKLYLYYLQNGRDMYVDQELDINRLSDYDVDHIVPQSFLKDDSIDNKVLTRSDKARGKSDNVPSEEVVKKMKNYWRQLLNAKLITQRKFDNLTKAERGGLSELDKAGFIKRQLVETRQITKHVAQILDSRMNTKYDENDKLIREVKVITLKSKLVSDFRKDFQFYKVREINNYHHAHDAYLNAVVGTALIKKYPKLESEFVYGDYKVYDVRKMIAKSEQEIGKATAKYFFYSNIMNFFKTEITLANGEIRKRPLIETNGETGEIVWDKGRDFATVRKVLSMPQVNIVKKTEVQTGGFSKESILPKRNSDKLIARKKDWDPKKYGGFDSPTVAYSVLVVAKVEKGKSKKLKSVKELLGITIMERSSFEKNPIDFLEAKGYKEVKKDLIIKLPKYSLFELENGRKRMLASAGELQKGNELALPSKYVNFLYLASHYEKLKGSPEDNEQKQLFVEQHKHYLDEIIEQISEFSKRVILADANLDKVLSAYNKHRDKPIREQAENIIHLFTLTNLGAPAAFKYFDTTIDRKRYTSTKEVLDATLIHQSITGLYETRIDLSQLGGDGGGGSGGVLNLEEEYRLHEKPVPSSIDPSWLQLFPTVWAERAGMGLANQVPPVVVELRSGASPVAVRQYPMSKEAREGIRPHIQKFLDLGVLVPCRSPWNTPLLPVKKPGTNDYRPVQDLREINKRVQDIHPTVPNPYNLLSSLPPSYTWYSVLDLKDAFFCLRLHPNSQPLFAFEWKDPEKGNTGQLTWTRLPQGFKNSPTLFNEALHRDLAPFRALNPQVVLLQYVDDLLVAAPTYEDCKKGTQKLLQELSKLGYRVSAKKAQLCQREVTYLGYLLKEGKRWLTPARKATVMKIPVPTTPRQVREFLGKAGFCRLFIPGFASLAAPLYPLTKPSIPFIWTEEHQQAFDHIKKALLSAPALALPDLTKPFTLYIDERAGVARGVLTQTLGPWRRPVAYLSKKLDPVASGWPTCLKAVAAVALLLKDADKLTLGQNVTVIASHSLESIVRQPPDRWMTNARMTHYQSLLLNERVSFAPPAVLNPATLLPVESEATPVHRCSEILAEETGTRRDLEDQPLPGVPTWYTDGSSFITEGKRRAGAPIVDGKRTVWASSLPEGTSAQKAELVALTQALRLAEGKNINIYTDSRYAFATAHIHGAIYKQRGWLTSAGKDIKNKEEILALLEAIHLPRRVAIIHCPGHQRGSNPVATGNRRADEAAKQAALSTRVLAGTTKPAGKRTADGSEFEKRTADGSEFESPKKKAKVE

SEQ ID NO: 1465 - protein, 2091 aa, synthetic construct
MPAAKRVKLDGGDKKYSIGLDIGTNSVGWAVITDEYKVPSKKFKVLGNTDRHSIKKNLIGALLFDSGETAEATRLKRTARRRYTRRKNRICYLQEIFSNEMAKVDDSFFHRLEESFLVEEDKKHERHPIFGNIVDEVAYHEKYPTIYHLRKKLVDSTDKADLRLIYLALAHMIKFRGHFLIEGDLNPDNSDVDKLFIQLVQTYNQLFEENPINASGVDAKAILSARLSKSRRLENLIAQLPGEKKNGLFGNLIALSLGLTPNFKSNFDLAEDAKLQLSKDTYDDDLDNLLAQIGDQYADLFLAAKNLSDAILLSDILRVNTEITKAPLSASMIKRYDEHHQDLTLLKALVRQQLPEKYKEIFFDQSKNGYAGYIDGGASQEEFYKFIKPILEKMDGTEELLVKLNREDLLRKQRTFDNGSIPHQIHLGELHAILRRQEDFYPFLKDNREKIEKILTFRIPYYVGPLARGNSRFAWMTRKSEETITPWNFEEVVDKGASAQSFIERMTNFDKNLPNEKVLPKHSLLYEYFTVYNELTKVKYVTEGMRKPAFLSGEQKKAIVDLLFKTNRKVTVKQLKEDYFKKIECFDSVEISGVEDRFNASLGTYHDLLKIIKDKDFLDNEENEDILEDIVLTLTLFEDREMIEERLKTYAHLFDDKVMKQLKRRRYTGWGRLSRKLINGIRDKQSGKTILDFLKSDGFANRNFMQLIHDDSLTFKEDIQKAQVSGQGDSLHEHIANLAGSPAIKKGILQTVKVVDELVKVMGRHKPENIVIEMARENQTTQKGQKNSRERMKRIEEGIKELGSQILKEHPVENTQLQNEKLYLYYLQNGRDMYVDQELDINRLSDYDVDHIVPQSFLKDDSIDNKVLTRSDKARGKSDNVPSEEVVKKMKNYWRQLLNAKLITQRKFDNLTKAERGGLSELDKAGFIKRQLVETRQITKHVAQILDSRMNTKYDENDKLIREVKVITLKSKLVSDFRKDFQFYKVREINNYHHAHDAYLNAVVGTALIKKYPKLESEFVYGDYKVYDVRKMIAKSEQEIGKATAKYFFYSNIMNFFKTEITLANGEIRKRPLIETNGETGEIVWDKGRDFATVRKVLSMPQVNIVKKTEVQTGGFSKESILPKRNSDKLIARKKDWDPKKYGGFDSPTVAYSVLVVAKVEKGKSKKLKSVKELLGITIMERSSFEKNPIDFLEAKGYKEVKKDLIIKLPKYSLFELENGRKRMLASAGELQKGNELALPSKYVNFLYLASHYEKLKGSPEDNEQKQLFVEQHKHYLDEIIEQISEFSKRVILADANLDKVLSAYNKHRDKPIREQAENIIHLFTLTNLGAPAAFKYFDTTIDRKRYTSTKEVLDATLIHQSITGLYETRIDLSQLGGDGGGGGGGGGGGGVLNLEEEYRLHEKPVPSSIDPSWLQLFPTVWAERAGMGLANQVPPVVVELRSGASPVAVRQYPMSKEAREGIRPHIQKFLDLGVLVPCRSPWNTPLLPVKKPGTNDYRPVQDLREINKRVQDIHPTVPNPYNLLSSLPPSYTWYSVLDLKDAFFCLRLHPNSQPLFAFEWKDPEKGNTGQLTWTRLPQGFKNSPTLFNEALHRDLAPFRALNPQVVLLQYVDDLLVAAPTYEDCKKGTQKLLQELSKLGYRVSAKKAQLCQREVTYLGYLLKEGKRWLTPARKATVMKIPVPTTPRQVREFLGKAGFCRLFIPGFASLAAPLYPLTKPSIPFIWTEEHQQAFDHIKKALLSAPALALPDLTKPFTLYIDERAGVARGVLTQTLGPWRRPVAYLSKKLDPVASGWPTCLKAVAAVALLLKDADKLTLGQNVTVIASHSLESIVRQPPDRWMTNARMTHYQSLLLNERVSFAPPAVLNPATLLPVESEATPVHRCSEILAEETGTRRDLEDQPLPGVPTWYTDGSSFITEGKRRAGAPIVDGKRTVWASSLPEGTSAQKAELVALTQALRLAEGKNINIYTDSRYAFATAHIHGAIYKQRGWLTSAGKDIKNKEEILALLEAIHLPRRVAIIHCPGHQRGSNPVATGNRRADEAAKQAALSTRVLAGTTKPAGKRTADGSEFEKRTADGSEFESPKKKAKVE

SEQ ID NO: 1466 - protein, 2094 aa, synthetic construct
MPAAKRVKLDGGDKKYSIGLDIGTNSVGWAVITDEYKVPSKKFKVLGNTDRHSIKKNLIGALLFDSGETAEATRLKRTARRRYTRRKNRICYLQEIFSNEMAKVDDSFFHRLEESFLVEEDKKHERHPIFGNIVDEVAYHEKYPTIYHLRKKLVDSTDKADLRLIYLALAHMIKFRGHFLIEGDLNPDNSDVDKLFIQLVQTYNQLFEENPINASGVDAKAILSARLSKSRRLENLIAQLPGEKKNGLFGNLIALSLGLTPNFKSNFDLAEDAKLQLSKDTYDDDLDNLLAQIGDQYADLFLAAKNLSDAILLSDILRVNTEITKAPLSASMIKRYDEHHQDLTLLKALVRQQLPEKYKEIFFDQSKNGYAGYIDGGASQEEFYKFIKPILEKMDGTEELLVKLNREDLLRKQRTFDNGSIPHQIHLGELHAILRRQEDFYPFLKDNREKIEKILTFRIPYYVGPLARGNSRFAWMTRKSEETITPWNFEEVVDKGASAQSFIERMTNFDKNLPNEKVLPKHSLLYEYFTVYNELTKVKYVTEGMRKPAFLSGEQKKAIVDLLFKTNRKVTVKQLKEDYFKKIECFDSVEISGVEDRFNASLGTYHDLLKIIKDKDFLDNEENEDILEDIVLTLTLFEDREMIEERLKTYAHLFDDKVMKQLKRRRYTGWGRLSRKLINGIRDKQSGKTILDFLKSDGFANRNFMQLIHDDSLTFKEDIQKAQVSGQGDSLHEHIANLAGSPAIKKGILQTVKVVDELVKVMGRHKPENIVIEMARENQTTQKGQKNSRERMKRIEEGIKELGSQILKEHPVENTQLQNEKLYLYYLQNGRDMYVDQELDINRLSDYDVDHIVPQSFLKDDSIDNKVLTRSDKARGKSDNVPSEEVVKKMKNYWRQLLNAKLITQRKFDNLTKAERGGLSELDKAGFIKRQLVETRQITKHVAQILDSRMNTKYDENDKLIREVKVITLKSKLVSDFRKDFQFYKVREINNYHHAHDAYLNAVVGTALIKKYPKLESEFVYGDYKVYDVRKMIAKSEQEIGKATAKYFFYSNIMNFFKTEITLANGEIRKRPLIETNGETGEIVWDKGRDFATVRKVLSMPQVNIVKKTEVQTGGFSKESILPKRNSDKLIARKKDWDPKKYGGFDSPTVAYSVLVVAKVEKGKSKKLKSVKELLGITIMERSSFEKNPIDFLEAKGYKEVKKDLIIKLPKYSLFELENGRKRMLASAGELQKGNELALPSKYVNFLYLASHYEKLKGSPEDNEQKQLFVEQHKHYLDEIIEQISEFSKRVILADANLDKVLSAYNKHRDKPIREQAENIIHLFTLTNLGAPAAFKYFDTTIDRKRYTSTKEVLDATLIHQSITGLYETRIDLSQLGGDGGGSSGGGEAAAKGGVLNLEEEYRLHEKPVPSSIDPSWLQLFPTVWAERAGMGLANQVPPVVVELRSGASPVAVRQYPMSKEAREGIRPHIQKFLDLGVLVPCRSPWNTPLLPVKKPGTNDYRPVQDLREINKRVQDIHPTVPNPYNLLSSLPPSYTWYSVLDLKDAFFCLRLHPNSQPLFAFEWKDPEKGNTGQLTWTRLPQGFKNSPTLFNEALHRDLAPFRALNPQVVLLQYVDDLLVAAPTYEDCKKGTQKLLQELSKLGYRVSAKKAQLCQREVTYLGYLLKEGKRWLTPARKATVMKIPVPTTPRQVREFLGKAGFCRLFIPGFASLAAPLYPLTKPSIPFIWTEEHQQAFDHIKKALLSAPALALPDLTKPFTLYIDERAGVARGVLTQTLGPWRRPVAYLSKKLDPVASGWPTCLKAVAAVALLLKDADKLTLGQNVTVIASHSLESIVRQPPDRWMTNARMTHYQSLLLNERVSFAPPAVLNPATLLPVESEATPVHRCSEILAEETGTRRDLEDQPLPGVPTWYTDGSSFITEGKRRAGAPIVDGKRTVWASSLPEGTSAQKAELVALTQALRLAEGKNINIYTDSRYAFATAHIHGAIYKQRGWLTSAGKDIKNKEEILALLEAIHLPRRVAIIHCPGHQRGSNPVATGNRRADEAAKQAALSTRVLAGTTKPAGKRTADGSEFEKRTADGSEFESPKKKAKVE

SEQ ID NO: 1467 - protein, 2094 aa, synthetic construct
MPAAKRVKLDGGDKKYSIGLDIGTNSVGWAVITDEYKVPSKKFKVLGNTDRHSIKKNLIGALLFDSGETAEATRLKRTARRRYTRRKNRICYLQEIFSNEMAKVDDSFFHRLEESFLVEEDKKHERHPIFGNIVDEVAYHEKYPTIYHLRKKLVDSTDKADLRLIYLALAHMIKFRGHFLIEGDLNPDNSDVDKLFIQLVQTYNQLFEENPINASGVDAKAILSARLSKSRRLENLIAQLPGEKKNGLFGNLIALSLGLTPNFKSNFDLAEDAKLQLSKDTYDDDLDNLLAQIGDQYADLFLAAKNLSDAILLSDILRVNTEITKAPLSASMIKRYDEHHQDLTLLKALVRQQLPEKYKEIFFDQSKNGYAGYIDGGASQEEFYKFIKPILEKMDGTEELLVKLNREDLLRKQRTFDNGSIPHQIHLGELHAILRRQEDFYPFLKDNREKIEKILTFRIPYYVGPLARGNSRFAWMTRKSEETITPWNFEEVVDKGASAQSFIERMTNFDKNLPNEKVLPKHSLLYEYFTVYNELTKVKYVTEGMRKPAFLSGEQKKAIVDLLFKTNRKVTVKQLKEDYFKKIECFDSVEISGVEDRFNASLGTYHDLLKIIKDKDFLDNEENEDILEDIVLTLTLFEDREMIEERLKTYAHLFDDKVMKQLKRRRYTGWGRLSRKLINGIRDKQSGKTILDFLKSDGFANRNFMQLIHDDSLTFKEDIQKAQVSGQGDSLHEHIANLAGSPAIKKGILQTVKVVDELVKVMGRHKPENIVIEMARENQTTQKGQKNSRERMKRIEEGIKELGSQILKEHPVENTQLQNEKLYLYYLQNGRDMYVDQELDINRLSDYDVDHIVPQSFLKDDSIDNKVLTRSDKARGKSDNVPSEEVVKKMKNYWRQLLNAKLITQRKFDNLTKAERGGLSELDKAGFIKRQLVETRQITKHVAQILDSRMNTKYDENDKLIREVKVITLKSKLVSDFRKDFQFYKVREINNYHHAHDAYLNAVVGTALIKKYPKLESEFVYGDYKVYDVRKMIAKSEQEIGKATAKYFFYSNIMNFFKTEITLANGEIRKRPLIETNGETGEIVWDKGRDFATVRKVLSMPQVNIVKKTEVQTGGFSKESILPKRNSDKLIARKKDWDPKKYGGFDSPTVAYSVLVVAKVEKGKSKKLKSVKELLGITIMERSSFEKNPIDFLEAKGYKEVKKDLIIKLPKYSLFELENGRKRMLASAGELQKGNELALPSKYVNFLYLASHYEKLKGSPEDNEQKQLFVEQHKHYLDEIIEQISEFSKRVILADANLDKVLSAYNKHRDKPIREQAENIIHLFTLTNLGAPAAFKYFDTTIDRKRYTSTKEVLDATLIHQSITGLYETRIDLSQLGGDGGEAAAKGSSPAPGGVLNLEEEYRLHEKPVPSSIDPSWLQLFPTVWAERAGMGLANQVPPVVVELRSGASPVAVRQYPMSKEAREGIRPHIQKFLDLGVLVPCRSPWNTPLLPVKKPGTNDYRPVQDLREINKRVQDIHPTVPNPYNLLSSLPPSYTWYSVLDLKDAFFCLRLHPNSQPLFAFEWKDPEKGNTGQLTWTRLPQGFKNSPTLFNEALHRDLAPFRALNPQVVLLQYVDDLLVAAPTYEDCKKGTQKLLQELSKLGYRVSAKKAQLCQREVTYLGYLLKEGKRWLTPARKATVMKIPVPTTPRQVREFLGKAGFCRLFIPGFASLAAPLYPLTKPSIPFIWTEEHQQAFDHIKKALLSAPALALPDLTKPFTLYIDERAGVARGVLTQTLGPWRRPVAYLSKKLDPVASGWPTCLKAVAAVALLLKDADKLTLGQNVTVIASHSLESIVRQPPDRWMTNARMTHYQSLLLNERVSFAPPAVLNPATLLPVESEATPVHRCSEILAEETGTRRDLEDQPLPGVPTWYTDGSSFITEGKRRAGAPIVDGKRTVWASSLPEGTSAQKAELVALTQALRLAEGKNINIYTDSRYAFATAHIHGAIYKQRGWLTSAGKDIKNKEEILALLEAIHLPRRVAIIHCPGHQRGSNPVATGNRRADEAAKQAALSTRVLAGTTKPAGKRTADGSEFEKRTADGSEFESPKKKAKVE

SEQ ID NO: 1468 - protein, 2094 aa, synthetic construct
MPAAKRVKLDGGDKKYSIGLDIGTNSVGWAVITDEYKVPSKKFKVLGNTDRHSIKKNLIGALLFDSGETAEATRLKRTARRRYTRRKNRICYLQEIFSNEMAKVDDSFFHRLEESFLVEEDKKHERHPIFGNIVDEVAYHEKYPTIYHLRKKLVDSTDKADLRLIYLALAHMIKFRGHFLIEGDLNPDNSDVDKLFIQLVQTYNQLFEENPINASGVDAKAILSARLSKSRRLENLIAQLPGEKKNGLFGNLIALSLGLTPNFKSNFDLAEDAKLQLSKDTYDDDLDNLLAQIGDQYADLFLAAKNLSDAILLSDILRVNTEITKAPLSASMIKRYDEHHQDLTLLKALVRQQLPEKYKEIFFDQSKNGYAGYIDGGASQEEFYKFIKPILEKMDGTEELLVKLNREDLLRKQRTFDNGSIPHQIHLGELHAILRRQEDFYPFLKDNREKIEKILTFRIPYYVGPLARGNSRFAWMTRKSEETITPWNFEEVVDKGASAQSFIERMTNFDKNLPNEKVLPKHSLLYEYFTVYNELTKVKYVTEGMRKPAFLSGEQKKAIVDLLFKTNRKVTVKQLKEDYFKKIECFDSVEISGVEDRFNASLGTYHDLLKIIKDKDFLDNEENEDILEDIVLTLTLFEDREMIEERLKTYAHLFDDKVMKQLKRRRYTGWGRLSRKLINGIRDKQSGKTILDFLKSDGFANRNFMQLIHDDSLTFKEDIQKAQVSGQGDSLHEHIANLAGSPAIKKGILQTVKVVDELVKVMGRHKPENIVIEMARENQTTQKGQKNSRERMKRIEEGIKELGSQILKEHPVENTQLQNEKLYLYYLQNGRDMYVDQELDINRLSDYDVDHIVPQSFLKDDSIDNKVLTRSDKARGKSDNVPSEEVVKKMKNYWRQLLNAKLITQRKFDNLTKAERGGLSELDKAGFIKRQLVETRQITKHVAQILDSRMNTKYDENDKLIREVKVITLKSKLVSDFRKDFQFYKVREINNYHHAHDAYLNAVVGTALIKKYPKLESEFVYGDYKVYDVRKMIAKSEQEIGKATAKYFFYSNIMNFFKTEITLANGEIRKRPLIETNGETGEIVWDKGRDFATVRKVLSMPQVNIVKKTEVQTGGFSKESILPKRNSDKLIARKKDWDPKKYGGFDSPTVAYSVLVVAKVEKGKSKKLKSVKELLGITIMERSSFEKNPIDFLEAKGYKEVKKDLIIKLPKYSLFELENGRKRMLASAGELQKGNELALPSKYVNFLYLASHYEKLKGSPEDNEQKQLFVEQHKHYLDEIIEQISEFSKRVILADANLDKVLSAYNKHRDKPIREQAENIIHLFTLTNLGAPAAFKYFDTTIDRKRYTSTKEVLDATLIHQSITGLYETRIDLSQLGGDGGGGSEAAAKPAPGGVLNLEEEYRLHEKPVPSSIDPSWLQLFPTVWAERAGMGLANQVPPVVVELRSGASPVAVRQYPMSKEAREGIRPHIQKFLDLGVLVPCRSPWNTPLLPVKKPGTNDYRPVQDLREINKRVQDIHPTVPNPYNLLSSLPPSYTWYSVLDLKDAFFCLRLHPNSQPLFAFEWKDPEKGNTGQLTWTRLPQGFKNSPTLFNEALHRDLAPFRALNPQVVLLQYVDDLLVAAPTYEDCKKGTQKLLQELSKLGYRVSAKKAQLCQREVTYLGYLLKEGKRWLTPARKATVMKIPVPTTPRQVREFLGKAGFCRLFIPGFASLAAPLYPLTKPSIPFIWTEEHQQAFDHIKKALLSAPALALPDLTKPFTLYIDERAGVARGVLTQTLGPWRRPVAYLSKKLDPVASGWPTCLKAVAAVALLLKDADKLTLGQNVTVIASHSLESIVRQPPDRWMTNARMTHYQSLLLNERVSFAPPAVLNPATLLPVESEATPVHRCSEILAEETGTRRDLEDQPLPGVPTWYTDGSSFITEGKRRAGAPIVDGKRTVWASSLPEGTSAQKAELVALTQALRLAEGKNINIYTDSRYAFATAHIHGAIYKQRGWLTSAGKDIKNKEEILALLEAIHLPRRVAIIHCPGHQRGSNPVATGNRRADEAAKQAALSTRVLAGTTKPAGKRTADGSEFEKRTADGSEFESPKKKAKVE

SEQ ID NO: 1469 - protein, 2094 aa, synthetic construct
MPAAKRVKLDGGDKKYSIGLDIGTNSVGWAVITDEYKVPSKKFKVLGNTDRHSIKKNLIGALLFDSGETAEATRLKRTARRRYTRRKNRICYLQEIFSNEMAKVDDSFFHRLEESFLVEEDKKHERHPIFGNIVDEVAYHEKYPTIYHLRKKLVDSTDKADLRLIYLALAHMIKFRGHFLIEGDLNPDNSDVDKLFIQLVQTYNQLFEENPINASGVDAKAILSARLSKSRRLENLIAQLPGEKKNGLFGNLIALSLGLTPNFKSNFDLAEDAKLQLSKDTYDDDLDNLLAQIGDQYADLFLAAKNLSDAILLSDILRVNTEITKAPLSASMIKRYDEHHQDLTLLKALVRQQLPEKYKEIFFDQSKNGYAGYIDGGASQEEFYKFIKPILEKMDGTEELLVKLNREDLLRKQRTFDNGSIPHQIHLGELHAILRRQEDFYPFLKDNREKIEKILTFRIPYYVGPLARGNSRFAWMTRKSEETITPWNFEEVVDKGASAQSFIERMTNFDKNLPNEKVLPKHSLLYEYFTVYNELTKVKYVTEGMRKPAFLSGEQKKAIVDLLFKTNRKVTVKQLKEDYFKKIECFDSVEISGVEDRFNASLGTYHDLLKIIKDKDFLDNEENEDILEDIVLTLTLFEDREMIEERLKTYAHLFDDKVMKQLKRRRYTGWGRLSRKLINGIRDKQSGKTILDFLKSDGFANRNFMQLIHDDSLTFKEDIQKAQVSGQGDSLHEHIANLAGSPAIKKGILQTVKVVDELVKVMGRHKPENIVIEMARENQTTQKGQKNSRERMKRIEEGIKELGSQILKEHPVENTQLQNEKLYLYYLQNGRDMYVDQELDINRLSDYDVDHIVPQSFLKDDSIDNKVLTRSDKARGKSDNVPSEEVVKKMKNYWRQLLNAKLITQRKFDNLTKAERGGLSELDKAGFIKRQLVETRQITKHVAQILDSRMNTKYDENDKLIREVKVITLKSKLVSDFRKDFQFYKVREINNYHHAHDAYLNAVVGTALIKKYPKLESEFVYGDYKVYDVRKMIAKSEQEIGKATAKYFFYSNIMNFFKTEITLANGEIRKRPLIETNGETGEIVWDKGRDFATVRKVLSMPQVNIVKKTEVQTGGFSKESILPKRNSDKLIARKKDWDPKKYGGFDSPTVAYSVLVVAKVEKGKSKKLKSVKELLGITIMERSSFEKNPIDFLEAKGYKEVKKDLIIKLPKYSLFELENGRKRMLASAGELQKGNELALPSKYVNFLYLASHYEKLKGSPEDNEQKQLFVEQHKHYLDEIIEQISEFSKRVILADANLDKVLSAYNKHRDKPIREQAENIIHLFTLTNLGAPAAFKYFDTTIDRKRYTSTKEVLDATLIHQSITGLYETRIDLSQLGGDGGEAAAKPAPGGSGGVLNLEEEYRLHEKPVPSSIDPSWLQLFPTVWAERAGMGLANQVPPVVVELRSGASPVAVRQYPMSKEAREGIRPHIQKFLDLGVLVPCRSPWNTPLLPVKKPGTNDYRPVQDLREINKRVQDIHPTVPNPYNLLSSLPPSYTWYSVLDLKDAFFCLRLHPNSQPLFAFEWKDPEKGNTGQLTWTRLPQGFKNSPTLFNEALHRDLAPFRALNPQVVLLQYVDDLLVAAPTYEDCKKGTQKLLQELSKLGYRVSAKKAQLCQREVTYLGYLLKEGKRWLTPARKATVMKIPVPTTPRQVREFLGKAGFCRLFIPGFASLAAPLYPLTKPSIPFIWTEEHQQAFDHIKKALLSAPALALPDLTKPFTLYIDERAGVARGVLTQTLGPWRRPVAYLSKKLDPVASGWPTCLKAVAAVALLLKDADKLTLGQNVTVIASHSLESIVRQPPDRWMTNARMTHYQSLLLNERVSFAPPAVLNPATLLPVESEATPVHRCSEILAEETGTRRDLEDQPLPGVPTWYTDGSSFITEGKRRAGAPIVDGKRTVWASSLPEGTSAQKAELVALTQALRLAEGKNINIYTDSRYAFATAHIHGAIYKQRGWLTSAGKDIKNKEEILALLEAIHLPRRVAIIHCPGHQRGSNPVATGNRRADEAAKQAALSTRVLAGTTKPAGKRTADGSEFEKRTADGSEFESPKKKAKVE

SEQ ID NO: 1470 - protein, 2089 aa, synthetic construct
MPAAKRVKLDGGDKKYSIGLDIGTNSVGWAVITDEYKVPSKKFKVLGNTDRHSIKKNLIGALLFDSGETAEATRLKRTARRRYTRRKNRICYLQEIFSNEMAKVDDSFFHRLEESFLVEEDKKHERHPIFGNIVDEVAYHEKYPTIYHLRKKLVDSTDKADLRLIYLALAHMIKFRGHFLIEGDLNPDNSDVDKLFIQLVQTYNQLFEENPINASGVDAKAILSARLSKSRRLENLIAQLPGEKKNGLFGNLIALSLGLTPNFKSNFDLAEDAKLQLSKDTYDDDLDNLLAQIGDQYADLFLAAKNLSDAILLSDILRVNTEITKAPLSASMIKRYDEHHQDLTLLKALVRQQLPEKYKEIFFDQSKNGYAGYIDGGASQEEFYKFIKPILEKMDGTEELLVKLNREDLLRKQRTFDNGSIPHQIHLGELHAILRRQEDFYPFLKDNREKIEKILTFRIPYYVGPLARGNSRFAWMTRKSEETITPWNFEEVVDKGASAQSFIERMTNFDKNLPNEKVLPKHSLLYEYFTVYNELTKVKYVTEGMRKPAFLSGEQKKAIVDLLFKTNRKVTVKQLKEDYFKKIECFDSVEISGVEDRFNASLGTYHDLLKIIKDKDFLDNEENEDILEDIVLTLTLFEDREMIEERLKTYAHLFDDKVMKQLKRRRYTGWGRLSRKLINGIRDKQSGKTILDFLKSDGFANRNFMQLIHDDSLTFKEDIQKAQVSGQGDSLHEHIANLAGSPAIKKGILQTVKVVDELVKVMGRHKPENIVIEMARENQTTQKGQKNSRERMKRIEEGIKELGSQILKEHPVENTQLQNEKLYLYYLQNGRDMYVDQELDINRLSDYDVDHIVPQSFLKDDSIDNKVLTRSDKARGKSDNVPSEEVVKKMKNYWRQLLNAKLITQRKFDNLTKAERGGLSELDKAGFIKRQLVETRQITKHVAQILDSRMNTKYDENDKLIREVKVITLKSKLVSDFRKDFQFYKVREINNYHHAHDAYLNAVVGTALIKKYPKLESEFVYGDYKVYDVRKMIAKSEQEIGKATAKYFFYSNIMNFFKTEITLANGEIRKRPLIETNGETGEIVWDKGRDFATVRKVLSMPQVNIVKKTEVQTGGFSKESILPKRNSDKLIARKKDWDPKKYGGFDSPTVAYSVLVVAKVEKGKSKKLKSVKELLGITIMERSSFEKNPIDFLEAKGYKEVKKDLIIKLPKYSLFELENGRKRMLASAGELQKGNELALPSKYVNFLYLASHYEKLKGSPEDNEQKQLFVEQHKHYLDEIIEQISEFSKRVILADANLDKVLSAYNKHRDKPIREQAENIIHLFTLTNLGAPAAFKYFDTTIDRKRYTSTKEVLDATLIHQSITGLYETRIDLSQLGGDGGGGSPAPGGVLNLEEEYRLHEKPVPSSIDPSWLQLFPTVWAERAGMGLANQVPPVVVELRSGASPVAVRQYPMSKEAREGIRPHIQKFLDLGVLVPCRSPWNTPLLPVKKPGTNDYRPVQDLREINKRVQDIHPTVPNPYNLLSSLPPSYTWYSVLDLKDAFFCLRLHPNSQPLFAFEWKDPEKGNTGQLTWTRLPQGFKNSPTLFNEALHRDLAPFRALNPQVVLLQYVDDLLVAAPTYEDCKKGTQKLLQELSKLGYRVSAKKAQLCQREVTYLGYLLKEGKRWLTPARKATVMKIPVPTTPRQVREFLGKAGFCRLFIPGFASLAAPLYPLTKPSIPFIWTEEHQQAFDHIKKALLSAPALALPDLTKPFTLYIDERAGVARGVLTQTLGPWRRPVAYLSKKLDPVASGWPTCLKAVAAVALLLKDADKLTLGQNVTVIASHSLESIVRQPPDRWMTNARMTHYQSLLLNERVSFAPPAVLNPATLLPVESEATPVHRCSEILAEETGTRRDLEDQPLPGVPTWYTDGSSFITEGKRRAGAPIVDGKRTVWASSLPEGTSAQKAELVALTQALRLAEGKNINIYTDSRYAFATAHIHGAIYKQRGWLTSAGKDIKNKEEILALLEAIHLPRRVAIIHCPGHQRGSNPVATGNRRADEAAKQAALSTRVLAGTTKPAGKRTADGSEFEKRTADGSEFESPKKKAKVE

SEQ ID NO: 1471 - protein, 2092 aa, synthetic construct
MPAAKRVKLDGGDKKYSIGLDIGTNSVGWAVITDEYKVPSKKFKVLGNTDRHSIKKNLIGALLFDSGETAEATRLKRTARRRYTRRKNRICYLQEIFSNEMAKVDDSFFHRLEESFLVEEDKKHERHPIFGNIVDEVAYHEKYPTIYHLRKKLVDSTDKADLRLIYLALAHMIKFRGHFLIEGDLNPDNSDVDKLFIQLVQTYNQLFEENPINASGVDAKAILSARLSKSRRLENLIAQLPGEKKNGLFGNLIALSLGLTPNFKSNFDLAEDAKLQLSKDTYDDDLDNLLAQIGDQYADLFLAAKNLSDAILLSDILRVNTEITKAPLSASMIKRYDEHHQDLTLLKALVRQQLPEKYKEIFFDQSKNGYAGYIDGGASQEEFYKFIKPILEKMDGTEELLVKLNREDLLRKQRTFDNGSIPHQIHLGELHAILRRQEDFYPFLKDNREKIEKILTFRIPYYVGPLARGNSRFAWMTRKSEETITPWNFEEVVDKGASAQSFIERMTNFDKNLPNEKVLPKHSLLYEYFTVYNELTKVKYVTEGMRKPAFLSGEQKKAIVDLLFKTNRKVTVKQLKEDYFKKIECFDSVEISGVEDRFNASLGTYHDLLKIIKDKDFLDNEENEDILEDIVLTLTLFEDREMIEERLKTYAHLFDDKVMKQLKRRRYTGWGRLSRKLINGIRDKQSGKTILDFLKSDGFANRNFMQLIHDDSLTFKEDIQKAQVSGQGDSLHEHIANLAGSPAIKKGILQTVKVVDELVKVMGRHKPENIVIEMARENQTTQKGQKNSRERMKRIEEGIKELGSQILKEHPVENTQLQNEKLYLYYLQNGRDMYVDQELDINRLSDYDVDHIVPQSFLKDDSIDNKVLTRSDKARGKSDNVPSEEVVKKMKNYWRQLLNAKLITQRKFDNLTKAERGGLSELDKAGFIKRQLVETRQITKHVAQILDSRMNTKYDENDKLIREVKVITLKSKLVSDFRKDFQFYKVREINNYHHAHDAYLNAVVGTALIKKYPKLESEFVYGDYKVYDVRKMIAKSEQEIGKATAKYFFYSNIMNFFKTEITLANGEIRKRPLIETNGETGEIVWDKGRDFATVRKVLSMPQVNIVKKTEVQTGGFSKESILPKRNSDKLIARKKDWDPKKYGGFDSPTVAYSVLVVAKVEKGKSKKLKSVKELLGITIMERSSFEKNPIDFLEAKGYKEVKKDLIIKLPKYSLFELENGRKRMLASAGELQKGNELALPSKYVNFLYLASHYEKLKGSPEDNEQKQLFVEQHKHYLDEIIEQISEFSKRVILADANLDKVLSAYNKHRDKPIREQAENIIHLFTLTNLGAPAAFKYFDTTIDRKRYTSTKEVLDATLIHQSITGLYETRIDLSQLGGDGGGGGGSSGGSGGVLNLEEEYRLHEKPVPSSIDPSWLQLFPTVWAERAGMGLANQVPPVVVELRSGASPVAVRQYPMSKEAREGIRPHIQKFLDLGVLVPCRSPWNTPLLPVKKPGTNDYRPVQDLREINKRVQDIHPTVPNPYNLLSSLPPSYTWYSVLDLKDAFFCLRLHPNSQPLFAFEWKDPEKGNTGQLTWTRLPQGFKNSPTLFNEALHRDLAPFRALNPQVVLLQYVDDLLVAAPTYEDCKKGTQKLLQELSKLGYRVSAKKAQLCQREVTYLGYLLKEGKRWLTPARKATVMKIPVPTTPRQVREFLGKAGFCRLFIPGFASLAAPLYPLTKPSIPFIWTEEHQQAFDHIKKALLSAPALALPDLTKPFTLYIDERAGVARGVLTQTLGPWRRPVAYLSKKLDPVASGWPTCLKAVAAVALLLKDADKLTLGQNVTVIASHSLESIVRQPPDRWMTNARMTHYQSLLLNERVSFAPPAVLNPATLLPVESEATPVHRCSEILAEETGTRRDLEDQPLPGVPTWYTDGSSFITEGKRRAGAPIVDGKRTVWASSLPEGTSAQKAELVALTQALRLAEGKNINIYTDSRYAFATAHIHGAIYKQRGWLTSAGKDIKNKEEILALLEAIHLPRRVAIIHCPGHQRGSNPVATGNRRADEAAKQAALSTRVLAGTTKPAGKRTADGSEFEKRTADGSEFESPKKKAKVE

SEQ ID NO: 1472 - protein, 2092 aa, synthetic construct
MPAAKRVKLDGGDKKYSIGLDIGTNSVGWAVITDEYKVPSKKFKVLGNTDRHSIKKNLIGALLFDSGETAEATRLKRTARRRYTRRKNRICYLQEIFSNEMAKVDDSFFHRLEESFLVEEDKKHERHPIFGNIVDEVAYHEKYPTIYHLRKKLVDSTDKADLRLIYLALAHMIKFRGHFLIEGDLNPDNSDVDKLFIQLVQTYNQLFEENPINASGVDAKAILSARLSKSRRLENLIAQLPGEKKNGLFGNLIALSLGLTPNFKSNFDLAEDAKLQLSKDTYDDDLDNLLAQIGDQYADLFLAAKNLSDAILLSDILRVNTEITKAPLSASMIKRYDEHHQDLTLLKALVRQQLPEKYKEIFFDQSKNGYAGYIDGGASQEEFYKFIKPILEKMDGTEELLVKLNREDLLRKQRTFDNGSIPHQIHLGELHAILRRQEDFYPFLKDNREKIEKILTFRIPYYVGPLARGNSRFAWMTRKSEETITPWNFEEVVDKGASAQSFIERMTNFDKNLPNEKVLPKHSLLYEYFTVYNELTKVKYVTEGMRKPAFLSGEQKKAIVDLLFKTNRKVTVKQLKEDYFKKIECFDSVEISGVEDRFNASLGTYHDLLKIIKDKDFLDNEENEDILEDIVLTLTLFEDREMIEERLKTYAHLFDDKVMKQLKRRRYTGWGRLSRKLINGIRDKQSGKTILDFLKSDGFANRNFMQLIHDDSLTFKEDIQKAQVSGQGDSLHEHIANLAGSPAIKKGILQTVKVVDELVKVMGRHKPENIVIEMARENQTTQKGQKNSRERMKRIEEGIKELGSQILKEHPVENTQLQNEKLYLYYLQNGRDMYVDQELDINRLSDYDVDHIVPQSFLKDDSIDNKVLTRSDKARGKSDNVPSEEVVKKMKNYWRQLLNAKLITQRKFDNLTKAERGGLSELDKAGFIKRQLVETRQITKHVAQILDSRMNTKYDENDKLIREVKVITLKSKLVSDFRKDFQFYKVREINNYHHAHDAYLNAVVGTALIKKYPKLESEFVYGDYKVYDVRKMIAKSEQEIGKATAKYFFYSNIMNFFKTEITLANGEIRKRPLIETNGETGEIVWDKGRDFATVRKVLSMPQVNIVKKTEVQTGGFSKESILPKRNSDKLIARKKDWDPKKYGGFDSPTVAYSVLVVAKVEKGKSKKLKSVKELLGITIMERSSFEKNPIDFLEAKGYKEVKKDLIIKLPKYSLFELENGRKRMLASAGELQKGNELALPSKYVNFLYLASHYEKLKGSPEDNEQKQLFVEQHKHYLDEIIEQISEFSKRVILADANLDKVLSAYNKHRDKPIREQAENIIHLFTLTNLGAPAAFKYFDTTIDRKRYTSTKEVLDATLIHQSITGLYETRIDLSQLGGDGGGGSGGGGSSGGVLNLEEEYRLHEKPVPSSIDPSWLQLFPTVWAERAGMGLANQVPPVVVELRSGASPVAVRQYPMSKEAREGIRPHIQKFLDLGVLVPCRSPWNTPLLPVKKPGTNDYRPVQDLREINKRVQDIHPTVPNPYNLLSSLPPSYTWYSVLDLKDAFFCLRLHPNSQPLFAFEWKDPEKGNTGQLTWTRLPQGFKNSPTLFNEALHRDLAPFRALNPQVVLLQYVDDLLVAAPTYEDCKKGTQKLLQELSKLGYRVSAKKAQLCQREVTYLGYLLKEGKRWLTPARKATVMKIPVPTTPRQVREFLGKAGFCRLFIPGFASLAAPLYPLTKPSIPFIWTEEHQQAFDHIKKALLSAPALALPDLTKPFTLYIDERAGVARGVLTQTLGPWRRPVAYLSKKLDPVASGWPTCLKAVAAVALLLKDADKLTLGQNVTVIASHSLESIVRQPPDRWMTNARMTHYQSLLLNERVSFAPPAVLNPATLLPVESEATPVHRCSEILAEETGTRRDLEDQPLPGVPTWYTDGSSFITEGKRRAGAPIVDGKRTVWASSLPEGTSAQKAELVALTQALRLAEGKNINIYTDSRYAFATAHIHGAIYKQRGWLTSAGKDIKNKEEILALLEAIHLPRRVAIIHCPGHQRGSNPVATGNRRADEAAKQAALSTRVLAGTTKPAGKRTADGSEFEKRTADGSEFESPKKKAKVE

SEQ ID NO: 1473 - protein, 2094 aa, synthetic construct
MPAAKRVKLDGGDKKYSIGLDIGTNSVGWAVITDEYKVPSKKFKVLGNTDRHSIKKNLIGALLFDSGETAEATRLKRTARRRYTRRKNRICYLQEIFSNEMAKVDDSFFHRLEESFLVEEDKKHERHPIFGNIVDEVAYHEKYPTIYHLRKKLVDSTDKADLRLIYLALAHMIKFRGHFLIEGDLNPDNSDVDKLFIQLVQTYNQLFEENPINASGVDAKAILSARLSKSRRLENLIAQLPGEKKNGLFGNLIALSLGLTPNFKSNFDLAEDAKLQLSKDTYDDDLDNLLAQIGDQYADLFLAAKNLSDAILLSDILRVNTEITKAPLSASMIKRYDEHHQDLTLLKALVRQQLPEKYKEIFFDQSKNGYAGYIDGGASQEEFYKFIKPILEKMDGTEELLVKLNREDLLRKQRTFDNGSIPHQIHLGELHAILRRQEDFYPFLKDNREKIEKILTFRIPYYVGPLARGNSRFAWMTRKSEETITPWNFEEVVDKGASAQSFIERMTNFDKNLPNEKVLPKHSLLYEYFTVYNELTKVKYVTEGMRKPAFLSGEQKKAIVDLLFKTNRKVTVKQLKEDYFKKIECFDSVEISGVEDRFNASLGTYHDLLKIIKDKDFLDNEENEDILEDIVLTLTLFEDREMIEERLKTYAHLFDDKVMKQLKRRRYTGWGRLSRKLINGIRDKQSGKTILDFLKSDGFANRNFMQLIHDDSLTFKEDIQKAQVSGQGDSLHEHIANLAGSPAIKKGILQTVKVVDELVKVMGRHKPENIVIEMARENQTTQKGQKNSRERMKRIEEGIKELGSQILKEHPVENTQLQNEKLYLYYLQNGRDMYVDQELDINRLSDYDVDHIVPQSFLKDDSIDNKVLTRSDKARGKSDNVPSEEVVKKMKNYWRQLLNAKLITQRKFDNLTKAERGGLSELDKAGFIKRQLVETRQITKHVAQILDSRMNTKYDENDKLIREVKVITLKSKLVSDFRKDFQFYKVREINNYHHAHDAYLNAVVGTALIKKYPKLESEFVYGDYKVYDVRKMIAKSEQEIGKATAKYFFYSNIMNFFKTEITLANGEIRKRPLIETNGETGEIVWDKGRDFATVRKVLSMPQVNIVKKTEVQTGGFSKESILPKRNSDKLIARKKDWDPKKYGGFDSPTVAYSVLVVAKVEKGKSKKLKSVKELLGITIMERSSFEKNPIDFLEAKGYKEVKKDLIIKLPKYSLFELENGRKRMLASAGELQKGNELALPSKYVNFLYLASHYEKLKGSPEDNEQKQLFVEQHKHYLDEIIEQISEFSKRVILADANLDKVLSAYNKHRDKPIREQAENIIHLFTLTNLGAPAAFKYFDTTIDRKRYTSTKEVLDATLIHQSITGLYETRIDLSQLGGDGGGGSEAAAKGSSGGVLNLEEEYRLHEKPVPSSIDPSWLQLFPTVWAERAGMGLANQVPPVVVELRSGASPVAVRQYPMSKEAREGIRPHIQKFLDLGVLVPCRSPWNTPLLPVKKPGTNDYRPVQDLREINKRVQDIHPTVPNPYNLLSSLPPSYTWYSVLDLKDAFFCLRLHPNSQPLFAFEWKDPEKGNTGQLTWTRLPQGFKNSPTLFNEALHRDLAPFRALNPQVVLLQYVDDLLVAAPTYEDCKKGTQKLLQELSKLGYRVSAKKAQLCQREVTYLGYLLKEGKRWLTPARKATVMKIPVPTTPRQVREFLGKAGFCRLFIPGFASLAAPLYPLTKPSIPFIWTEEHQQAFDHIKKALLSAPALALPDLTKPFTLYIDERAGVARGVLTQTLGPWRRPVAYLSKKLDPVASGWPTCLKAVAAVALLLKDADKLTLGQNVTVIASHSLESIVRQPPDRWMTNARMTHYQSLLLNERVSFAPPAVLNPATLLPVESEATPVHRCSEILAEETGTRRDLEDQPLPGVPTWYTDGSSFITEGKRRAGAPIVDGKRTVWASSLPEGTSAQKAELVALTQALRLAEGKNINIYTDSRYAFATAHIHGAIYKQRGWLTSAGKDIKNKEEILALLEAIHLPRRVAIIHCPGHQRGSNPVATGNRRADEAAKQAALSTRVLAGTTKPAGKRTADGSEFEKRTADGSEFESPKKKAKVE

SEQ ID NO: 1474 - protein, 2094 aa, synthetic construct
MPAAKRVKLDGGDKKYSIGLDIGTNSVGWAVITDEYKVPSKKFKVLGNTDRHSIKKNLIGALLFDSGETAEATRLKRTARRRYTRRKNRICYLQEIFSNEMAKVDDSFFHRLEESFLVEEDKKHERHPIFGNIVDEVAYHEKYPTIYHLRKKLVDSTDKADLRLIYLALAHMIKFRGHFLIEGDLNPDNSDVDKLFIQLVQTYNQLFEENPINASGVDAKAILSARLSKSRRLENLIAQLPGEKKNGLFGNLIALSLGLTPNFKSNFDLAEDAKLQLSKDTYDDDLDNLLAQIGDQYADLFLAAKNLSDAILLSDILRVNTEITKAPLSASMIKRYDEHHQDLTLLKALVRQQLPEKYKEIFFDQSKNGYAGYIDGGASQEEFYKFIKPILEKMDGTEELLVKLNREDLLRKQRTFDNGSIPHQIHLGELHAILRRQEDFYPFLKDNREKIEKILTFRIPYYVGPLARGNSRFAWMTRKSEETITPWNFEEVVDKGASAQSFIERMTNFDKNLPNEKVLPKHSLLYEYFTVYNELTKVKYVTEGMRKPAFLSGEQKKAIVDLLFKTNRKVTVKQLKEDYFKKIECFDSVEISGVEDRFNASLGTYHDLLKIIKDKDFLDNEENEDILEDIVLTLTLFEDREMIEERLKTYAHLFDDKVMKQLKRRRYTGWGRLSRKLINGIRDKQSGKTILDFLKSDGFANRNFMQLIHDDSLTFKEDIQKAQVSGQGDSLHEHIANLAGSPAIKKGILQTVKVVDELVKVMGRHKPENIVIEMARENQTTQKGQKNSRERMKRIEEGIKELGSQILKEHPVENTQLQNEKLYLYYLQNGRDMYVDQELDINRLSDYDVDHIVPQSFLKDDSIDNKVLTRSDKARGKSDNVPSEEVVKKMKNYWRQLLNAKLITQRKFDNLTKAERGGLSELDKAGFIKRQLVETRQITKHVAQILDSRMNTKYDENDKLIREVKVITLKSKLVSDFRKDFQFYKVREINNYHHAHDAYLNAVVGTALIKKYPKLESEFVYGDYKVYDVRKMIAKSEQEIGKATAKYFFYSNIMNFFKTEITLANGEIRKRPLIETNGETGEIVWDKGRDFATVRKVLSMPQVNIVKKTEVQTGGFSKESILPKRNSDKLIARKKDWDPKKYGGFDSPTVAYSVLVVAKVEKGKSKKLKSVKELLGITIMERSSFEKNPIDFLEAKGYKEVKKDLIIKLPKYSLFELENGRKRMLASAGELQKGNELALPSKYVNFLYLASHYEKLKGSPEDNEQKQLFVEQHKHYLDEIIEQISEFSKRVILADANLDKVLSAYNKHRDKPIREQAENIIHLFTLTNLGAPAAFKYFDTTIDRKRYTSTKEVLDATLIHQSITGLYETRIDLSQLGGDGGGSSEAAAKGGSGGVLNLEEEYRLHEKPVPSSIDPSWLQLFPTVWAERAGMGLANQVPPVVVELRSGASPVAVRQYPMSKEAREGIRPHIQKFLDLGVLVPCRSPWNTPLLPVKKPGTNDYRPVQDLREINKRVQDIHPTVPNPYNLLSSLPPSYTWYSVLDLKDAFFCLRLHPNSQPLFAFEWKDPEKGNTGQLTWTRLPQGFKNSPTLFNEALHRDLAPFRALNPQVVLLQYVDDLLVAAPTYEDCKKGTQKLLQELSKLGYRVSAKKAQLCQREVTYLGYLLKEGKRWLTPARKATVMKIPVPTTPRQVREFLGKAGFCRLFIPGFASLAAPLYPLTKPSIPFIWTEEHQQAFDHIKKALLSAPALALPDLTKPFTLYIDERAGVARGVLTQTLGPWRRPVAYLSKKLDPVASGWPTCLKAVAAVALLLKDADKLTLGQNVTVIASHSLESIVRQPPDRWMTNARMTHYQSLLLNERVSFAPPAVLNPATLLPVESEATPVHRCSEILAEETGTRRDLEDQPLPGVPTWYTDGSSFITEGKRRAGAPIVDGKRTVWASSLPEGTSAQKAELVALTQALRLAEGKNINIYTDSRYAFATAHIHGAIYKQRGWLTSAGKDIKNKEEILALLEAIHLPRRVAIIHCPGHQRGSNPVATGNRRADEAAKQAALSTRVLAGTTKPAGKRTADGSEFEKRTADGSEFESPKKKAKVE

SEQ ID NO: 1475 - protein, 2089 aa, synthetic construct
MPAAKRVKLDGGDKKYSIGLDIGTNSVGWAVITDEYKVPSKKFKVLGNTDRHSIKKNLIGALLFDSGETAEATRLKRTARRRYTRRKNRICYLQEIFSNEMAKVDDSFFHRLEESFLVEEDKKHERHPIFGNIVDEVAYHEKYPTIYHLRKKLVDSTDKADLRLIYLALAHMIKFRGHFLIEGDLNPDNSDVDKLFIQLVQTYNQLFEENPINASGVDAKAILSARLSKSRRLENLIAQLPGEKKNGLFGNLIALSLGLTPNFKSNFDLAEDAKLQLSKDTYDDDLDNLLAQIGDQYADLFLAAKNLSDAILLSDILRVNTEITKAPLSASMIKRYDEHHQDLTLLKALVRQQLPEKYKEIFFDQSKNGYAGYIDGGASQEEFYKFIKPILEKMDGTEELLVKLNREDLLRKQRTFDNGSIPHQIHLGELHAILRRQEDFYPFLKDNREKIEKILTFRIPYYVGPLARGNSRFAWMTRKSEETITPWNFEEVVDKGASAQSFIERMTNFDKNLPNEKVLPKHSLLYEYFTVYNELTKVKYVTEGMRKPAFLSGEQKKAIVDLLFKTNRKVTVKQLKEDYFKKIECFDSVEISGVEDRFNASLGTYHDLLKIIKDKDFLDNEENEDILEDIVLTLTLFEDREMIEERLKTYAHLFDDKVMKQLKRRRYTGWGRLSRKLINGIRDKQSGKTILDFLKSDGFANRNFMQLIHDDSLTFKEDIQKAQVSGQGDSLHEHIANLAGSPAIKKGILQTVKVVDELVKVMGRHKPENIVIEMARENQTTQKGQKNSRERMKRIEEGIKELGSQILKEHPVENTQLQNEKLYLYYLQNGRDMYVDQELDINRLSDYDVDHIVPQSFLKDDSIDNKVLTRSDKARGKSDNVPSEEVVKKMKNYWRQLLNAKLITQRKFDNLTKAERGGLSELDKAGFIKRQLVETRQITKHVAQILDSRMNTKYDENDKLIREVKVITLKSKLVSDFRKDFQFYKVREINNYHHAHDAYLNAVVGTALIKKYPKLESEFVYGDYKVYDVRKMIAKSEQEIGKATAKYFFYSNIMNFFKTEITLANGEIRKRPLIETNGETGEIVWDKGRDFATVRKVLSMPQVNIVKKTEVQTGGFSKESILPKRNSDKLIARKKDWDPKKYGGFDSPTVAYSVLVVAKVEKGKSKKLKSVKELLGITIMERSSFEKNPIDFLEAKGYKEVKKDLIIKLPKYSLFELENGRKRMLASAGELQKGNELALPSKYVNFLYLASHYEKLKGSPEDNEQKQLFVEQHKHYLDEIIEQISEFSKRVILADANLDKVLSAYNKHRDKPIREQAENIIHLFTLTNLGAPAAFKYFDTTIDRKRYTSTKEVLDATLIHQSITGLYETRIDLSQLGGDGGGGSGGSGGVLNLEEEYRLHEKPVPSSIDPSWLQLFPTVWAERAGMGLANQVPPVVVELRSGASPVAVRQYPMSKEAREGIRPHIQKFLDLGVLVPCRSPWNTPLLPVKKPGTNDYRPVQDLREINKRVQDIHPTVPNPYNLLSSLPPSYTWYSVLDLKDAFFCLRLHPNSQPLFAFEWKDPEKGNTGQLTWTRLPQGFKNSPTLFNEALHRDLAPFRALNPQVVLLQYVDDLLVAAPTYEDCKKGTQKLLQELSKLGYRVSAKKAQLCQREVTYLGYLLKEGKRWLTPARKATVMKIPVPTTPRQVREFLGKAGFCRLFIPGFASLAAPLYPLTKPSIPFIWTEEHQQAFDHIKKALLSAPALALPDLTKPFTLYIDERAGVARGVLTQTLGPWRRPVAYLSKKLDPVASGWPTCLKAVAAVALLLKDADKLTLGQNVTVIASHSLESIVRQPPDRWMTNARMTHYQSLLLNERVSFAPPAVLNPATLLPVESEATPVHRCSEILAEETGTRRDLEDQPLPGVPTWYTDGSSFITEGKRRAGAPIVDGKRTVWASSLPEGTSAQKAELVALTQALRLAEGKNINIYTDSRYAFATAHIHGAIYKQRGWLTSAGKDIKNKEEILALLEAIHLPRRVAIIHCPGHQRGSNPVATGNRRADEAAKQAALSTRVLAGTTKPAGKRTADGSEFEKRTADGSEFESPKKKAKVE

SEQ ID NO: 1476 - protein, 2092 aa, synthetic construct
MPAAKRVKLDGGDKKYSIGLDIGTNSVGWAVITDEYKVPSKKFKVLGNTDRHSIKKNLIGALLFDSGETAEATRLKRTARRRYTRRKNRICYLQEIFSNEMAKVDDSFFHRLEESFLVEEDKKHERHPIFGNIVDEVAYHEKYPTIYHLRKKLVDSTDKADLRLIYLALAHMIKFRGHFLIEGDLNPDNSDVDKLFIQLVQTYNQLFEENPINASGVDAKAILSARLSKSRRLENLIAQLPGEKKNGLFGNLIALSLGLTPNFKSNFDLAEDAKLQLSKDTYDDDLDNLLAQIGDQYADLFLAAKNLSDAILLSDILRVNTEITKAPLSASMIKRYDEHHQDLTLLKALVRQQLPEKYKEIFFDQSKNGYAGYIDGGASQEEFYKFIKPILEKMDGTEELLVKLNREDLLRKQRTFDNGSIPHQIHLGELHAILRRQEDFYPFLKDNREKIEKILTFRIPYYVGPLARGNSRFAWMTRKSEETITPWNFEEVVDKGASAQSFIERMTNFDKNLPNEKVLPKHSLLYEYFTVYNELTKVKYVTEGMRKPAFLSGEQKKAIVDLLFKTNRKVTVKQLKEDYFKKIECFDSVEISGVEDRFNASLGTYHDLLKIIKDKDFLDNEENEDILEDIVLTLTLFEDREMIEERLKTYAHLFDDKVMKQLKRRRYTGWGRLSRKLINGIRDKQSGKTILDFLKSDGFANRNFMQLIHDDSLTFKEDIQKAQVSGQGDSLHEHIANLAGSPAIKKGILQTVKVVDELVKVMGRHKPENIVIEMARENQTTQKGQKNSRERMKRIEEGIKELGSQILKEHPVENTQLQNEKLYLYYLQNGRDMYVDQELDINRLSDYDVDHIVPQSFLKDDSIDNKVLTRSDKARGKSDNVPSEEVVKKMKNYWRQLLNAKLITQRKFDNLTKAERGGLSELDKAGFIKRQLVETRQITKHVAQILDSRMNTKYDENDKLIREVKVITLKSKLVSDFRKDFQFYKVREINNYHHAHDAYLNAVVGTALIKKYPKLESEFVYGDYKVYDVRKMIAKSEQEIGKATAKYFFYSNIMNFFKTEITLANGEIRKRPLIETNGETGEIVWDKGRDFATVRKVLSMPQVNIVKKTEVQTGGFSKESILPKRNSDKLIARKKDWDPKKYGGFDSPTVAYSVLVVAKVEKGKSKKLKSVKELLGITIMERSSFEKNPIDFLEAKGYKEVKKDLIIKLPKYSLFELENGRKRMLASAGELQKGNELALPSKYVNFLYLASHYEKLKGSPEDNEQKQLFVEQHKHYLDEIIEQISEFSKRVILADANLDKVLSAYNKHRDKPIREQAENIIHLFTLTNLGAPAAFKYFDTTIDRKRYTSTKEVLDATLIHQSITGLYETRIDLSQLGGDGGGGSGSSPAPGGVLNLEEEYRLHEKPVPSSIDPSWLQLFPTVWAERAGMGLANQVPPVVVELRSGASPVAVRQYPMSKEAREGIRPHIQKFLDLGVLVPCRSPWNTPLLPVKKPGTNDYRPVQDLREINKRVQDIHPTVPNPYNLLSSLPPSYTWYSVLDLKDAFFCLRLHPNSQPLFAFEWKDPEKGNTGQLTWTRLPQGFKNSPTLFNEALHRDLAPFRALNPQVVLLQYVDDLLVAAPTYEDCKKGTQKLLQELSKLGYRVSAKKAQLCQREVTYLGYLLKEGKRWLTPARKATVMKIPVPTTPRQVREFLGKAGFCRLFIPGFASLAAPLYPLTKPSIPFIWTEEHQQAFDHIKKALLSAPALALPDLTKPFTLYIDERAGVARGVLTQTLGPWRRPVAYLSKKLDPVASGWPTCLKAVAAVALLLKDADKLTLGQNVTVIASHSLESIVRQPPDRWMTNARMTHYQSLLLNERVSFAPPAVLNPATLLPVESEATPVHRCSEILAEETGTRRDLEDQPLPGVPTWYTDGSSFITEGKRRAGAPIVDGKRTVWASSLPEGTSAQKAELVALTQALRLAEGKNINIYTDSRYAFATAHIHGAIYKQRGWLTSAGKDIKNKEEILALLEAIHLPRRVAIIHCPGHQRGSNPVATGNRRADEAAKQAALSTRVLAGTTKPAGKRTADGSEFEKRTADGSEFESPKKKAKVE

SEQ ID NO: 1477 - protein, 2092 aa, synthetic construct
MPAAKRVKLDGGDKKYSIGLDIGTNSVGWAVITDEYKVPSKKFKVLGNTDRHSIKKNLIGALLFDSGETAEATRLKRTARRRYTRRKNRICYLQEIFSNEMAKVDDSFFHRLEESFLVEEDKKHERHPIFGNIVDEVAYHEKYPTIYHLRKKLVDSTDKADLRLIYLALAHMIKFRGHFLIEGDLNPDNSDVDKLFIQLVQTYNQLFEENPINASGVDAKAILSARLSKSRRLENLIAQLPGEKKNGLFGNLIALSLGLTPNFKSNFDLAEDAKLQLSKDTYDDDLDNLLAQIGDQYADLFLAAKNLSDAILLSDILRVNTEITKAPLSASMIKRYDEHHQDLTLLKALVRQQLPEKYKEIFFDQSKNGYAGYIDGGASQEEFYKFIKPILEKMDGTEELLVKLNREDLLRKQRTFDNGSIPHQIHLGELHAILRRQEDFYPFLKDNREKIEKILTFRIPYYVGPLARGNSRFAWMTRKSEETITPWNFEEVVDKGASAQSFIERMTNFDKNLPNEKVLPKHSLLYEYFTVYNELTKVKYVTEGMRKPAFLSGEQKKAIVDLLFKTNRKVTVKQLKEDYFKKIECFDSVEISGVEDRFNASLGTYHDLLKIIKDKDFLDNEENEDILEDIVLTLTLFEDREMIEERLKTYAHLFDDKVMKQLKRRRYTGWGRLSRKLINGIRDKQSGKTILDFLKSDGFANRNFMQLIHDDSLTFKEDIQKAQVSGQGDSLHEHIANLAGSPAIKKGILQTVKVVDELVKVMGRHKPENIVIEMARENQTTQKGQKNSRERMKRIEEGIKELGSQILKEHPVENTQLQNEKLYLYYLQNGRDMYVDQELDINRLSDYDVDHIVPQSFLKDDSIDNKVLTRSDKARGKSDNVPSEEVVKKMKNYWRQLLNAKLITQRKFDNLTKAERGGLSELDKAGFIKRQLVETRQITKHVAQILDSRMNTKYDENDKLIREVKVITLKSKLVSDFRKDFQFYKVREINNYHHAHDAYLNAVVGTALIKKYPKLESEFVYGDYKVYDVRKMIAKSEQEIGKATAKYFFYSNIMNFFKTEITLANGEIRKRPLIETNGETGEIVWDKGRDFATVRKVLSMPQVNIVKKTEVQTGGFSKESILPKRNSDKLIARKKDWDPKKYGGFDSPTVAYSVLVVAKVEKGKSKKLKSVKELLGITIMERSSFEKNPIDFLEAKGYKEVKKDLIIKLPKYSLFELENGRKRMLASAGELQKGNELALPSKYVNFLYLASHYEKLKGSPEDNEQKQLFVEQHKHYLDEIIEQISEFSKRVILADANLDKVLSAYNKHRDKPIREQAENIIHLFTLTNLGAPAAFKYFDTTIDRKRYTSTKEVLDATLIHQSITGLYETRIDLSQLGGDGGGSSGGGGGSGGVLNLEEEYRLHEKPVPSSIDPSWLQLFPTVWAERAGMGLANQVPPVVVELRSGASPVAVRQYPMSKEAREGIRPHIQKFLDLGVLVPCRSPWNTPLLPVKKPGTNDYRPVQDLREINKRVQDIHPTVPNPYNLLSSLPPSYTWYSVLDLKDAFFCLRLHPNSQPLFAFEWKDPEKGNTGQLTWTRLPQGFKNSPTLFNEALHRDLAPFRALNPQVVLLQYVDDLLVAAPTYEDCKKGTQKLLQELSKLGYRVSAKKAQLCQREVTYLGYLLKEGKRWLTPARKATVMKIPVPTTPRQVREFLGKAGFCRLFIPGFASLAAPLYPLTKPSIPFIWTEEHQQAFDHIKKALLSAPALALPDLTKPFTLYIDERAGVARGVLTQTLGPWRRPVAYLSKKLDPVASGWPTCLKAVAAVALLLKDADKLTLGQNVTVIASHSLESIVRQPPDRWMTNARMTHYQSLLLNERVSFAPPAVLNPATLLPVESEATPVHRCSEILAEETGTRRDLEDQPLPGVPTWYTDGSSFITEGKRRAGAPIVDGKRTVWASSLPEGTSAQKAELVALTQALRLAEGKNINIYTDSRYAFATAHIHGAIYKQRGWLTSAGKDIKNKEEILALLEAIHLPRRVAIIHCPGHQRGSNPVATGNRRADEAAKQAALSTRVLAGTTKPAGKRTADGSEFEKRTADGSEFESPKKKAKVE

SEQ ID NO: 1478 - protein, 2007 aa, synthetic construct
MPAAKRVKLDGGDKKYSIGLDIGTNSVGWAVITDEYKVPSKKFKVLGNTDRHSIKKNLIGALLFDSGETAEATRLKRTARRRYTRRKNRICYLQEIFSNEMAKVDDSFFHRLEESFLVEEDKKHERHPIFGNIVDEVAYHEKYPTIYHLRKKLVDSTDKADLRLIYLALAHMIKFRGHFLIEGDLNPDNSDVDKLFIQLVQTYNQLFEENPINASGVDAKAILSARLSKSRRLENLIAQLPGEKKNGLFGNLIALSLGLTPNFKSNFDLAEDAKLQLSKDTYDDDLDNLLAQIGDQYADLFLAAKNLSDAILLSDILRVNTEITKAPLSASMIKRYDEHHQDLTLLKALVRQQLPEKYKEIFFDQSKNGYAGYIDGGASQEEFYKFIKPILEKMDGTEELLVKLNREDLLRKQRTFDNGSIPHQIHLGELHAILRRQEDFYPFLKDNREKIEKILTFRIPYYVGPLARGNSRFAWMTRKSEETITPWNFEEVVDKGASAQSFIERMTNFDKNLPNEKVLPKHSLLYEYFTVYNELTKVKYVTEGMRKPAFLSGEQKKAIVDLLFKTNRKVTVKQLKEDYFKKIECFDSVEISGVEDRFNASLGTYHDLLKIIKDKDFLDNEENEDILEDIVLTLTLFEDREMIEERLKTYAHLFDDKVMKQLKRRRYTGWGRLSRKLINGIRDKQSGKTILDFLKSDGFANRNFMQLIHDDSLTFKEDIQKAQVSGQGDSLHEHIANLAGSPAIKKGILQTVKVVDELVKVMGRHKPENIVIEMARENQTTQKGQKNSRERMKRIEEGIKELGSQILKEHPVENTQLQNEKLYLYYLQNGRDMYVDQELDINRLSDYDVDHIVPQSFLKDDSIDNKVLTRSDKARGKSDNVPSEEVVKKMKNYWRQLLNAKLITQRKFDNLTKAERGGLSELDKAGFIKRQLVETRQITKHVAQILDSRMNTKYDENDKLIREVKVITLKSKLVSDFRKDFQFYKVREINNYHHAHDAYLNAVVGTALIKKYPKLESEFVYGDYKVYDVRKMIAKSEQEIGKATAKYFFYSNIMNFFKTEITLANGEIRKRPLIETNGETGEIVWDKGRDFATVRKVLSMPQVNIVKKTEVQTGGFSKESILPKRNSDKLIARKKDWDPKKYGGFDSPTVAYSVLVVAKVEKGKSKKLKSVKELLGITIMERSSFEKNPIDFLEAKGYKEVKKDLIIKLPKYSLFELENGRKRMLASAGELQKGNELALPSKYVNFLYLASHYEKLKGSPEDNEQKQLFVEQHKHYLDEIIEQISEFSKRVILADANLDKVLSAYNKHRDKPIREQAENIIHLFTLTNLGAPAAFKYFDTTIDRKRYTSTKEVLDATLIHQSITGLYETRIDLSQLGGDGGGGGGGGGAVLGLEHLPRPPQISQFPLNPERLQALQHLVRKALEAGHIEPYTGPGNNPVFPVKKANGTWRFIHDLRATNSLTIDLSSSSPGPPDLSSLPTTLAHLQTIDLRDAFFQIPLPKQFQPYFAFTVPQQCNYGPGTRYAWKVLPQGFKNSPTLFEMQLAHILQPIRQAFPQCTILQYMDDILLASPSHEDLLLLSEATMASLISHGLPVSENKTQQTPGTIKFLGQIISPNHLTYDAVPTVPIRSRWALPELQALLGEIQWVSKGTPTLRQPLHSLYCALQRHTDPRDQIYLNPSQVQSLVQLRQALSQNCRSRLVQTLPLLGAIMLTLTGTTTVVFQSKEQWPLVWLHAPLPHTSQCPWGQLLASAVLLLDKYTLQSYGLLCQTIHHNISTQTFNQFIQTSDHPSVPILLHHSHRFKNLGAQTGELWNTFLKTAAPLAPVKALMPVFTLSPVIINTAPCLFSDGSTSRAAYILWDKQILSQRSFPLPPPHKSAQRAELLGLLHGLSSARSWRCLNIFLDSKYLYHYLRTLALGTFQGRSSQAPFQALLPRLLSRKVVYLHHVRSHTNLPDPISRLNALTDALLITPVLQLAGKRTADGSEFEKRTADGSEFESPKKKAKVE

SEQ ID NO: 1479 - protein, 2013 aa, synthetic construct
MPAAKRVKLDGGDKKYSIGLDIGTNSVGWAVITDEYKVPSKKFKVLGNTDRHSIKKNLIGALLFDSGETAEATRLKRTARRRYTRRKNRICYLQEIFSNEMAKVDDSFFHRLEESFLVEEDKKHERHPIFGNIVDEVAYHEKYPTIYHLRKKLVDSTDKADLRLIYLALAHMIKFRGHFLIEGDLNPDNSDVDKLFIQLVQTYNQLFEENPINASGVDAKAILSARLSKSRRLENLIAQLPGEKKNGLFGNLIALSLGLTPNFKSNFDLAEDAKLQLSKDTYDDDLDNLLAQIGDQYADLFLAAKNLSDAILLSDILRVNTEITKAPLSASMIKRYDEHHQDLTLLKALVRQQLPEKYKEIFFDQSKNGYAGYIDGGASQEEFYKFIKPILEKMDGTEELLVKLNREDLLRKQRTFDNGSIPHQIHLGELHAILRRQEDFYPFLKDNREKIEKILTFRIPYYVGPLARGNSRFAWMTRKSEETITPWNFEEVVDKGASAQSFIERMTNFDKNLPNEKVLPKHSLLYEYFTVYNELTKVKYVTEGMRKPAFLSGEQKKAIVDLLFKTNRKVTVKQLKEDYFKKIECFDSVEISGVEDRFNASLGTYHDLLKIIKDKDFLDNEENEDILEDIVLTLTLFEDREMIEERLKTYAHLFDDKVMKQLKRRRYTGWGRLSRKLINGIRDKQSGKTILDFLKSDGFANRNFMQLIHDDSLTFKEDIQKAQVSGQGDSLHEHIANLAGSPAIKKGILQTVKVVDELVKVMGRHKPENIVIEMARENQTTQKGQKNSRERMKRIEEGIKELGSQILKEHPVENTQLQNEKLYLYYLQNGRDMYVDQELDINRLSDYDVDHIVPQSFLKDDSIDNKVLTRSDKARGKSDNVPSEEVVKKMKNYWRQLLNAKLITQRKFDNLTKAERGGLSELDKAGFIKRQLVETRQITKHVAQILDSRMNTKYDENDKLIREVKVITLKSKLVSDFRKDFQFYKVREINNYHHAHDAYLNAVVGTALIKKYPKLESEFVYGDYKVYDVRKMIAKSEQEIGKATAKYFFYSNIMNFFKTEITLANGEIRKRPLIETNGETGEIVWDKGRDFATVRKVLSMPQVNIVKKTEVQTGGFSKESILPKRNSDKLIARKKDWDPKKYGGFDSPTVAYSVLVVAKVEKGKSKKLKSVKELLGITIMERSSFEKNPIDFLEAKGYKEVKKDLIIKLPKYSLFELENGRKRMLASAGELQKGNELALPSKYVNFLYLASHYEKLKGSPEDNEQKQLFVEQHKHYLDEIIEQISEFSKRVILADANLDKVLSAYNKHRDKPIREQAENIIHLFTLTNLGAPAAFKYFDTTIDRKRYTSTKEVLDATLIHQSITGLYETRIDLSQLGGDGGPAPAPAPAPAPGGAVLGLEHLPRPPQISQFPLNPERLQALQHLVRKALEAGHIEPYTGPGNNPVFPVKKANGTWRFIHDLRATNSLTIDLSSSSPGPPDLSSLPTTLAHLQTIDLRDAFFQIPLPKQFQPYFAFTVPQQCNYGPGTRYAWKVLPQGFKNSPTLFEMQLAHILQPIRQAFPQCTILQYMDDILLASPSHEDLLLLSEATMASLISHGLPVSENKTQQTPGTIKFLGQIISPNHLTYDAVPTVPIRSRWALPELQALLGEIQWVSKGTPTLRQPLHSLYCALQRHTDPRDQIYLNPSQVQSLVQLRQALSQNCRSRLVQTLPLLGAIMLTLTGTTTVVFQSKEQWPLVWLHAPLPHTSQCPWGQLLASAVLLLDKYTLQSYGLLCQTIHHNISTQTFNQFIQTSDHPSVPILLHHSHRFKNLGAQTGELWNTFLKTAAPLAPVKALMPVFTLSPVIINTAPCLFSDGSTSRAAYILWDKQILSQRSFPLPPPHKSAQRAELLGLLHGLSSARSWRCLNIFLDSKYLYHYLRTLALGTFQGRSSQAPFQALLPRLLSRKVVYLHHVRSHTNLPDPISRLNALTDALLITPVLQLAGKRTADGSEFEKRTADGSEFESPKKKAKVE

SEQ ID NO: 1480 - protein, 2013 aa, synthetic construct
MPAAKRVKLDGGDKKYSIGLDIGTNSVGWAVITDEYKVPSKKFKVLGNTDRHSIKKNLIGALLFDSGETAEATRLKRTARRRYTRRKNRICYLQEIFSNEMAKVDDSFFHRLEESFLVEEDKKHERHPIFGNIVDEVAYHEKYPTIYHLRKKLVDSTDKADLRLIYLALAHMIKFRGHFLIEGDLNPDNSDVDKLFIQLVQTYNQLFEENPINASGVDAKAILSARLSKSRRLENLIAQLPGEKKNGLFGNLIALSLGLTPNFKSNFDLAEDAKLQLSKDTYDDDLDNLLAQIGDQYADLFLAAKNLSDAILLSDILRVNTEITKAPLSASMIKRYDEHHQDLTLLKALVRQQLPEKYKEIFFDQSKNGYAGYIDGGASQEEFYKFIKPILEKMDGTEELLVKLNREDLLRKQRTFDNGSIPHQIHLGELHAILRRQEDFYPFLKDNREKIEKILTFRIPYYVGPLARGNSRFAWMTRKSEETITPWNFEEVVDKGASAQSFIERMTNFDKNLPNEKVLPKHSLLYEYFTVYNELTKVKYVTEGMRKPAFLSGEQKKAIVDLLFKTNRKVTVKQLKEDYFKKIECFDSVEISGVEDRFNASLGTYHDLLKIIKDKDFLDNEENEDILEDIVLTLTLFEDREMIEERLKTYAHLFDDKVMKQLKRRRYTGWGRLSRKLINGIRDKQSGKTILDFLKSDGFANRNFMQLIHDDSLTFKEDIQKAQVSGQGDSLHEHIANLAGSPAIKKGILQTVKVVDELVKVMGRHKPENIVIEMARENQTTQKGQKNSRERMKRIEEGIKELGSQILKEHPVENTQLQNEKLYLYYLQNGRDMYVDQELDINRLSDYDVDHIVPQSFLKDDSIDNKVLTRSDKARGKSDNVPSEEVVKKMKNYWRQLLNAKLITQRKFDNLTKAERGGLSELDKAGFIKRQLVETRQITKHVAQILDSRMNTKYDENDKLIREVKVITLKSKLVSDFRKDFQFYKVREINNYHHAHDAYLNAVVGTALIKKYPKLESEFVYGDYKVYDVRKMIAKSEQEIGKATAKYFFYSNIMNFFKTEITLANGEIRKRPLIETNGETGEIVWDKGRDFATVRKVLSMPQVNIVKKTEVQTGGFSKESILPKRNSDKLIARKKDWDPKKYGGFDSPTVAYSVLVVAKVEKGKSKKLKSVKELLGITIMERSSFEKNPIDFLEAKGYKEVKKDLIIKLPKYSLFELENGRKRMLASAGELQKGNELALPSKYVNFLYLASHYEKLKGSPEDNEQKQLFVEQHKHYLDEIIEQISEFSKRVILADANLDKVLSAYNKHRDKPIREQAENIIHLFTLTNLGAPAAFKYFDTTIDRKRYTSTKEVLDATLIHQSITGLYETRIDLSQLGGDGGPAPEAAAKGGSGGAVLGLEHLPRPPQISQFPLNPERLQALQHLVRKALEAGHIEPYTGPGNNPVFPVKKANGTWRFIHDLRATNSLTIDLSSSSPGPPDLSSLPTTLAHLQTIDLRDAFFQIPLPKQFQPYFAFTVPQQCNYGPGTRYAWKVLPQGFKNSPTLFEMQLAHILQPIRQAFPQCTILQYMDDILLASPSHEDLLLLSEATMASLISHGLPVSENKTQQTPGTIKFLGQIISPNHLTYDAVPTVPIRSRWALPELQALLGEIQWVSKGTPTLRQPLHSLYCALQRHTDPRDQIYLNPSQVQSLVQLRQALSQNCRSRLVQTLPLLGAIMLTLTGTTTVVFQSKEQWPLVWLHAPLPHTSQCPWGQLLASAVLLLDKYTLQSYGLLCQTIHHNISTQTFNQFIQTSDHPSVPILLHHSHRFKNLGAQTGELWNTFLKTAAPLAPVKALMPVFTLSPVIINTAPCLFSDGSTSRAAYILWDKQILSQRSFPLPPPHKSAQRAELLGLLHGLSSARSWRCLNIFLDSKYLYHYLRTLALGTFQGRSSQAPFQALLPRLLSRKVVYLHHVRSHTNLPDPISRLNALTDALLITPVLQLAGKRTADGSEFEKRTADGSEFESPKKKAKVE

SEQ ID NO: 1481 - protein, 2011 aa, synthetic construct
MPAAKRVKLDGGDKKYSIGLDIGTNSVGWAVITDEYKVPSKKFKVLGNTDRHSIKKNLIGALLFDSGETAEATRLKRTARRRYTRRKNRICYLQEIFSNEMAKVDDSFFHRLEESFLVEEDKKHERHPIFGNIVDEVAYHEKYPTIYHLRKKLVDSTDKADLRLIYLALAHMIKFRGHFLIEGDLNPDNSDVDKLFIQLVQTYNQLFEENPINASGVDAKAILSARLSKSRRLENLIAQLPGEKKNGLFGNLIALSLGLTPNFKSNFDLAEDAKLQLSKDTYDDDLDNLLAQIGDQYADLFLAAKNLSDAILLSDILRVNTEITKAPLSASMIKRYDEHHQDLTLLKALVRQQLPEKYKEIFFDQSKNGYAGYIDGGASQEEFYKFIKPILEKMDGTEELLVKLNREDLLRKQRTFDNGSIPHQIHLGELHAILRRQEDFYPFLKDNREKIEKILTFRIPYYVGPLARGNSRFAWMTRKSEETITPWNFEEVVDKGASAQSFIERMTNFDKNLPNEKVLPKHSLLYEYFTVYNELTKVKYVTEGMRKPAFLSGEQKKAIVDLLFKTNRKVTVKQLKEDYFKKIECFDSVEISGVEDRFNASLGTYHDLLKIIKDKDFLDNEENEDILEDIVLTLTLFEDREMIEERLKTYAHLFDDKVMKQLKRRRYTGWGRLSRKLINGIRDKQSGKTILDFLKSDGFANRNFMQLIHDDSLTFKEDIQKAQVSGQGDSLHEHIANLAGSPAIKKGILQTVKVVDELVKVMGRHKPENIVIEMARENQTTQKGQKNSRERMKRIEEGIKELGSQILKEHPVENTQLQNEKLYLYYLQNGRDMYVDQELDINRLSDYDVDHIVPQSFLKDDSIDNKVLTRSDKARGKSDNVPSEEVVKKMKNYWRQLLNAKLITQRKFDNLTKAERGGLSELDKAGFIKRQLVETRQITKHVAQILDSRMNTKYDENDKLIREVKVITLKSKLVSDFRKDFQFYKVREINNYHHAHDAYLNAVVGTALIKKYPKLESEFVYGDYKVYDVRKMIAKSEQEIGKATAKYFFYSNIMNFFKTEITLANGEIRKRPLIETNGETGEIVWDKGRDFATVRKVLSMPQVNIVKKTEVQTGGFSKESILPKRNSDKLIARKKDWDPKKYGGFDSPTVAYSVLVVAKVEKGKSKKLKSVKELLGITIMERSSFEKNPIDFLEAKGYKEVKKDLIIKLPKYSLFELENGRKRMLASAGELQKGNELALPSKYVNFLYLASHYEKLKGSPEDNEQKQLFVEQHKHYLDEIIEQISEFSKRVILADANLDKVLSAYNKHRDKPIREQAENIIHLFTLTNLGAPAAFKYFDTTIDRKRYTSTKEVLDATLIHQSITGLYETRIDLSQLGGDGGPAPGSSGGGGGAVLGLEHLPRPPQISQFPLNPERLQALQHLVRKALEAGHIEPYTGPGNNPVFPVKKANGTWRFIHDLRATNSLTIDLSSSSPGPPDLSSLPTTLAHLQTIDLRDAFFQIPLPKQFQPYFAFTVPQQCNYGPGTRYAWKVLPQGFKNSPTLFEMQLAHILQPIRQAFPQCTILQYMDDILLASPSHEDLLLLSEATMASLISHGLPVSENKTQQTPGTIKFLGQIISPNHLTYDAVPTVPIRSRWALPELQALLGEIQWVSKGTPTLRQPLHSLYCALQRHTDPRDQIYLNPSQVQSLVQLRQALSQNCRSRLVQTLPLLGAIMLTLTGTTTVVFQSKEQWPLVWLHAPLPHTSQCPWGQLLASAVLLLDKYTLQSYGLLCQTIHHNISTQTFNQFIQTSDHPSVPILLHHSHRFKNLGAQTGELWNTFLKTAAPLAPVKALMPVFTLSPVIINTAPCLFSDGSTSRAAYILWDKQILSQRSFPLPPPHKSAQRAELLGLLHGLSSARSWRCLNIFLDSKYLYHYLRTLALGTFQGRSSQAPFQALLPRLLSRKVVYLHHVRSHTNLPDPISRLNALTDALLITPVLQLAGKRTADGSEFEKRTADGSEFESPKKKAKVE

SEQ ID NO: 1482 - protein, 2013 aa, synthetic construct
MPAAKRVKLDGGDKKYSIGLDIGTNSVGWAVITDEYKVPSKKFKVLGNTDRHSIKKNLIGALLFDSGETAEATRLKRTARRRYTRRKNRICYLQEIFSNEMAKVDDSFFHRLEESFLVEEDKKHERHPIFGNIVDEVAYHEKYPTIYHLRKKLVDSTDKADLRLIYLALAHMIKFRGHFLIEGDLNPDNSDVDKLFIQLVQTYNQLFEENPINASGVDAKAILSARLSKSRRLENLIAQLPGEKKNGLFGNLIALSLGLTPNFKSNFDLAEDAKLQLSKDTYDDDLDNLLAQIGDQYADLFLAAKNLSDAILLSDILRVNTEITKAPLSASMIKRYDEHHQDLTLLKALVRQQLPEKYKEIFFDQSKNGYAGYIDGGASQEEFYKFIKPILEKMDGTEELLVKLNREDLLRKQRTFDNGSIPHQIHLGELHAILRRQEDFYPFLKDNREKIEKILTFRIPYYVGPLARGNSRFAWMTRKSEETITPWNFEEVVDKGASAQSFIERMTNFDKNLPNEKVLPKHSLLYEYFTVYNELTKVKYVTEGMRKPAFLSGEQKKAIVDLLFKTNRKVTVKQLKEDYFKKIECFDSVEISGVEDRFNASLGTYHDLLKIIKDKDFLDNEENEDILEDIVLTLTLFEDREMIEERLKTYAHLFDDKVMKQLKRRRYTGWGRLSRKLINGIRDKQSGKTILDFLKSDGFANRNFMQLIHDDSLTFKEDIQKAQVSGQGDSLHEHIANLAGSPAIKKGILQTVKVVDELVKVMGRHKPENIVIEMARENQTTQKGQKNSRERMKRIEEGIKELGSQILKEHPVENTQLQNEKLYLYYLQNGRDMYVDQELDINRLSDYDVDHIVPQSFLKDDSIDNKVLTRSDKARGKSDNVPSEEVVKKMKNYWRQLLNAKLITQRKFDNLTKAERGGLSELDKAGFIKRQLVETRQITKHVAQILDSRMNTKYDENDKLIREVKVITLKSKLVSDFRKDFQFYKVREINNYHHAHDAYLNAVVGTALIKKYPKLESEFVYGDYKVYDVRKMIAKSEQEIGKATAKYFFYSNIMNFFKTEITLANGEIRKRPLIETNGETGEIVWDKGRDFATVRKVLSMPQVNIVKKTEVQTGGFSKESILPKRNSDKLIARKKDWDPKKYGGFDSPTVAYSVLVVAKVEKGKSKKLKSVKELLGITIMERSSFEKNPIDFLEAKGYKEVKKDLIIKLPKYSLFELENGRKRMLASAGELQKGNELALPSKYVNFLYLASHYEKLKGSPEDNEQKQLFVEQHKHYLDEIIEQISEFSKRVILADANLDKVLSAYNKHRDKPIREQAENIIHLFTLTNLGAPAAFKYFDTTIDRKRYTSTKEVLDATLIHQSITGLYETRIDLSQLGGDGGEAAAKGSSGGSGGAVLGLEHLPRPPQISQFPLNPERLQALQHLVRKALEAGHIEPYTGPGNNPVFPVKKANGTWRFIHDLRATNSLTIDLSSSSPGPPDLSSLPTTLAHLQTIDLRDAFFQIPLPKQFQPYFAFTVPQQCNYGPGTRYAWKVLPQGFKNSPTLFQMQLAHILQPIRQAFPQCTILQYMDDILLASPSHEDLLLLSEATMASLISHGLPVSENKTQQTPGTIKFLGQIISPNHLTYDAVPTVPIRSRWALPELQALLGEIQWVSKGTPTLRQPLHSLYCALQPHTDPRDQIYLNPSQVQSLVQLRQALSQNCRSRLVQTLPLLGAIMLTLTGTTTVVFQSKEQWPLVWLHAPLPHTSQCPWGQLLASAVLLLDKYTLQSYGLLCQTIHHNISTQTFNQFIQTSDHPSVPILLHHSHRFKNLGAQTGELWNTFLKTAAPLAPVKALMPVFTLSPVIINTAPCLFSDGSTSRAAYILWDKQILSQRSFPLPPPHKSAQRAELLGLLHGLSSARSWRCLNIFLDSKYLYHYLRTLALGTFQGRSSQAPFQALLPRLLSRKVVYLHHVRSHTNLPDPISRLNALTDALLITPVLQLAGKRTADGSEFEKRTADGSEFESPKKKAKVE

SEQ ID NO: 1483 - protein, 2010 aa, synthetic construct
MPAAKRVKLDGGDKKYSIGLDIGTNSVGWAVITDEYKVPSKKFKVLGNTDRHSIKKNLIGALLFDSGETAEATRLKRTARRRYTRRKNRICYLQEIFSNEMAKVDDSFFHRLEESFLVEEDKKHERHPIFGNIVDEVAYHEKYPTIYHLRKKLVDSTDKADLRLIYLALAHMIKFRGHFLIEGDLNPDNSDVDKLFIQLVQTYNQLFEENPINASGVDAKAILSARLSKSRRLENLIAQLPGEKKNGLFGNLIALSLGLTPNFKSNFDLAEDAKLQLSKDTYDDDLDNLLAQIGDQYADLFLAAKNLSDAILLSDILRVNTEITKAPLSASMIKRYDEHHQDLTLLKALVRQQLPEKYKEIFFDQSKNGYAGYIDGGASQEEFYKFIKPILEKMDGTEELLVKLNREDLLRKQRTFDNGSIPHQIHLGELHAILRRQEDFYPFLKDNREKIEKILTFRIPYYVGPLARGNSRFAWMTRKSEETITPWNFEEVVDKGASAQSFIERMTNFDKNLPNEKVLPKHSLLYEYFTVYNELTKVKYVTEGMRKPAFLSGEQKKAIVDLLFKTNRKVTVKQLKEDYFKKIECFDSVEISGVEDRFNASLGTYHDLLKIIKDKDFLDNEENEDILEDIVLTLTLFEDREMIEERLKTYAHLFDDKVMKQLKRRRYTGWGRLSRKLINGIRDKQSGKTILDFLKSDGFANRNFMQLIHDDSLTFKEDIQKAQVSGQGDSLHEHIANLAGSPAIKKGILQTVKVVDELVKVMGRHKPENIVIEMARENQTTQKGQKNSRERMKRIEEGIKELGSQILKEHPVENTQLQNEKLYLYYLQNGRDMYVDQELDINRLSDYDVDHIVPQSFLKDDSIDNKVLTRSDKARGKSDNVPSEEVVKKMKNYWRQLLNAKLITQRKFDNLTKAERGGLSELDKAGFIKRQLVETRQITKHVAQILDSRMNTKYDENDKLIREVKVITLKSKLVSDFRKDFQFYKVREINNYHHAHDAYLNAVVGTALIKKYPKLESEFVYGDYKVYDVRKMIAKSEQEIGKATAKYFFYSNIMNFFKTEITLANGEIRKRPLIETNGETGEIVWDKGRDFATVRKVLSMPQVNIVKKTEVQTGGFSKESILPKRNSDKLIARKKDWDPKKYGGFDSPTVAYSVLVVAKVEKGKSKKLKSVKELLGITIMERSSFEKNPIDFLEAKGYKEVKKDLIIKLPKYSLFELENGRKRMLASAGELQKGNELALPSKYVNFLYLASHYEKLKGSPEDNEQKQLFVEQHKHYLDEIIEQISEFSKRVILADANLDKVLSAYNKHRDKPIREQAENIIHLFTLTNLGAPAAFKYFDTTIDRKRYTSTKEVLDATLIHQSITGLYETRIDLSQLGGDGGEAAAKGGSGGAVLGLEHLPRPPQISQFPLNPERLQALQHLVRKALEAGHIEPYTGPGNNPVFPVKKANGTWRFIHDLRATNSLTIDLSSSSPGPPDLSSLPTTLAHLQTIDLRDAFFQIPLPKQFQPYFAFTVPQQCNYGPGTRYAWKVLPQGFKNSPTLFQMQLAHILQPIRQAFPQCTILQYMDDILLASPSHEDLLLLSEATMASLISHGLPVSENKTQQTPGTIKFLGQIISPNHLTYDAVPTVPIRSRWALPELQALLGEIQWVSKGTPTLRQPLHSLYCALQPHTDPRDQIYLNPSQVQSLVQLRQALSQNCRSRLVQTLPLLGAIMLTLTGTTTVVFQSKEQWPLVWLHAPLPHTSQCPWGQLLASAVLLLDKYTLQSYGLLCQTIHHNISTQTFNQFIQTSDHPSVPILLHHSHRFKNLGAQTGELWNTFLKTAAPLAPVKALMPVFTLSPVIINTAPCLFSDGSTSRAAYILWDKQILSQRSFPLPPPHKSAQRAELLGLLHGLSSARSWRCLNIFLDSKYLYHYLRTLALGTFQGRSSQAPFQALLPRLLSRKVVYLHHVRSHTNLPDPISRLNALTDALLITPVLQLAGKRTADGSEFEKRTADGSEFESPKKKAKVE

SEQ ID NO: 1484 - protein, 2013 aa, synthetic construct
MPAAKRVKLDGGDKKYSIGLDIGTNSVGWAVITDEYKVPSKKFKVLGNTDRHSIKKNLIGALLFDSGETAEATRLKRTARRRYTRRKNRICYLQEIFSNEMAKVDDSFFHRLEESFLVEEDKKHERHPIFGNIVDEVAYHEKYPTIYHLRKKLVDSTDKADLRLIYLALAHMIKFRGHFLIEGDLNPDNSDVDKLFIQLVQTYNQLFEENPINASGVDAKAILSARLSKSRRLENLIAQLPGEKKNGLFGNLIALSLGLTPNFKSNFDLAEDAKLQLSKDTYDDDLDNLLAQIGDQYADLFLAAKNLSDAILLSDILRVNTEITKAPLSASMIKRYDEHHQDLTLLKALVRQQLPEKYKEIFFDQSKNGYAGYIDGGASQEEFYKFIKPILEKMDGTEELLVKLNREDLLRKQRTFDNGSIPHQIHLGELHAILRRQEDFYPFLKDNREKIEKILTFRIPYYVGPLARGNSRFAWMTRKSEETITPWNFEEVVDKGASAQSFIERMTNFDKNLPNEKVLPKHSLLYEYFTVYNELTKVKYVTEGMRKPAFLSGEQKKAIVDLLFKTNRKVTVKQLKEDYFKKIECFDSVEISGVEDRFNASLGTYHDLLKIIKDKDFLDNEENEDILEDIVLTLTLFEDREMIEERLKTYAHLFDDKVMKQLKRRRYTGWGRLSRKLINGIRDKQSGKTILDFLKSDGFANRNFMQLIHDDSLTFKEDIQKAQVSGQGDSLHEHIANLAGSPAIKKGILQTVKVVDELVKVMGRHKPENIVIEMARENQTTQKGQKNSRERMKRIEEGIKELGSQILKEHPVENTQLQNEKLYLYYLQNGRDMYVDQELDINRLSDYDVDHIVPQSFLKDDSIDNKVLTRSDKARGKSDNVPSEEVVKKMKNYWRQLLNAKLITQRKFDNLTKAERGGLSELDKAGFIKRQLVETRQITKHVAQILDSRMNTKYDENDKLIREVKVITLKSKLVSDFRKDFQFYKVREINNYHHAHDAYLNAVVGTALIKKYPKLESEFVYGDYKVYDVRKMIAKSEQEIGKATAKYFFYSNIMNFFKTEITLANGEIRKRPLIETNGETGEIVWDKGRDFATVRKVLSMPQVNIVKKTEVQTGGFSKESILPKRNSDKLIARKKDWDPKKYGGFDSPTVAYSVLVVAKVEKGKSKKLKSVKELLGITIMERSSFEKNPIDFLEAKGYKEVKKDLIIKLPKYSLFELENGRKRMLASAGELQKGNELALPSKYVNFLYLASHYEKLKGSPEDNEQKQLFVEQHKHYLDEIIEQISEFSKRVILADANLDKVLSAYNKHRDKPIREQAENIIHLFTLTNLGAPAAFKYFDTTIDRKRYTSTKEVLDATLIHQSITGLYETRIDLSQLGGDGGGGSEAAAKPAPGGAVLGLEHLPRPPQISQFPLNPERLQALQHLVRKALEAGHIEPYTGPGNNPVFPVKKANGTWRFIHDLRATNSLTIDLSSSSPGPPDLSSLPTTLAHLQTIDLRDAFFQIPLPKQFQPYFAFTVPQQCNYGPGTRYAWKVLPQGFKNSPTLFQMQLAHILQPIRQAFPQCTILQYMDDILLASPSHEDLLLLSEATMASLISHGLPVSENKTQQTPGTIKFLGQIISPNHLTYDAVPTVPIRSRWALPELQALLGEIQWVSKGTPTLRQPLHSLYCALQPHTDPRDQIYLNPSQVQSLVQLRQALSQNCRSRLVQTLPLLGAIMLTLTGTTTVVFQSKEQWPLVWLHAPLPHTSQCPWGQLLASAVLLLDKYTLQSYGLLCQTIHHNISTQTFNQFIQTSDHPSVPILLHHSHRFKNLGAQTGELWNTFLKTAAPLAPVKALMPVFTLSPVIINTAPCLFSDGSTSRAAYILWDKQILSQRSFPLPPPHKSAQRAELLGLLHGLSSARSWRCLNIFLDSKYLYHYLRTLALGTFQGRSSQAPFQALLPRLLSRKVVYLHHVRSHTNLPDPISRLNALTDALLITPVLQLAGKRTADGSEFEKRTADGSEFESPKKKAKVE

SEQ ID NO: 1485 - protein, 2011 aa, synthetic construct
MPAAKRVKLDGGDKKYSIGLDIGTNSVGWAVITDEYKVPSKKFKVLGNTDRHSIKKNLIGALLFDSGETAEATRLKRTARRRYTRRKNRICYLQEIFSNEMAKVDDSFFHRLEESFLVEEDKKHERHPIFGNIVDEVAYHEKYPTIYHLRKKLVDSTDKADLRLIYLALAHMIKFRGHFLIEGDLNPDNSDVDKLFIQLVQTYNQLFEENPINASGVDAKAILSARLSKSRRLENLIAQLPGEKKNGLFGNLIALSLGLTPNFKSNFDLAEDAKLQLSKDTYDDDLDNLLAQIGDQYADLFLAAKNLSDAILLSDILRVNTEITKAPLSASMIKRYDEHHQDLTLLKALVRQQLPEKYKEIFFDQSKNGYAGYIDGGASQEEFYKFIKPILEKMDGTEELLVKLNREDLLRKQRTFDNGSIPHQIHLGELHAILRRQEDFYPFLKDNREKIEKILTFRIPYYVGPLARGNSRFAWMTRKSEETITPWNFEEVVDKGASAQSFIERMTNFDKNLPNEKVLPKHSLLYEYFTVYNELTKVKYVTEGMRKPAFLSGEQKKAIVDLLFKTNRKVTVKQLKEDYFKKIECFDSVEISGVEDRFNASLGTYHDLLKIIKDKDFLDNEENEDILEDIVLTLTLFEDREMIEERLKTYAHLFDDKVMKQLKRRRYTGWGRLSRKLINGIRDKQSGKTILDFLKSDGFANRNFMQLIHDDSLTFKEDIQKAQVSGQGDSLHEHIANLAGSPAIKKGILQTVKVVDELVKVMGRHKPENIVIEMARENQTTQKGQKNSRERMKRIEEGIKELGSQILKEHPVENTQLQNEKLYLYYLQNGRDMYVDQELDINRLSDYDVDHIVPQSFLKDDSIDNKVLTRSDKARGKSDNVPSEEVVKKMKNYWRQLLNAKLITQRKFDNLTKAERGGLSELDKAGFIKRQLVETRQITKHVAQILDSRMNTKYDENDKLIREVKVITLKSKLVSDFRKDFQFYKVREINNYHHAHDAYLNAVVGTALIKKYPKLESEFVYGDYKVYDVRKMIAKSEQEIGKATAKYFFYSNIMNFFKTEITLANGEIRKRPLIETNGETGEIVWDKGRDFATVRKVLSMPQVNIVKKTEVQTGGFSKESILPKRNSDKLIARKKDWDPKKYGGFDSPTVAYSVLVVAKVEKGKSKKLKSVKELLGITIMERSSFEKNPIDFLEAKGYKEVKKDLIIKLPKYSLFELENGRKRMLASAGELQKGNELALPSKYVNFLYLASHYEKLKGSPEDNEQKQLFVEQHKHYLDEIIEQISEFSKRVILADANLDKVLSAYNKHRDKPIREQAENIIHLFTLTNLGAPAAFKYFDTTIDRKRYTSTKEVLDATLIHQSITGLYETRIDLSQLGGDGGGGGGGSGSSGGAVLGLEHLPRPPQISQFPLNPERLQALQHLVRKALEAGHIEPYTGPGNNPVFPVKKANGTWRFIHDLRATNSLTIDLSSSSPGPPDLSSPPTTLAHLQTIDLRDAFFQIPLPKQFQPYFAFTVPQQCNYGPGTRYAWKVLPQGFKNSPTLFQMQLAHILQPIRQAFPQCTILQYMDDILLASPSHEDLLLLSEATMASLISHGLPVSENKTQQTPGTIKFLGQIISPNHLTYDAVPTVPIRSRWALPELQALLGEIQWVSKGTPTLRQPLHSLYCALQPHTDPRDQIYLNPSQVQSLVQLRQALSQNCRSRLVQTLPLLGAIMLTLTGTTTVVFQSKEQWPLVWLHAPLPHTSQCPWGQLLASAVLLLDKYTLQSYGLLCQTIHHNISTQTFNQFIQTSDHPSVPILLHHSHRFKNLGAQTGELWNTFLKTAAPLAPVKALMPVFTLSPVIINTAPCLFSDGSTSRAAYILWDKQILSQRSFPLPPPHKSAQRAELLGLLHGLSSARSWRCLNIFLDSKYLYHYLRTLALGTFQGRSSQAPFQALLPRLLSRKVVYLHHVRSHTNLPDPISRLNALTDALLITPVLQLAGKRTADGSEFEKRTADGSEFESPKKKAKVE

SEQ ID NO: 1486 - protein, 2013 aa, synthetic construct
MPAAKRVKLDGGDKKYSIGLDIGTNSVGWAVITDEYKVPSKKFKVLGNTDRHSIKKNLIGALLFDSGETAEATRLKRTARRRYTRRKNRICYLQEIFSNEMAKVDDSFFHRLEESFLVEEDKKHERHPIFGNIVDEVAYHEKYPTIYHLRKKLVDSTDKADLRLIYLALAHMIKFRGHFLIEGDLNPDNSDVDKLFIQLVQTYNQLFEENPINASGVDAKAILSARLSKSRRLENLIAQLPGEKKNGLFGNLIALSLGLTPNFKSNFDLAEDAKLQLSKDTYDDDLDNLLAQIGDQYADLFLAAKNLSDAILLSDILRVNTEITKAPLSASMIKRYDEHHQDLTLLKALVRQQLPEKYKEIFFDQSKNGYAGYIDGGASQEEFYKFIKPILEKMDGTEELLVKLNREDLLRKQRTFDNGSIPHQIHLGELHAILRRQEDFYPFLKDNREKIEKILTFRIPYYVGPLARGNSRFAWMTRKSEETITPWNFEEVVDKGASAQSFIERMTNFDKNLPNEKVLPKHSLLYEYFTVYNELTKVKYVTEGMRKPAFLSGEQKKAIVDLLFKTNRKVTVKQLKEDYFKKIECFDSVEISGVEDRFNASLGTYHDLLKIIKDKDFLDNEENEDILEDIVLTLTLFEDREMIEERLKTYAHLFDDKVMKQLKRRRYTGWGRLSRKLINGIRDKQSGKTILDFLKSDGFANRNFMQLIHDDSLTFKEDIQKAQVSGQGDSLHEHIANLAGSPAIKKGILQTVKVVDELVKVMGRHKPENIVIEMARENQTTQKGQKNSRERMKRIEEGIKELGSQILKEHPVENTQLQNEKLYLYYLQNGRDMYVDQELDINRLSDYDVDHIVPQSFLKDDSIDNKVLTRSDKARGKSDNVPSEEVVKKMKNYWRQLLNAKLITQRKFDNLTKAERGGLSELDKAGFIKRQLVETRQITKHVAQILDSRMNTKYDENDKLIREVKVITLKSKLVSDFRKDFQFYKVREINNYHHAHDAYLNAVVGTALIKKYPKLESEFVYGDYKVYDVRKMIAKSEQEIGKATAKYFFYSNIMNFFKTEITLANGEIRKRPLIETNGETGEIVWDKGRDFATVRKVLSMPQVNIVKKTEVQTGGFSKESILPKRNSDKLIARKKDWDPKKYGGFDSPTVAYSVLVVAKVEKGKSKKLKSVKELLGITIMERSSFEKNPIDFLEAKGYKEVKKDLIIKLPKYSLFELENGRKRMLASAGELQKGNELALPSKYVNFLYLASHYEKLKGSPEDNEQKQLFVEQHKHYLDEIIEQISEFSKRVILADANLDKVLSAYNKHRDKPIREQAENIIHLFTLTNLGAPAAFKYFDTTIDRKRYTSTKEVLDATLIHQSITGLYETRIDLSQLGGDGGEAAAKGSSGGSGGAVLGLEHLPRPPQISQFPLNPERLQALQHLVRKALEAGHIEPYTGPGNNPVFPVKKANGTWRFIHDLRATNSLTIDLSSSSPGPPDLSSPPTTLAHLQTIDLRDAFFQIPLPKQFQPYFAFTVPQQCNYGPGTRYAWKVLPQGFKNSPTLFQMQLAHILQPIRQAFPQCTILQYMDDILLASPSHEDLLLLSEATMASLISHGLPVSENKTQQTPGTIKFLGQIISPNHLTYDAVPTVPIRSRWALPELQALLGEIQWVSKGTPTLRQPLHSLYCALQPHTDPRDQIYLNPSQVQSLVQLRQALSQNCRSRLVQTLPLLGAIMLTLTGTTTVVFQSKEQWPLVWLHAPLPHTSQCPWGQLLASAVLLLDKYTLQSYGLLCQTIHHNISTQTFNQFIQTSDHPSVPILLHHSHRFKNLGAQTGELWNTFLKTAAPLAPVKALMPVFTLSPVIINTAPCLFSDGSTSRAAYILWDKQILSQRSFPLPPPHKSAQRAELLGLLHGLSSARSWRCLNIFLDSKYLYHYLRTLALGTFQGRSSQAPFQALLPRLLSRKVVYLHHVRSHTNLPDPISRLNALTDALLITPVLQLAGKRTADGSEFEKRTADGSEFESPKKKAKVE

SEQ ID NO: 1487 - protein, 2013 aa, synthetic construct
MPAAKRVKLDGGDKKYSIGLDIGTNSVGWAVITDEYKVPSKKFKVLGNTDRHSIKKNLIGALLFDSGETAEATRLKRTARRRYTRRKNRICYLQEIFSNEMAKVDDSFFHRLEESFLVEEDKKHERHPIFGNIVDEVAYHEKYPTIYHLRKKLVDSTDKADLRLIYLALAHMIKFRGHFLIEGDLNPDNSDVDKLFIQLVQTYNQLFEENPINASGVDAKAILSARLSKSRRLENLIAQLPGEKKNGLFGNLIALSLGLTPNFKSNFDLAEDAKLQLSKDTYDDDLDNLLAQIGDQYADLFLAAKNLSDAILLSDILRVNTEITKAPLSASMIKRYDEHHQDLTLLKALVRQQLPEKYKEIFFDQSKNGYAGYIDGGASQEEFYKFIKPILEKMDGTEELLVKLNREDLLRKQRTFDNGSIPHQIHLGELHAILRRQEDFYPFLKDNREKIEKILTFRIPYYVGPLARGNSRFAWMTRKSEETITPWNFEEVVDKGASAQSFIERMTNFDKNLPNEKVLPKHSLLYEYFTVYNELTKVKYVTEGMRKPAFLSGEQKKAIVDLLFKTNRKVTVKQLKEDYFKKIECFDSVEISGVEDRFNASLGTYHDLLKIIKDKDFLDNEENEDILEDIVLTLTLFEDREMIEERLKTYAHLFDDKVMKQLKRRRYTGWGRLSRKLINGIRDKQSGKTILDFLKSDGFANRNFMQLIHDDSLTFKEDIQKAQVSGQGDSLHEHIANLAGSPAIKKGILQTVKVVDELVKVMGRHKPENIVIEMARENQTTQKGQKNSRERMKRIEEGIKELGSQILKEHPVENTQLQNEKLYLYYLQNGRDMYVDQELDINRLSDYDVDHIVPQSFLKDDSIDNKVLTRSDKARGKSDNVPSEEVVKKMKNYWRQLLNAKLITQRKFDNLTKAERGGLSELDKAGFIKRQLVETRQITKHVAQILDSRMNTKYDENDKLIREVKVITLKSKLVSDFRKDFQFYKVREINNYHHAHDAYLNAVVGTALIKKYPKLESEFVYGDYKVYDVRKMIAKSEQEIGKATAKYFFYSNIMNFFKTEITLANGEIRKRPLIETNGETGEIVWDKGRDFATVRKVLSMPQVNIVKKTEVQTGGFSKESILPKRNSDKLIARKKDWDPKKYGGFDSPTVAYSVLVVAKVEKGKSKKLKSVKELLGITIMERSSFEKNPIDFLEAKGYKEVKKDLIIKLPKYSLFELENGRKRMLASAGELQKGNELALPSKYVNFLYLASHYEKLKGSPEDNEQKQLFVEQHKHYLDEIIEQISEFSKRVILADANLDKVLSAYNKHRDKPIREQAENIIHLFTLTNLGAPAAFKYFDTTIDRKRYTSTKEVLDATLIHQSITGLYETRIDLSQLGGDGGPAPEAAAKGGGGGAVLGLEHLPRPPQISQFPLNPERLQALQHLVRKALEAGHIEPYTGPGNNPVFPVKKANGTWRFIHDLRATNSLTIDLSSSSPGPPDLSSPPTTLAHLQTIDLRDAFFQIPLPKQFQPYFAFTVPQQCNYGPGTRYAWKVLPQGFKNSPTLFQMQLAHILQPIRQAFPQCTILQYMDDILLASPSHEDLLLLSEATMASLISHGLPVSENKTQQTPGTIKFLGQIISPNHLTYDAVPTVPIRSRWALPELQALLGEIQWVSKGTPTLRQPLHSLYCALQPHTDPRDQIYLNPSQVQSLVQLRQALSQNCRSRLVQTLPLLGAIMLTLTGTTTVVFQSKEQWPLVWLHAPLPHTSQCPWGQLLASAVLLLDKYTLQSYGLLCQTIHHNISTQTFNQFIQTSDHPSVPILLHHSHRFKNLGAQTGELWNTFLKTAAPLAPVKALMPVFTLSPVIINTAPCLFSDGSTSRAAYILWDKQILSQRSFPLPPPHKSAQRAELLGLLHGLSSARSWRCLNIFLDSKYLYHYLRTLALGTFQGRSSQAPFQALLPRLLSRKVVYLHHVRSHTNLPDPISRLNALTDALLITPVLQLAGKRTADGSEFEKRTADGSEFESPKKKAKVE

SEQ ID NO: 1488 - protein, 2017 aa, synthetic construct
MPAAKRVKLDGGDKKYSIGLDIGTNSVGWAVITDEYKVPSKKFKVLGNTDRHSIKKNLIGALLFDSGETAEATRLKRTARRRYTRRKNRICYLQEIFSNEMAKVDDSFFHRLEESFLVEEDKKHERHPIFGNIVDEVAYHEKYPTIYHLRKKLVDSTDKADLRLIYLALAHMIKFRGHFLIEGDLNPDNSDVDKLFIQLVQTYNQLFEENPINASGVDAKAILSARLSKSRRLENLIAQLPGEKKNGLFGNLIALSLGLTPNFKSNFDLAEDAKLQLSKDTYDDDLDNLLAQIGDQYADLFLAAKNLSDAILLSDILRVNTEITKAPLSASMIKRYDEHHQDLTLLKALVRQQLPEKYKEIFFDQSKNGYAGYIDGGASQEEFYKFIKPILEKMDGTEELLVKLNREDLLRKQRTFDNGSIPHQIHLGELHAILRRQEDFYPFLKDNREKIEKILTFRIPYYVGPLARGNSRFAWMTRKSEETITPWNFEEVVDKGASAQSFIERMTNFDKNLPNEKVLPKHSLLYEYFTVYNELTKVKYVTEGMRKPAFLSGEQKKAIVDLLFKTNRKVTVKQLKEDYFKKIECFDSVEISGVEDRFNASLGTYHDLLKIIKDKDFLDNEENEDILEDIVLTLTLFEDREMIEERLKTYAHLFDDKVMKQLKRRRYTGWGRLSRKLINGIRDKQSGKTILDFLKSDGFANRNFMQLIHDDSLTFKEDIQKAQVSGQGDSLHEHIANLAGSPAIKKGILQTVKVVDELVKVMGRHKPENIVIEMARENQTTQKGQKNSRERMKRIEEGIKELGSQILKEHPVENTQLQNEKLYLYYLQNGRDMYVDQELDINRLSDYDVDHIVPQSFLKDDSIDNKVLTRSDKARGKSDNVPSEEVVKKMKNYWRQLLNAKLITQRKFDNLTKAERGGLSELDKAGFIKRQLVETRQITKHVAQILDSRMNTKYDENDKLIREVKVITLKSKLVSDFRKDFQFYKVREINNYHHAHDAYLNAVVGTALIKKYPKLESEFVYGDYKVYDVRKMIAKSEQEIGKATAKYFFYSNIMNFFKTEITLANGEIRKRPLIETNGETGEIVWDKGRDFATVRKVLSMPQVNIVKKTEVQTGGFSKESILPKRNSDKLIARKKDWDPKKYGGFDSPTVAYSVLVVAKVEKGKSKKLKSVKELLGITIMERSSFEKNPIDFLEAKGYKEVKKDLIIKLPKYSLFELENGRKRMLASAGELQKGNELALPSKYVNFLYLASHYEKLKGSPEDNEQKQLFVEQHKHYLDEIIEQISEFSKRVILADANLDKVLSAYNKHRDKPIREQAENIIHLFTLTNLGAPAAFKYFDTTIDRKRYTSTKEVLDATLIHQSITGLYETRIDLSQLGGDGGGGGGSEAAAKGGGGSGGAVLGLEHLPRPPEISQFPLNPERLQALQHLVRKALEAGHIEPYTGPGNNPVFPVKKANGTWRFIHDLRATNSLTIDLSSSSPGPPDLSSLPTTLAHLQTIDLKDAFFQIPLPKQFQPYFAFTVPQQCNYGPGTRYAWRVLPQGFKNSPTLFEMQLAHILQPIRQAFPQCTILQYMDDILLASPSHADLQLLSEATMASLISHGLPVSENKTQQTPGTIKFLGQIISPNHLTYDAVPKVPIRSRWALPELQALLGEIQWVSKGTPTLRQPLHSLYCALQRHTDPRDQIYLNPSQVQSLVQLRQALSQNCRSRLVQTLPLLGAIMLTLTGTTTVVFQSKQQWPLVWLHAPLPHTSQCPWGQLLASAVLLLDKYTLQSYGLLCQTIHHNISTQTFNQFIQTSDHPSVPILLHHSHRFKNLGAQTGELWNTFLKTTAPLAPVKALMPVFTLSPVIINTAPCLFSDGSTSQAAYILWDKHILSQRSFPLPPPHKSAQRAELLGLLHGLSSARSWRCLNIFLDSKYLYHYLRTLALGTFQGRSSQAPFQALLPRLLSRKVVYLHHVRSHTNLPDPISRLNALTDALLITPVLQLAGKRTADGSEFEKRTADGSEFESPKKKAKVE

SEQ ID NO: 1489 - protein, 2017 aa, synthetic construct
MPAAKRVKLDGGDKKYSIGLDIGTNSVGWAVITDEYKVPSKKFKVLGNTDRHSIKKNLIGALLFDSGETAEATRLKRTARRRYTRRKNRICYLQEIFSNEMAKVDDSFFHRLEESFLVEEDKKHERHPIFGNIVDEVAYHEKYPTIYHLRKKLVDSTDKADLRLIYLALAHMIKFRGHFLIEGDLNPDNSDVDKLFIQLVQTYNQLFEENPINASGVDAKAILSARLSKSRRLENLIAQLPGEKKNGLFGNLIALSLGLTPNFKSNFDLAEDAKLQLSKDTYDDDLDNLLAQIGDQYADLFLAAKNLSDAILLSDILRVNTEITKAPLSASMIKRYDEHHQDLTLLKALVRQQLPEKYKEIFFDQSKNGYAGYIDGGASQEEFYKFIKPILEKMDGTEELLVKLNREDLLRKQRTFDNGSIPHQIHLGELHAILRRQEDFYPFLKDNREKIEKILTFRIPYYVGPLARGNSRFAWMTRKSEETITPWNFEEVVDKGASAQSFIERMTNFDKNLPNEKVLPKHSLLYEYFTVYNELTKVKYVTEGMRKPAFLSGEQKKAIVDLLFKTNRKVTVKQLKEDYFKKIECFDSVEISGVEDRFNASLGTYHDLLKIIKDKDFLDNEENEDILEDIVLTLTLFEDREMIEERLKTYAHLFDDKVMKQLKRRRYTGWGRLSRKLINGIRDKQSGKTILDFLKSDGFANRNFMQLIHDDSLTFKEDIQKAQVSGQGDSLHEHIANLAGSPAIKKGILQTVKVVDELVKVMGRHKPENIVIEMARENQTTQKGQKNSRERMKRIEEGIKELGSQILKEHPVENTQLQNEKLYLYYLQNGRDMYVDQELDINRLSDYDVDHIVPQSFLKDDSIDNKVLTRSDKARGKSDNVPSEEVVKKMKNYWRQLLNAKLITQRKFDNLTKAERGGLSELDKAGFIKRQLVETRQITKHVAQILDSRMNTKYDENDKLIREVKVITLKSKLVSDFRKDFQFYKVREINNYHHAHDAYLNAVVGTALIKKYPKLESEFVYGDYKVYDVRKMIAKSEQEIGKATAKYFFYSNIMNFFKTEITLANGEIRKRPLIETNGETGEIVWDKGRDFATVRKVLSMPQVNIVKKTEVQTGGFSKESILPKRNSDKLIARKKDWDPKKYGGFDSPTVAYSVLVVAKVEKGKSKKLKSVKELLGITIMERSSFEKNPIDFLEAKGYKEVKKDLIIKLPKYSLFELENGRKRMLASAGELQKGNELALPSKYVNFLYLASHYEKLKGSPEDNEQKQLFVEQHKHYLDEIIEQISEFSKRVILADANLDKVLSAYNKHRDKPIREQAENIIHLFTLTNLGAPAAFKYFDTTIDRKRYTSTKEVLDATLIHQSITGLYETRIDLSQLGGDGGEAAAKEAAAKEAAAKGGAVLGLEHLPRPPEISQFPLNPERLQALQHLVRKALEAGHIEPYTGPGNNPVFPVKKANGTWRFIHDLRATNSLTIDLSSSSPGPPDLSSLPTTLAHLQTIDLKDAFFQIPLPKQFQPYFAFTVPQQCNYGPGTRYAWRVLPQGFKNSPTLFEMQLAHILQPIRQAFPQCTILQYMDDILLASPSHADLQLLSEATMASLISHGLPVSENKTQQTPGTIKFLGQIISPNHLTYDAVPKVPIRSRWALPELQALLGEIQWVSKGTPTLRQPLHSLYCALQRHTDPRDQIYLNPSQVQSLVQLRQALSQNCRSRLVQTLPLLGAIMLTLTGTTTVVFQSKQQWPLVWLHAPLPHTSQCPWGQLLASAVLLLDKYTLQSYGLLCQTIHHNISTQTFNQFIQTSDHPSVPILLHHSHRFKNLGAQTGELWNTFLKTTAPLAPVKALMPVFTLSPVIINTAPCLFSDGSTSQAAYILWDKHILSQRSFPLPPPHKSAQRAELLGLLHGLSSARSWRCLNIFLDSKYLYHYLRTLALGTFQGRSSQAPFQALLPRLLSRKVVYLHHVRSHTNLPDPISRLNALTDALLITPVLQLAGKRTADGSEFEKRTADGSEFESPKKKAKVE

SEQ ID NO: 1490 - protein, 2010 aa, synthetic construct
MPAAKRVKLDGGDKKYSIGLDIGTNSVGWAVITDEYKVPSKKFKVLGNTDRHSIKKNLIGALLFDSGETAEATRLKRTARRRYTRRKNRICYLQEIFSNEMAKVDDSFFHRLEESFLVEEDKKHERHPIFGNIVDEVAYHEKYPTIYHLRKKLVDSTDKADLRLIYLALAHMIKFRGHFLIEGDLNPDNSDVDKLFIQLVQTYNQLFEENPINASGVDAKAILSARLSKSRRLENLIAQLPGEKKNGLFGNLIALSLGLTPNFKSNFDLAEDAKLQLSKDTYDDDLDNLLAQIGDQYADLFLAAKNLSDAILLSDILRVNTEITKAPLSASMIKRYDEHHQDLTLLKALVRQQLPEKYKEIFFDQSKNGYAGYIDGGASQEEFYKFIKPILEKMDGTEELLVKLNREDLLRKQRTFDNGSIPHQIHLGELHAILRRQEDFYPFLKDNREKIEKILTFRIPYYVGPLARGNSRFAWMTRKSEETITPWNFEEVVDKGASAQSFIERMTNFDKNLPNEKVLPKHSLLYEYFTVYNELTKVKYVTEGMRKPAFLSGEQKKAIVDLLFKTNRKVTVKQLKEDYFKKIECFDSVEISGVEDRFNASLGTYHDLLKIIKDKDFLDNEENEDILEDIVLTLTLFEDREMIEERLKTYAHLFDDKVMKQLKRRRYTGWGRLSRKLINGIRDKQSGKTILDFLKSDGFANRNFMQLIHDDSLTFKEDIQKAQVSGQGDSLHEHIANLAGSPAIKKGILQTVKVVDELVKVMGRHKPENIVIEMARENQTTQKGQKNSRERMKRIEEGIKELGSQILKEHPVENTQLQNEKLYLYYLQNGRDMYVDQELDINRLSDYDVDHIVPQSFLKDDSIDNKVLTRSDKARGKSDNVPSEEVVKKMKNYWRQLLNAKLITQRKFDNLTKAERGGLSELDKAGFIKRQLVETRQITKHVAQILDSRMNTKYDENDKLIREVKVITLKSKLVSDFRKDFQFYKVREINNYHHAHDAYLNAVVGTALIKKYPKLESEFVYGDYKVYDVRKMIAKSEQEIGKATAKYFFYSNIMNFFKTEITLANGEIRKRPLIETNGETGEIVWDKGRDFATVRKVLSMPQVNIVKKTEVQTGGFSKESILPKRNSDKLIARKKDWDPKKYGGFDSPTVAYSVLVVAKVEKGKSKKLKSVKELLGITIMERSSFEKNPIDFLEAKGYKEVKKDLIIKLPKYSLFELENGRKRMLASAGELQKGNELALPSKYVNFLYLASHYEKLKGSPEDNEQKQLFVEQHKHYLDEIIEQISEFSKRVILADANLDKVLSAYNKHRDKPIREQAENIIHLFTLTNLGAPAAFKYFDTTIDRKRYTSTKEVLDATLIHQSITGLYETRIDLSQLGGDGGGGGEAAAKGGAVLGLEHLPRPPEISQFPLNPERLQALQHLVRKALEAGHIEPYTGPGNNPVFPVKKANGTWRFIHDLRATNSLTIDLSSSSPGPPDLSSLPTTLAHLQTIDLKDAFFQIPLPKQFQPYFAFTVPQQCNYGPGTRYAWRVLPQGFKNSPTLFEMQLAHILQPIRQAFPQCTILQYMDDILLASPSHADLQLLSEATMASLISHGLPVSENKTQQTPGTIKFLGQIISPNHLTYDAVPKVPIRSRWALPELQALLGEIQWVSKGTPTLRQPLHSLYCALQRHTDPRDQIYLNPSQVQSLVQLRQALSQNCRSRLVQTLPLLGAIMLTLTGTTTVVFQSKQQWPLVWLHAPLPHTSQCPWGQLLASAVLLLDKYTLQSYGLLCQTIHHNISTQTFNQFIQTSDHPSVPILLHHSHRFKNLGAQTGELWNTFLKTTAPLAPVKALMPVFTLSPVIINTAPCLFSDGSTSQAAYILWDKHILSQRSFPLPPPHKSAQRAELLGLLHGLSSARSWRCLNIFLDSKYLYHYLRTLALGTFQGRSSQAPFQALLPRLLSRKVVYLHHVRSHTNLPDPISRLNALTDALLITPVLQLAGKRTADGSEFEKRTADGSEFESPKKKAKVE

SEQ ID NO: 1491 - protein, 2027 aa, synthetic construct
MPAAKRVKLDGGDKKYSIGLDIGTNSVGWAVITDEYKVPSKKFKVLGNTDRHSIKKNLIGALLFDSGETAEATRLKRTARRRYTRRKNRICYLQEIFSNEMAKVDDSFFHRLEESFLVEEDKKHERHPIFGNIVDEVAYHEKYPTIYHLRKKLVDSTDKADLRLIYLALAHMIKFRGHFLIEGDLNPDNSDVDKLFIQLVQTYNQLFEENPINASGVDAKAILSARLSKSRRLENLIAQLPGEKKNGLFGNLIALSLGLTPNFKSNFDLAEDAKLQLSKDTYDDDLDNLLAQIGDQYADLFLAAKNLSDAILLSDILRVNTEITKAPLSASMIKRYDEHHQDLTLLKALVRQQLPEKYKEIFFDQSKNGYAGYIDGGASQEEFYKFIKPILEKMDGTEELLVKLNREDLLRKQRTFDNGSIPHQIHLGELHAILRRQEDFYPFLKDNREKIEKILTFRIPYYVGPLARGNSRFAWMTRKSEETITPWNFEEVVDKGASAQSFIERMTNFDKNLPNEKVLPKHSLLYEYFTVYNELTKVKYVTEGMRKPAFLSGEQKKAIVDLLFKTNRKVTVKQLKEDYFKKIECFDSVEISGVEDRFNASLGTYHDLLKIIKDKDFLDNEENEDILEDIVLTLTLFEDREMIEERLKTYAHLFDDKVMKQLKRRRYTGWGRLSRKLINGIRDKQSGKTILDFLKSDGFANRNFMQLIHDDSLTFKEDIQKAQVSGQGDSLHEHIANLAGSPAIKKGILQTVKVVDELVKVMGRHKPENIVIEMARENQTTQKGQKNSRERMKRIEEGIKELGSQILKEHPVENTQLQNEKLYLYYLQNGRDMYVDQELDINRLSDYDVDHIVPQSFLKDDSIDNKVLTRSDKARGKSDNVPSEEVVKKMKNYWRQLLNAKLITQRKFDNLTKAERGGLSELDKAGFIKRQLVETRQITKHVAQILDSRMNTKYDENDKLIREVKVITLKSKLVSDFRKDFQFYKVREINNYHHAHDAYLNAVVGTALIKKYPKLESEFVYGDYKVYDVRKMIAKSEQEIGKATAKYFFYSNIMNFFKTEITLANGEIRKRPLIETNGETGEIVWDKGRDFATVRKVLSMPQVNIVKKTEVQTGGFSKESILPKRNSDKLIARKKDWDPKKYGGFDSPTVAYSVLVVAKVEKGKSKKLKSVKELLGITIMERSSFEKNPIDFLEAKGYKEVKKDLIIKLPKYSLFELENGRKRMLASAGELQKGNELALPSKYVNFLYLASHYEKLKGSPEDNEQKQLFVEQHKHYLDEIIEQISEFSKRVILADANLDKVLSAYNKHRDKPIREQAENIIHLFTLTNLGAPAAFKYFDTTIDRKRYTSTKEVLDATLIHQSITGLYETRIDLSQLGGDGGGGGGSGGGGSGGGGSGGGGSGGGGSGGAVLGLEHLPRPPEISQFPLNPERLQALQHLVRKALEAGHIEPYTGPGNNPVFPVKKANGTWRFIHDLRATNSLTIDLSSSSPGPPDLSSLPTTLAHLQTIDLKDAFFQIPLPKQFQPYFAFTVPQQCNYGPGTRYAWRVLPQGFKNSPTLFEMQLAHILQPIRQAFPQCTILQYMDDILLASPSHADLQLLSEATMASLISHGLPVSENKTQQTPGTIKFLGQIISPNHLTYDAVPKVPIRSRWALPELQALLGEIQWVSKGTPTLRQPLHSLYCALQRHTDPRDQIYLNPSQVQSLVQLRQALSQNCRSRLVQTLPLLGAIMLTLTGTTTVVFQSKQQWPLVWLHAPLPHTSQCPWGQLLASAVLLLDKYTLQSYGLLCQTIHHNISTQTFNQFIQTSDHPSVPILLHHSHRFKNLGAQTGELWNTFLKTTAPLAPVKALMPVFTLSPVIINTAPCLFSDGSTSQAAYILWDKHILSQRSFPLPPPHKSAQRAELLGLLHGLSSARSWRCLNIFLDSKYLYHYLRTLALGTFQGRSSQAPFQALLPRLLSRKVVYLHHVRSHTNLPDPISRLNALTDALLITPVLQLAGKRTADGSEFEKRTADGSEFESPKKKAKVE

SEQ ID NO: 1492 - protein, 2011 aa, synthetic construct
MPAAKRVKLDGGDKKYSIGLDIGTNSVGWAVITDEYKVPSKKFKVLGNTDRHSIKKNLIGALLFDSGETAEATRLKRTARRRYTRRKNRICYLQEIFSNEMAKVDDSFFHRLEESFLVEEDKKHERHPIFGNIVDEVAYHEKYPTIYHLRKKLVDSTDKADLRLIYLALAHMIKFRGHFLIEGDLNPDNSDVDKLFIQLVQTYNQLFEENPINASGVDAKAILSARLSKSRRLENLIAQLPGEKKNGLFGNLIALSLGLTPNFKSNFDLAEDAKLQLSKDTYDDDLDNLLAQIGDQYADLFLAAKNLSDAILLSDILRVNTEITKAPLSASMIKRYDEHHQDLTLLKALVRQQLPEKYKEIFFDQSKNGYAGYIDGGASQEEFYKFIKPILEKMDGTEELLVKLNREDLLRKQRTFDNGSIPHQIHLGELHAILRRQEDFYPFLKDNREKIEKILTFRIPYYVGPLARGNSRFAWMTRKSEETITPWNFEEVVDKGASAQSFIERMTNFDKNLPNEKVLPKHSLLYEYFTVYNELTKVKYVTEGMRKPAFLSGEQKKAIVDLLFKTNRKVTVKQLKEDYFKKIECFDSVEISGVEDRFNASLGTYHDLLKIIKDKDFLDNEENEDILEDIVLTLTLFEDREMIEERLKTYAHLFDDKVMKQLKRRRYTGWGRLSRKLINGIRDKQSGKTILDFLKSDGFANRNFMQLIHDDSLTFKEDIQKAQVSGQGDSLHEHIANLAGSPAIKKGILQTVKVVDELVKVMGRHKPENIVIEMARENQTTQKGQKNSRERMKRIEEGIKELGSQILKEHPVENTQLQNEKLYLYYLQNGRDMYVDQELDINRLSDYDVDHIVPQSFLKDDSIDNKVLTRSDKARGKSDNVPSEEVVKKMKNYWRQLLNAKLITQRKFDNLTKAERGGLSELDKAGFIKRQLVETRQITKHVAQILDSRMNTKYDENDKLIREVKVITLKSKLVSDFRKDFQFYKVREINNYHHAHDAYLNAVVGTALIKKYPKLESEFVYGDYKVYDVRKMIAKSEQEIGKATAKYFFYSNIMNFFKTEITLANGEIRKRPLIETNGETGEIVWDKGRDFATVRKVLSMPQVNIVKKTEVQTGGFSKESILPKRNSDKLIARKKDWDPKKYGGFDSPTVAYSVLVVAKVEKGKSKKLKSVKELLGITIMERSSFEKNPIDFLEAKGYKEVKKDLIIKLPKYSLFELENGRKRMLASAGELQKGNELALPSKYVNFLYLASHYEKLKGSPEDNEQKQLFVEQHKHYLDEIIEQISEFSKRVILADANLDKVLSAYNKHRDKPIREQAENIIHLFTLTNLGAPAAFKYFDTTIDRKRYTSTKEVLDATLIHQSITGLYETRIDLSQLGGDGGGGGGGSPAPGGAVLGLEHLPRPPEISQFPLNPERLQALQHLVRKALEAGHIEPYTGPGNNPVFPVKKANGTWRFIHDLRATNSLTIDLSSSSPGPPDLSSLPTTLAHLQTIDLKDAFFQIPLPKQFQPYFAFTVPQQCNYGPGTRYAWRVLPQGFKNSPTLFQMQLAHILQPIRQAFPQCTILQYMDDILLASPSHADLQLLSEATMASLISHGLPVSENKTQQTPGTIKFLGQIISPNHLTYDAVPKVPIRSRWALPELQALLGEIQWVSKGTPTLRQPLHSLYCALQPHTDPRDQIYLNPSQVQSLVQLRQALSQNCRSRLVQTLPLLGAIMLTLTGTTTVVFQSKQQWPLVWLHAPLPHTSQCPWGQLLASAVLLLDKYTLQSYGLLCQTIHHNISTQTFNQFIQTSDHPSVPILLHHSHRFKNLGAQTGELWNTFLKTTAPLAPVKALMPVFTLSPVIINTAPCLFSDGSTSQAAYILWDKHILSQRSFPLPPPHKSAQRAELLGLLHGLSSARSWRCLNIFLDSKYLYHYLRTLALGTFQGRSSQAPFQALLPRLLSRKVVYLHHVRSHTNLPDPISRLNALTDALLITPVLQLAGKRTADGSEFEKRTADGSEFESPKKKAKVE

SEQ ID NO: 1493 - protein, 2008 aa, synthetic construct
MPAAKRVKLDGGDKKYSIGLDIGTNSVGWAVITDEYKVPSKKFKVLGNTDRHSIKKNLIGALLFDSGETAEATRLKRTARRRYTRRKNRICYLQEIFSNEMAKVDDSFFHRLEESFLVEEDKKHERHPIFGNIVDEVAYHEKYPTIYHLRKKLVDSTDKADLRLIYLALAHMIKFRGHFLIEGDLNPDNSDVDKLFIQLVQTYNQLFEENPINASGVDAKAILSARLSKSRRLENLIAQLPGEKKNGLFGNLIALSLGLTPNFKSNFDLAEDAKLQLSKDTYDDDLDNLLAQIGDQYADLFLAAKNLSDAILLSDILRVNTEITKAPLSASMIKRYDEHHQDLTLLKALVRQQLPEKYKEIFFDQSKNGYAGYIDGGASQEEFYKFIKPILEKMDGTEELLVKLNREDLLRKQRTFDNGSIPHQIHLGELHAILRRQEDFYPFLKDNREKIEKILTFRIPYYVGPLARGNSRFAWMTRKSEETITPWNFEEVVDKGASAQSFIERMTNFDKNLPNEKVLPKHSLLYEYFTVYNELTKVKYVTEGMRKPAFLSGEQKKAIVDLLFKTNRKVTVKQLKEDYFKKIECFDSVEISGVEDRFNASLGTYHDLLKIIKDKDFLDNEENEDILEDIVLTLTLFEDREMIEERLKTYAHLFDDKVMKQLKRRRYTGWGRLSRKLINGIRDKQSGKTILDFLKSDGFANRNFMQLIHDDSLTFKEDIQKAQVSGQGDSLHEHIANLAGSPAIKKGILQTVKVVDELVKVMGRHKPENIVIEMARENQTTQKGQKNSRERMKRIEEGIKELGSQILKEHPVENTQLQNEKLYLYYLQNGRDMYVDQELDINRLSDYDVDHIVPQSFLKDDSIDNKVLTRSDKARGKSDNVPSEEVVKKMKNYWRQLLNAKLITQRKFDNLTKAERGGLSELDKAGFIKRQLVETRQITKHVAQILDSRMNTKYDENDKLIREVKVITLKSKLVSDFRKDFQFYKVREINNYHHAHDAYLNAVVGTALIKKYPKLESEFVYGDYKVYDVRKMIAKSEQEIGKATAKYFFYSNIMNFFKTEITLANGEIRKRPLIETNGETGEIVWDKGRDFATVRKVLSMPQVNIVKKTEVQTGGFSKESILPKRNSDKLIARKKDWDPKKYGGFDSPTVAYSVLVVAKVEKGKSKKLKSVKELLGITIMERSSFEKNPIDFLEAKGYKEVKKDLIIKLPKYSLFELENGRKRMLASAGELQKGNELALPSKYVNFLYLASHYEKLKGSPEDNEQKQLFVEQHKHYLDEIIEQISEFSKRVILADANLDKVLSAYNKHRDKPIREQAENIIHLFTLTNLGAPAAFKYFDTTIDRKRYTSTKEVLDATLIHQSITGLYETRIDLSQLGGDGGPAPGGSGGAVLGLEHLPRPPEISQFPLNPERLQALQHLVRKALEAGHIEPYTGPGNNPVFPVKKANGTWRFIHDLRATNSLTIDLSSSSPGPPDLSSLPTTLAHLQTIDLKDAFFQIPLPKQFQPYFAFTVPQQCNYGPGTRYAWRVLPQGFKNSPTLFQMQLAHILQPIRQAFPQCTILQYMDDILLASPSHADLQLLSEATMASLISHGLPVSENKTQQTPGTIKFLGQIISPNHLTYDAVPKVPIRSRWALPELQALLGEIQWVSKGTPTLRQPLHSLYCALQPHTDPRDQIYLNPSQVQSLVQLRQALSQNCRSRLVQTLPLLGAIMLTLTGTTTVVFQSKQQWPLVWLHAPLPHTSQCPWGQLLASAVLLLDKYTLQSYGLLCQTIHHNISTQTFNQFIQTSDHPSVPILLHHSHRFKNLGAQTGELWNTFLKTTAPLAPVKALMPVFTLSPVIINTAPCLFSDGSTSQAAYILWDKHILSQRSFPLPPPHKSAQRAELLGLLHGLSSARSWRCLNIFLDSKYLYHYLRTLALGTFQGRSSQAPFQALLPRLLSRKVVYLHHVRSHTNLPDPISRLNALTDALLITPVLQLAGKRTADGSEFEKRTADGSEFESPKKKAKVE

SEQ ID NO: 1494 - protein, 2011 aa, synthetic construct
MPAAKRVKLDGGDKKYSIGLDIGTNSVGWAVITDEYKVPSKKFKVLGNTDRHSIKKNLIGALLFDSGETAEATRLKRTARRRYTRRKNRICYLQEIFSNEMAKVDDSFFHRLEESFLVEEDKKHERHPIFGNIVDEVAYHEKYPTIYHLRKKLVDSTDKADLRLIYLALAHMIKFRGHFLIEGDLNPDNSDVDKLFIQLVQTYNQLFEENPINASGVDAKAILSARLSKSRRLENLIAQLPGEKKNGLFGNLIALSLGLTPNFKSNFDLAEDAKLQLSKDTYDDDLDNLLAQIGDQYADLFLAAKNLSDAILLSDILRVNTEITKAPLSASMIKRYDEHHQDLTLLKALVRQQLPEKYKEIFFDQSKNGYAGYIDGGASQEEFYKFIKPILEKMDGTEELLVKLNREDLLRKQRTFDNGSIPHQIHLGELHAILRRQEDFYPFLKDNREKIEKILTFRIPYYVGPLARGNSRFAWMTRKSEETITPWNFEEVVDKGASAQSFIERMTNFDKNLPNEKVLPKHSLLYEYFTVYNELTKVKYVTEGMRKPAFLSGEQKKAIVDLLFKTNRKVTVKQLKEDYFKKIECFDSVEISGVEDRFNASLGTYHDLLKIIKDKDFLDNEENEDILEDIVLTLTLFEDREMIEERLKTYAHLFDDKVMKQLKRRRYTGWGRLSRKLINGIRDKQSGKTILDFLKSDGFANRNFMQLIHDDSLTFKEDIQKAQVSGQGDSLHEHIANLAGSPAIKKGILQTVKVVDELVKVMGRHKPENIVIEMARENQTTQKGQKNSRERMKRIEEGIKELGSQILKEHPVENTQLQNEKLYLYYLQNGRDMYVDQELDINRLSDYDVDHIVPQSFLKDDSIDNKVLTRSDKARGKSDNVPSEEVVKKMKNYWRQLLNAKLITQRKFDNLTKAERGGLSELDKAGFIKRQLVETRQITKHVAQILDSRMNTKYDENDKLIREVKVITLKSKLVSDFRKDFQFYKVREINNYHHAHDAYLNAVVGTALIKKYPKLESEFVYGDYKVYDVRKMIAKSEQEIGKATAKYFFYSNIMNFFKTEITLANGEIRKRPLIETNGETGEIVWDKGRDFATVRKVLSMPQVNIVKKTEVQTGGFSKESILPKRNSDKLIARKKDWDPKKYGGFDSPTVAYSVLVVAKVEKGKSKKLKSVKELLGITIMERSSFEKNPIDFLEAKGYKEVKKDLIIKLPKYSLFELENGRKRMLASAGELQKGNELALPSKYVNFLYLASHYEKLKGSPEDNEQKQLFVEQHKHYLDEIIEQISEFSKRVILADANLDKVLSAYNKHRDKPIREQAENIIHLFTLTNLGAPAAFKYFDTTIDRKRYTSTKEVLDATLIHQSITGLYETRIDLSQLGGDGGGGGPAPGGSGGAVLGLEHLPRPPEISQFPLNPERLQALQHLVRKALEAGHIEPYTGPGNNPVFPVKKANGTWRFIHDLRATNSLTIDLSSSSPGPPDLSSLPTTLAHLQTIDLKDAFFQIPLPKQFQPYFAFTVPQQCNYGPGTRYAWRVLPQGFKNSPTLFQMQLAHILQPIRQAFPQCTILQYMDDILLASPSHADLQLLSEATMASLISHGLPVSENKTQQTPGTIKFLGQIISPNHLTYDAVPKVPIRSRWALPELQALLGEIQWVSKGTPTLRQPLHSLYCALQPHTDPRDQIYLNPSQVQSLVQLRQALSQNCRSRLVQTLPLLGAIMLTLTGTTTVVFQSKQQWPLVWLHAPLPHTSQCPWGQLLASAVLLLDKYTLQSYGLLCQTIHHNISTQTFNQFIQTSDHPSVPILLHHSHRFKNLGAQTGELWNTFLKTTAPLAPVKALMPVFTLSPVIINTAPCLFSDGSTSQAAYILWDKHILSQRSFPLPPPHKSAQRAELLGLLHGLSSARSWRCLNIFLDSKYLYHYLRTLALGTFQGRSSQAPFQALLPRLLSRKVVYLHHVRSHTNLPDPISRLNALTDALLITPVLQLAGKRTADGSEFEKRTADGSEFESPKKKAKVE

SEQ ID NO: 1495 - protein, 2017 aa, synthetic construct
MPAAKRVKLDGGDKKYSIGLDIGTNSVGWAVITDEYKVPSKKFKVLGNTDRHSIKKNLIGALLFDSGETAEATRLKRTARRRYTRRKNRICYLQEIFSNEMAKVDDSFFHRLEESFLVEEDKKHERHPIFGNIVDEVAYHEKYPTIYHLRKKLVDSTDKADLRLIYLALAHMIKFRGHFLIEGDLNPDNSDVDKLFIQLVQTYNQLFEENPINASGVDAKAILSARLSKSRRLENLIAQLPGEKKNGLFGNLIALSLGLTPNFKSNFDLAEDAKLQLSKDTYDDDLDNLLAQIGDQYADLFLAAKNLSDAILLSDILRVNTEITKAPLSASMIKRYDEHHQDLTLLKALVRQQLPEKYKEIFFDQSKNGYAGYIDGGASQEEFYKFIKPILEKMDGTEELLVKLNREDLLRKQRTFDNGSIPHQIHLGELHAILRRQEDFYPFLKDNREKIEKILTFRIPYYVGPLARGNSRFAWMTRKSEETITPWNFEEVVDKGASAQSFIERMTNFDKNLPNEKVLPKHSLLYEYFTVYNELTKVKYVTEGMRKPAFLSGEQKKAIVDLLFKTNRKVTVKQLKEDYFKKIECFDSVEISGVEDRFNASLGTYHDLLKIIKDKDFLDNEENEDILEDIVLTLTLFEDREMIEERLKTYAHLFDDKVMKQLKRRRYTGWGRLSRKLINGIRDKQSGKTILDFLKSDGFANRNFMQLIHDDSLTFKEDIQKAQVSGQGDSLHEHIANLAGSPAIKKGILQTVKVVDELVKVMGRHKPENIVIEMARENQTTQKGQKNSRERMKRIEEGIKELGSQILKEHPVENTQLQNEKLYLYYLQNGRDMYVDQELDINRLSDYDVDHIVPQSFLKDDSIDNKVLTRSDKARGKSDNVPSEEVVKKMKNYWRQLLNAKLITQRKFDNLTKAERGGLSELDKAGFIKRQLVETRQITKHVAQILDSRMNTKYDENDKLIREVKVITLKSKLVSDFRKDFQFYKVREINNYHHAHDAYLNAVVGTALIKKYPKLESEFVYGDYKVYDVRKMIAKSEQEIGKATAKYFFYSNIMNFFKTEITLANGEIRKRPLIETNGETGEIVWDKGRDFATVRKVLSMPQVNIVKKTEVQTGGFSKESILPKRNSDKLIARKKDWDPKKYGGFDSPTVAYSVLVVAKVEKGKSKKLKSVKELLGITIMERSSFEKNPIDFLEAKGYKEVKKDLIIKLPKYSLFELENGRKRMLASAGELQKGNELALPSKYVNFLYLASHYEKLKGSPEDNEQKQLFVEQHKHYLDEIIEQISEFSKRVILADANLDKVLSAYNKHRDKPIREQAENIIHLFTLTNLGAPAAFKYFDTTIDRKRYTSTKEVLDATLIHQSITGLYETRIDLSQLGGDGGGSSGSSGSSGSSGSSGGAVLGLEHLPRPPEISQFPLNPERLQALQHLVRKALEAGHIEPYTGPGNNPVFPVKKANGTWRFIHDLRATNSLTIDLSSSSPGPPDLSSLPTTLAHLQTIDLKDAFFQIPLPKQFQPYFAFTVPQQCNYGPGTRYAWRVLPQGFKNSPTLFQMQLAHILQPIRQAFPQCTILQYMDDILLASPSHADLQLLSEATMASLISHGLPVSENKTQQTPGTIKFLGQIISPNHLTYDAVPKVPIRSRWALPELQALLGEIQWVSKGTPTLRQPLHSLYCALQPHTDPRDQIYLNPSQVQSLVQLRQALSQNCRSRLVQTLPLLGAIMLTLTGTTTVVFQSKQQWPLVWLHAPLPHTSQCPWGQLLASAVLLLDKYTLQSYGLLCQTIHHNISTQTFNQFIQTSDHPSVPILLHHSHRFKNLGAQTGELWNTFLKTTAPLAPVKALMPVFTLSPVIINTAPCLFSDGSTSQAAYILWDKHILSQRSFPLPPPHKSAQRAELLGLLHGLSSARSWRCLNIFLDSKYLYHYLRTLALGTFQGRSSQAPFQALLPRLLSRKVVYLHHVRSHTNLPDPISRLNALTDALLITPVLQLAGKRTADGSEFEKRTADGSEFESPKKKAKVE

SEQ ID NO: 1496 - protein, 2002 aa, synthetic construct
MPAAKRVKLDGGDKKYSIGLDIGTNSVGWAVITDEYKVPSKKFKVLGNTDRHSIKKNLIGALLFDSGETAEATRLKRTARRRYTRRKNRICYLQEIFSNEMAKVDDSFFHRLEESFLVEEDKKHERHPIFGNIVDEVAYHEKYPTIYHLRKKLVDSTDKADLRLIYLALAHMIKFRGHFLIEGDLNPDNSDVDKLFIQLVQTYNQLFEENPINASGVDAKAILSARLSKSRRLENLIAQLPGEKKNGLFGNLIALSLGLTPNFKSNFDLAEDAKLQLSKDTYDDDLDNLLAQIGDQYADLFLAAKNLSDAILLSDILRVNTEITKAPLSASMIKRYDEHHQDLTLLKALVRQQLPEKYKEIFFDQSKNGYAGYIDGGASQEEFYKFIKPILEKMDGTEELLVKLNREDLLRKQRTFDNGSIPHQIHLGELHAILRRQEDFYPFLKDNREKIEKILTFRIPYYVGPLARGNSRFAWMTRKSEETITPWNFEEVVDKGASAQSFIERMTNFDKNLPNEKVLPKHSLLYEYFTVYNELTKVKYVTEGMRKPAFLSGEQKKAIVDLLFKTNRKVTVKQLKEDYFKKIECFDSVEISGVEDRFNASLGTYHDLLKIIKDKDFLDNEENEDILEDIVLTLTLFEDREMIEERLKTYAHLFDDKVMKQLKRRRYTGWGRLSRKLINGIRDKQSGKTILDFLKSDGFANRNFMQLIHDDSLTFKEDIQKAQVSGQGDSLHEHIANLAGSPAIKKGILQTVKVVDELVKVMGRHKPENIVIEMARENQTTQKGQKNSRERMKRIEEGIKELGSQILKEHPVENTQLQNEKLYLYYLQNGRDMYVDQELDINRLSDYDVDHIVPQSFLKDDSIDNKVLTRSDKARGKSDNVPSEEVVKKMKNYWRQLLNAKLITQRKFDNLTKAERGGLSELDKAGFIKRQLVETRQITKHVAQILDSRMNTKYDENDKLIREVKVITLKSKLVSDFRKDFQFYKVREINNYHHAHDAYLNAVVGTALIKKYPKLESEFVYGDYKVYDVRKMIAKSEQEIGKATAKYFFYSNIMNFFKTEITLANGEIRKRPLIETNGETGEIVWDKGRDFATVRKVLSMPQVNIVKKTEVQTGGFSKESILPKRNSDKLIARKKDWDPKKYGGFDSPTVAYSVLVVAKVEKGKSKKLKSVKELLGITIMERSSFEKNPIDFLEAKGYKEVKKDLIIKLPKYSLFELENGRKRMLASAGELQKGNELALPSKYVNFLYLASHYEKLKGSPEDNEQKQLFVEQHKHYLDEIIEQISEFSKRVILADANLDKVLSAYNKHRDKPIREQAENIIHLFTLTNLGAPAAFKYFDTTIDRKRYTSTKEVLDATLIHQSITGLYETRIDLSQLGGDGGEAAAKGGGLEHLPRPPEISQFPLNPERLQALQHLVRKALEAGHIEPYTGPGNNPVFPVKKANGTWRFIHDLRATNSLTVDLSSSSPGPPDLSSLPTTLAHLQTIDLKDAFFQIPLPKQFQPYFAFTVPQQCNYGPGTRYAWKVLPQGFKNSPTLFEMQLASILQPIRQAFPQCVILQYMDDILLASPSPEDLQQLSEATMASLISHGLPVSQDKTQQTPGTIKFLGQIISPNHITYDAVPTVPIRSRWALPELQALLGEIQWVSKGTPTLRQPLHSLYCALQGHTDPRDQIYLNPSQVQSLMQLQQALSQNCRSRLAQTLPLLGAIMLTLTGTTTVVFQSKQQWPLVWLHAPLPHTSQCPWGQLLASAVLLLDKYTLQSYGLLCQTIHHNISIQTFNQFIQTSDHPSVPILLHHSHRFKNLGAQTGELWNTFLKTAAPLAPVKALTPVFTLSPIIINTAPCLFSDGSTSQAAYILWDKHILSQRSFPLPPPHKSAQQAELLGLLHGLSSARSWHCLNIFLDSKYLYHYLRTLALGTFQGKSSQAPFQALLPRLLAHKVIYLHHVRSHTNLPDPISKLNALTDALLITPILAGKRTADGSEFEKRTADGSEFESPKKKAKVE

SEQ ID NO: 1497 - protein, 2015 aa, synthetic construct
MPAAKRVKLDGGDKKYSIGLDIGTNSVGWAVITDEYKVPSKKFKVLGNTDRHSIKKNLIGALLFDSGETAEATRLKRTARRRYTRRKNRICYLQEIFSNEMAKVDDSFFHRLEESFLVEEDKKHERHPIFGNIVDEVAYHEKYPTIYHLRKKLVDSTDKADLRLIYLALAHMIKFRGHFLIEGDLNPDNSDVDKLFIQLVQTYNQLFEENPINASGVDAKAILSARLSKSRRLENLIAQLPGEKKNGLFGNLIALSLGLTPNFKSNFDLAEDAKLQLSKDTYDDDLDNLLAQIGDQYADLFLAAKNLSDAILLSDILRVNTEITKAPLSASMIKRYDEHHQDLTLLKALVRQQLPEKYKEIFFDQSKNGYAGYIDGGASQEEFYKFIKPILEKMDGTEELLVKLNREDLLRKQRTFDNGSIPHQIHLGELHAILRRQEDFYPFLKDNREKIEKILTFRIPYYVGPLARGNSRFAWMTRKSEETITPWNFEEVVDKGASAQSFIERMTNFDKNLPNEKVLPKHSLLYEYFTVYNELTKVKYVTEGMRKPAFLSGEQKKAIVDLLFKTNRKVTVKQLKEDYFKKIECFDSVEISGVEDRFNASLGTYHDLLKIIKDKDFLDNEENEDILEDIVLTLTLFEDREMIEERLKTYAHLFDDKVMKQLKRRRYTGWGRLSRKLINGIRDKQSGKTILDFLKSDGFANRNFMQLIHDDSLTFKEDIQKAQVSGQGDSLHEHIANLAGSPAIKKGILQTVKVVDELVKVMGRHKPENIVIEMARENQTTQKGQKNSRERMKRIEEGIKELGSQILKEHPVENTQLQNEKLYLYYLQNGRDMYVDQELDINRLSDYDVDHIVPQSFLKDDSIDNKVLTRSDKARGKSDNVPSEEVVKKMKNYWRQLLNAKLITQRKFDNLTKAERGGLSELDKAGFIKRQLVETRQITKHVAQILDSRMNTKYDENDKLIREVKVITLKSKLVSDFRKDFQFYKVREINNYHHAHDAYLNAVVGTALIKKYPKLESEFVYGDYKVYDVRKMIAKSEQEIGKATAKYFFYSNIMNFFKTEITLANGEIRKRPLIETNGETGEIVWDKGRDFATVRKVLSMPQVNIVKKTEVQTGGFSKESILPKRNSDKLIARKKDWDPKKYGGFDSPTVAYSVLVVAKVEKGKSKKLKSVKELLGITIMERSSFEKNPIDFLEAKGYKEVKKDLIIKLPKYSLFELENGRKRMLASAGELQKGNELALPSKYVNFLYLASHYEKLKGSPEDNEQKQLFVEQHKHYLDEIIEQISEFSKRVILADANLDKVLSAYNKHRDKPIREQAENIIHLFTLTNLGAPAAFKYFDTTIDRKRYTSTKEVLDATLIHQSITGLYETRIDLSQLGGDGGGSSGSSGSSGSSGSSGSSGGGLEHLPRPPEISQFPLNPERLQALQHLVRKALEAGHIEPYTGPGNNPVFPVKKANGTWRFIHDLRATNSLTVDLSSSSPGPPDLSSLPTTLAHLQTIDLKDAFFQIPLPKQFQPYFAFTVPQQCNYGPGTRYAWKVLPQGFKNSPTLFEMQLASILQPIRQAFPQCVILQYMDDILLASPSPEDLQQLSEATMASLISHGLPVSQDKTQQTPGTIKFLGQIISPNHITYDAVPTVPIRSRWALPELQALLGEIQWVSKGTPTLRQPLHSLYCALQGHTDPRDQIYLNPSQVQSLMQLQQALSQNCRSRLAQTLPLLGAIMLTLTGTTTVVFQSKQQWPLVWLHAPLPHTSQCPWGQLLASAVLLLDKYTLQSYGLLCQTIHHNISIQTFNQFIQTSDHPSVPILLHHSHRFKNLGAQTGELWNTFLKTAAPLAPVKALTPVFTLSPIIINTAPCLFSDGSTSQAAYILWDKHILSQRSFPLPPPHKSAQQAELLGLLHGLSSARSWHCLNIFLDSKYLYHYLRTLALGTFQGKSSQAPFQALLPRLLAHKVIYLHHVRSHTNLPDPISKLNALTDALLITPILAGKRTADGSEFEKRTADGSEFESPKKKAKVE

SEQ ID NO: 1498 - protein, 2008 aa, synthetic construct
MPAAKRVKLDGGDKKYSIGLDIGTNSVGWAVITDEYKVPSKKFKVLGNTDRHSIKKNLIGALLFDSGETAEATRLKRTARRRYTRRKNRICYLQEIFSNEMAKVDDSFFHRLEESFLVEEDKKHERHPIFGNIVDEVAYHEKYPTIYHLRKKLVDSTDKADLRLIYLALAHMIKFRGHFLIEGDLNPDNSDVDKLFIQLVQTYNQLFEENPINASGVDAKAILSARLSKSRRLENLIAQLPGEKKNGLFGNLIALSLGLTPNFKSNFDLAEDAKLQLSKDTYDDDLDNLLAQIGDQYADLFLAAKNLSDAILLSDILRVNTEITKAPLSASMIKRYDEHHQDLTLLKALVRQQLPEKYKEIFFDQSKNGYAGYIDGGASQEEFYKFIKPILEKMDGTEELLVKLNREDLLRKQRTFDNGSIPHQIHLGELHAILRRQEDFYPFLKDNREKIEKILTFRIPYYVGPLARGNSRFAWMTRKSEETITPWNFEEVVDKGASAQSFIERMTNFDKNLPNEKVLPKHSLLYEYFTVYNELTKVKYVTEGMRKPAFLSGEQKKAIVDLLFKTNRKVTVKQLKEDYFKKIECFDSVEISGVEDRFNASLGTYHDLLKIIKDKDFLDNEENEDILEDIVLTLTLFEDREMIEERLKTYAHLFDDKVMKQLKRRRYTGWGRLSRKLINGIRDKQSGKTILDFLKSDGFANRNFMQLIHDDSLTFKEDIQKAQVSGQGDSLHEHIANLAGSPAIKKGILQTVKVVDELVKVMGRHKPENIVIEMARENQTTQKGQKNSRERMKRIEEGIKELGSQILKEHPVENTQLQNEKLYLYYLQNGRDMYVDQELDINRLSDYDVDHIVPQSFLKDDSIDNKVLTRSDKARGKSDNVPSEEVVKKMKNYWRQLLNAKLITQRKFDNLTKAERGGLSELDKAGFIKRQLVETRQITKHVAQILDSRMNTKYDENDKLIREVKVITLKSKLVSDFRKDFQFYKVREINNYHHAHDAYLNAVVGTALIKKYPKLESEFVYGDYKVYDVRKMIAKSEQEIGKATAKYFFYSNIMNFFKTEITLANGEIRKRPLIETNGETGEIVWDKGRDFATVRKVLSMPQVNIVKKTEVQTGGFSKESILPKRNSDKLIARKKDWDPKKYGGFDSPTVAYSVLVVAKVEKGKSKKLKSVKELLGITIMERSSFEKNPIDFLEAKGYKEVKKDLIIKLPKYSLFELENGRKRMLASAGELQKGNELALPSKYVNFLYLASHYEKLKGSPEDNEQKQLFVEQHKHYLDEIIEQISEFSKRVILADANLDKVLSAYNKHRDKPIREQAENIIHLFTLTNLGAPAAFKYFDTTIDRKRYTSTKEVLDATLIHQSITGLYETRIDLSQLGGDGGEAAAKGGGGGSGGGLEHLPRPPEISQFPLNPERLQALQHLVRKALEAGHIEPYTGPGNNPVFPVKKANGTWRFIHDLRATNSLTVDLSSSSPGPPDLSSLPTTLAHLQTIDLKDAFFQIPLPKQFQPYFAFTVPQQCNYGPGTRYAWKVLPQGFKNSPTLFEMQLASILQPIRQAFPQCVILQYMDDILLASPSPEDLQQLSEATMASLISHGLPVSQDKTQQTPGTIKFLGQIISPNHITYDAVPTVPIRSRWALPELQALLGEIQWVSKGTPTLRQPLHSLYCALQGHTDPRDQIYLNPSQVQSLMQLQQALSQNCRSRLAQTLPLLGAIMLTLTGTTTVVFQSKQQWPLVWLHAPLPHTSQCPWGQLLASAVLLLDKYTLQSYGLLCQTIHHNISIQTFNQFIQTSDHPSVPILLHHSHRFKNLGAQTGELWNTFLKTAAPLAPVKALTPVFTLSPIIINTAPCLFSDGSTSQAAYILWDKHILSQRSFPLPPPHKSAQQAELLGLLHGLSSARSWHCLNIFLDSKYLYHYLRTLALGTFQGKSSQAPFQALLPRLLAHKVIYLHHVRSHTNLPDPISKLNALTDALLITPILAGKRTADGSEFEKRTADGSEFESPKKKAKVE

SEQ ID NO: 1499 - protein, 2008 aa, synthetic construct
MPAAKRVKLDGGDKKYSIGLDIGTNSVGWAVITDEYKVPSKKFKVLGNTDRHSIKKNLIGALLFDSGETAEATRLKRTARRRYTRRKNRICYLQEIFSNEMAKVDDSFFHRLEESFLVEEDKKHERHPIFGNIVDEVAYHEKYPTIYHLRKKLVDSTDKADLRLIYLALAHMIKFRGHFLIEGDLNPDNSDVDKLFIQLVQTYNQLFEENPINASGVDAKAILSARLSKSRRLENLIAQLPGEKKNGLFGNLIALSLGLTPNFKSNFDLAEDAKLQLSKDTYDDDLDNLLAQIGDQYADLFLAAKNLSDAILLSDILRVNTEITKAPLSASMIKRYDEHHQDLTLLKALVRQQLPEKYKEIFFDQSKNGYAGYIDGGASQEEFYKFIKPILEKMDGTEELLVKLNREDLLRKQRTFDNGSIPHQIHLGELHAILRRQEDFYPFLKDNREKIEKILTFRIPYYVGPLARGNSRFAWMTRKSEETITPWNFEEVVDKGASAQSFIERMTNFDKNLPNEKVLPKHSLLYEYFTVYNELTKVKYVTEGMRKPAFLSGEQKKAIVDLLFKTNRKVTVKQLKEDYFKKIECFDSVEISGVEDRFNASLGTYHDLLKIIKDKDFLDNEENEDILEDIVLTLTLFEDREMIEERLKTYAHLFDDKVMKQLKRRRYTGWGRLSRKLINGIRDKQSGKTILDFLKSDGFANRNFMQLIHDDSLTFKEDIQKAQVSGQGDSLHEHIANLAGSPAIKKGILQTVKVVDELVKVMGRHKPENIVIEMARENQTTQKGQKNSRERMKRIEEGIKELGSQILKEHPVENTQLQNEKLYLYYLQNGRDMYVDQELDINRLSDYDVDHIVPQSFLKDDSIDNKVLTRSDKARGKSDNVPSEEVVKKMKNYWRQLLNAKLITQRKFDNLTKAERGGLSELDKAGFIKRQLVETRQITKHVAQILDSRMNTKYDENDKLIREVKVITLKSKLVSDFRKDFQFYKVREINNYHHAHDAYLNAVVGTALIKKYPKLESEFVYGDYKVYDVRKMIAKSEQEIGKATAKYFFYSNIMNFFKTEITLANGEIRKRPLIETNGETGEIVWDKGRDFATVRKVLSMPQVNIVKKTEVQTGGFSKESILPKRNSDKLIARKKDWDPKKYGGFDSPTVAYSVLVVAKVEKGKSKKLKSVKELLGITIMERSSFEKNPIDFLEAKGYKEVKKDLIIKLPKYSLFELENGRKRMLASAGELQKGNELALPSKYVNFLYLASHYEKLKGSPEDNEQKQLFVEQHKHYLDEIIEQISEFSKRVILADANLDKVLSAYNKHRDKPIREQAENIIHLFTLTNLGAPAAFKYFDTTIDRKRYTSTKEVLDATLIHQSITGLYETRIDLSQLGGDGGEAAAKGGSGGGGGGLEHLPRPPEISQFPLNPERLQALQHLVRKALEAGHIEPYTGPGNNPVFPVKKANGTWRFIHDLRATNSLTVDLSSSSPGPPDLSSLPTTLAHLQTIDLKDAFFQIPLPKQFQPYFAFTVPQQCNYGPGTRYAWKVLPQGFKNSPTLFEMQLASILQPIRQAFPQCVILQYMDDILLASPSPEDLQQLSEATMASLISHGLPVSQDKTQQTPGTIKFLGQIISPNHITYDAVPTVPIRSRWALPELQALLGEIQWVSKGTPTLRQPLHSLYCALQGHTDPRDQIYLNPSQVQSLMQLQQALSQNCRSRLAQTLPLLGAIMLTLTGTTTVVFQSKQQWPLVWLHAPLPHTSQCPWGQLLASAVLLLDKYTLQSYGLLCQTIHHNISIQTFNQFIQTSDHPSVPILLHHSHRFKNLGAQTGELWNTFLKTAAPLAPVKALTPVFTLSPIIINTAPCLFSDGSTSQAAYILWDKHILSQRSFPLPPPHKSAQQAELLGLLHGLSSARSWHCLNIFLDSKYLYHYLRTLALGTFQGKSSQAPFQALLPRLLAHKVIYLHHVRSHTNLPDPISKLNALTDALLITPILAGKRTADGSEFEKRTADGSEFESPKKKAKVE

SEQ ID NO: 1500 - protein, 2008 aa, synthetic construct
MPAAKRVKLDGGDKKYSIGLDIGTNSVGWAVITDEYKVPSKKFKVLGNTDRHSIKKNLIGALLFDSGETAEATRLKRTARRRYTRRKNRICYLQEIFSNEMAKVDDSFFHRLEESFLVEEDKKHERHPIFGNIVDEVAYHEKYPTIYHLRKKLVDSTDKADLRLIYLALAHMIKFRGHFLIEGDLNPDNSDVDKLFIQLVQTYNQLFEENPINASGVDAKAILSARLSKSRRLENLIAQLPGEKKNGLFGNLIALSLGLTPNFKSNFDLAEDAKLQLSKDTYDDDLDNLLAQIGDQYADLFLAAKNLSDAILLSDILRVNTEITKAPLSASMIKRYDEHHQDLTLLKALVRQQLPEKYKEIFFDQSKNGYAGYIDGGASQEEFYKFIKPILEKMDGTEELLVKLNREDLLRKQRTFDNGSIPHQIHLGELHAILRRQEDFYPFLKDNREKIEKILTFRIPYYVGPLARGNSRFAWMTRKSEETITPWNFEEVVDKGASAQSFIERMTNFDKNLPNEKVLPKHSLLYEYFTVYNELTKVKYVTEGMRKPAFLSGEQKKAIVDLLFKTNRKVTVKQLKEDYFKKIECFDSVEISGVEDRFNASLGTYHDLLKIIKDKDFLDNEENEDILEDIVLTLTLFEDREMIEERLKTYAHLFDDKVMKQLKRRRYTGWGRLSRKLINGIRDKQSGKTILDFLKSDGFANRNFMQLIHDDSLTFKEDIQKAQVSGQGDSLHEHIANLAGSPAIKKGILQTVKVVDELVKVMGRHKPENIVIEMARENQTTQKGQKNSRERMKRIEEGIKELGSQILKEHPVENTQLQNEKLYLYYLQNGRDMYVDQELDINRLSDYDVDHIVPQSFLKDDSIDNKVLTRSDKARGKSDNVPSEEVVKKMKNYWRQLLNAKLITQRKFDNLTKAERGGLSELDKAGFIKRQLVETRQITKHVAQILDSRMNTKYDENDKLIREVKVITLKSKLVSDFRKDFQFYKVREINNYHHAHDAYLNAVVGTALIKKYPKLESEFVYGDYKVYDVRKMIAKSEQEIGKATAKYFFYSNIMNFFKTEITLANGEIRKRPLIETNGETGEIVWDKGRDFATVRKVLSMPQVNIVKKTEVQTGGFSKESILPKRNSDKLIARKKDWDPKKYGGFDSPTVAYSVLVVAKVEKGKSKKLKSVKELLGITIMERSSFEKNPIDFLEAKGYKEVKKDLIIKLPKYSLFELENGRKRMLASAGELQKGNELALPSKYVNFLYLASHYEKLKGSPEDNEQKQLFVEQHKHYLDEIIEQISEFSKRVILADANLDKVLSAYNKHRDKPIREQAENIIHLFTLTNLGAPAAFKYFDTTIDRKRYTSTKEVLDATLIHQSITGLYETRIDLSQLGGDGGPAPAPAPAPAPGGGLEHLPRPPEISQFPLNPERLQALQHLVRKALEAGHIEPYTGPGNNPVFPVKKANGTWRFIHDLRATNSLTVDLSSSSPGPPDLSSLPTTLAHLQTIDLKDAFFQIPLPKQFQPYFAFTVPQQCNYGPGTRYAWKVLPQGFKNSPTLFQMQLASILQPIRQAFPQCVILQYMDDILLASPSPEDLQQLSEATMASLISHGLPVSQDKTQQTPGTIKFLGQIISPNHITYDAVPTVPIRSRWALPELQALLGEIQWVSKGTPTLRQPLHSLYCALQGHTDPRDQIYLNPSQVQSLMQLQQALSQNCRSRLAQTLPLLGAIMLTLTGTTTVVFQSKQQWPLVWLHAPLPHTSQCPWGQLLASAVLLLDKYTLQSYGLLCQTIHHNISIQTFNQFIQTSDHPSVPILLHHSHRFKNLGAQTGELWNTFLKTAAPLAPVKALTPVFTLSPIIINTAPCLFSDGSTSQAAYILWDKHILSQRSFPLPPPHKSAQQAELLGLLHGLSSARSWHCLNIFLDSKYLYHYLRTLAWGTFQGKSSQAPFQALLPRLLAHKVIYLHHVRSHTNLPDPISKLNALTDALLITPILAGKRTADGSEFEKRTADGSEFESPKKKAKVE

SEQ ID NO: 1501 - protein, 2006 aa, synthetic construct
MPAAKRVKLDGGDKKYSIGLDIGTNSVGWAVITDEYKVPSKKFKVLGNTDRHSIKKNLIGALLFDSGETAEATRLKRTARRRYTRRKNRICYLQEIFSNEMAKVDDSFFHRLEESFLVEEDKKHERHPIFGNIVDEVAYHEKYPTIYHLRKKLVDSTDKADLRLIYLALAHMIKFRGHFLIEGDLNPDNSDVDKLFIQLVQTYNQLFEENPINASGVDAKAILSARLSKSRRLENLIAQLPGEKKNGLFGNLIALSLGLTPNFKSNFDLAEDAKLQLSKDTYDDDLDNLLAQIGDQYADLFLAAKNLSDAILLSDILRVNTEITKAPLSASMIKRYDEHHQDLTLLKALVRQQLPEKYKEIFFDQSKNGYAGYIDGGASQEEFYKFIKPILEKMDGTEELLVKLNREDLLRKQRTFDNGSIPHQIHLGELHAILRRQEDFYPFLKDNREKIEKILTFRIPYYVGPLARGNSRFAWMTRKSEETITPWNFEEVVDKGASAQSFIERMTNFDKNLPNEKVLPKHSLLYEYFTVYNELTKVKYVTEGMRKPAFLSGEQKKAIVDLLFKTNRKVTVKQLKEDYFKKIECFDSVEISGVEDRFNASLGTYHDLLKIIKDKDFLDNEENEDILEDIVLTLTLFEDREMIEERLKTYAHLFDDKVMKQLKRRRYTGWGRLSRKLINGIRDKQSGKTILDFLKSDGFANRNFMQLIHDDSLTFKEDIQKAQVSGQGDSLHEHIANLAGSPAIKKGILQTVKVVDELVKVMGRHKPENIVIEMARENQTTQKGQKNSRERMKRIEEGIKELGSQILKEHPVENTQLQNEKLYLYYLQNGRDMYVDQELDINRLSDYDVDHIVPQSFLKDDSIDNKVLTRSDKARGKSDNVPSEEVVKKMKNYWRQLLNAKLITQRKFDNLTKAERGGLSELDKAGFIKRQLVETRQITKHVAQILDSRMNTKYDENDKLIREVKVITLKSKLVSDFRKDFQFYKVREINNYHHAHDAYLNAVVGTALIKKYPKLESEFVYGDYKVYDVRKMIAKSEQEIGKATAKYFFYSNIMNFFKTEITLANGEIRKRPLIETNGETGEIVWDKGRDFATVRKVLSMPQVNIVKKTEVQTGGFSKESILPKRNSDKLIARKKDWDPKKYGGFDSPTVAYSVLVVAKVEKGKSKKLKSVKELLGITIMERSSFEKNPIDFLEAKGYKEVKKDLIIKLPKYSLFELENGRKRMLASAGELQKGNELALPSKYVNFLYLASHYEKLKGSPEDNEQKQLFVEQHKHYLDEIIEQISEFSKRVILADANLDKVLSAYNKHRDKPIREQAENIIHLFTLTNLGAPAAFKYFDTTIDRKRYTSTKEVLDATLIHQSITGLYETRIDLSQLGGDGGGGGGGSPAPGGGLEHLPRPPEISQFPLNPERLQALQHLVRKALEAGHIEPYTGPGNNPVFPVKKANGTWRFIHDLRATNSLTVDLSSSSPGPPDLSSLPTTLAHLQTIDLKDAFFQIPLPKQFQPYFAFTVPQQCNYGPGTRYAWKVLPQGFKNSPTLFQMQLASILQPIRQAFPQCVILQYMDDILLASPSPEDLQQLSEATMASLISHGLPVSQDKTQQTPGTIKFLGQIISPNHITYDAVPTVPIRSRWALPELQALLGEIQWVSKGTPTLRQPLHSLYCALQGHTDPRDQIYLNPSQVQSLMQLQQALSQNCRSRLAQTLPLLGAIMLTLTGTTTVVFQSKQQWPLVWLHAPLPHTSQCPWGQLLASAVLLLDKYTLQSYGLLCQTIHHNISIQTFNQFIQTSDHPSVPILLHHSHRFKNLGAQTGELWNTFLKTAAPLAPVKALTPVFTLSPIIINTAPCLFSDGSTSQAAYILWDKHILSQRSFPLPPPHKSAQQAELLGLLHGLSSARSWHCLNIFLDSKYLYHYLRTLAWGTFQGKSSQAPFQALLPRLLAHKVIYLHHVRSHTNLPDPISKLNALTDALLITPILAGKRTADGSEFEKRTADGSEFESPKKKAKVE

SEQ ID NO: 1502 - protein, 2012 aa, synthetic construct
MPAAKRVKLDGGDKKYSIGLDIGTNSVGWAVITDEYKVPSKKFKVLGNTDRHSIKKNLIGALLFDSGETAEATRLKRTARRRYTRRKNRICYLQEIFSNEMAKVDDSFFHRLEESFLVEEDKKHERHPIFGNIVDEVAYHEKYPTIYHLRKKLVDSTDKADLRLIYLALAHMIKFRGHFLIEGDLNPDNSDVDKLFIQLVQTYNQLFEENPINASGVDAKAILSARLSKSRRLENLIAQLPGEKKNGLFGNLIALSLGLTPNFKSNFDLAEDAKLQLSKDTYDDDLDNLLAQIGDQYADLFLAAKNLSDAILLSDILRVNTEITKAPLSASMIKRYDEHHQDLTLLKALVRQQLPEKYKEIFFDQSKNGYAGYIDGGASQEEFYKFIKPILEKMDGTEELLVKLNREDLLRKQRTFDNGSIPHQIHLGELHAILRRQEDFYPFLKDNREKIEKILTFRIPYYVGPLARGNSRFAWMTRKSEETITPWNFEEVVDKGASAQSFIERMTNFDKNLPNEKVLPKHSLLYEYFTVYNELTKVKYVTEGMRKPAFLSGEQKKAIVDLLFKTNRKVTVKQLKEDYFKKIECFDSVEISGVEDRFNASLGTYHDLLKIIKDKDFLDNEENEDILEDIVLTLTLFEDREMIEERLKTYAHLFDDKVMKQLKRRRYTGWGRLSRKLINGIRDKQSGKTILDFLKSDGFANRNFMQLIHDDSLTFKEDIQKAQVSGQGDSLHEHIANLAGSPAIKKGILQTVKVVDELVKVMGRHKPENIVIEMARENQTTQKGQKNSRERMKRIEEGIKELGSQILKEHPVENTQLQNEKLYLYYLQNGRDMYVDQELDINRLSDYDVDHIVPQSFLKDDSIDNKVLTRSDKARGKSDNVPSEEVVKKMKNYWRQLLNAKLITQRKFDNLTKAERGGLSELDKAGFIKRQLVETRQITKHVAQILDSRMNTKYDENDKLIREVKVITLKSKLVSDFRKDFQFYKVREINNYHHAHDAYLNAVVGTALIKKYPKLESEFVYGDYKVYDVRKMIAKSEQEIGKATAKYFFYSNIMNFFKTEITLANGEIRKRPLIETNGETGEIVWDKGRDFATVRKVLSMPQVNIVKKTEVQTGGFSKESILPKRNSDKLIARKKDWDPKKYGGFDSPTVAYSVLVVAKVEKGKSKKLKSVKELLGITIMERSSFEKNPIDFLEAKGYKEVKKDLIIKLPKYSLFELENGRKRMLASAGELQKGNELALPSKYVNFLYLASHYEKLKGSPEDNEQKQLFVEQHKHYLDEIIEQISEFSKRVILADANLDKVLSAYNKHRDKPIREQAENIIHLFTLTNLGAPAAFKYFDTTIDRKRYTSTKEVLDATLIHQSITGLYETRIDLSQLGGDGGGGSGGSGGSGGSGGSGGGLEHLPRPPEISQFPLNPERLQALQHLVRKALEAGHIEPYTGPGNNPVFPVKKANGTWRFIHDLRATNSLTVDLSSSSPGPPDLSSLPTTLAHLQTIDLKDAFFQIPLPKQFQPYFAFTVPQQCNYGPGTRYAWKVLPQGFKNSPTLFQMQLASILQPIRQAFPQCVILQYMDDILLASPSPEDLQQLSEATMASLISHGLPVSQDKTQQTPGTIKFLGQIISPNHITYDAVPTVPIRSRWALPELQALLGEIQWVSKGTPTLRQPLHSLYCALQGHTDPRDQIYLNPSQVQSLMQLQQALSQNCRSRLAQTLPLLGAIMLTLTGTTTVVFQSKQQWPLVWLHAPLPHTSQCPWGQLLASAVLLLDKYTLQSYGLLCQTIHHNISIQTFNQFIQTSDHPSVPILLHHSHRFKNLGAQTGELWNTFLKTAAPLAPVKALTPVFTLSPIIINTAPCLFSDGSTSQAAYILWDKHILSQRSFPLPPPHKSAQQAELLGLLHGLSSARSWHCLNIFLDSKYLYHYLRTLAWGTFQGKSSQAPFQALLPRLLAHKVIYLHHVRSHTNLPDPISKLNALTDALLITPILAGKRTADGSEFEKRTADGSEFESPKKKAKVE

SEQ ID NO: 1503 - protein, 2015 aa, synthetic construct
MPAAKRVKLDGGDKKYSIGLDIGTNSVGWAVITDEYKVPSKKFKVLGNTDRHSIKKNLIGALLFDSGETAEATRLKRTARRRYTRRKNRICYLQEIFSNEMAKVDDSFFHRLEESFLVEEDKKHERHPIFGNIVDEVAYHEKYPTIYHLRKKLVDSTDKADLRLIYLALAHMIKFRGHFLIEGDLNPDNSDVDKLFIQLVQTYNQLFEENPINASGVDAKAILSARLSKSRRLENLIAQLPGEKKNGLFGNLIALSLGLTPNFKSNFDLAEDAKLQLSKDTYDDDLDNLLAQIGDQYADLFLAAKNLSDAILLSDILRVNTEITKAPLSASMIKRYDEHHQDLTLLKALVRQQLPEKYKEIFFDQSKNGYAGYIDGGASQEEFYKFIKPILEKMDGTEELLVKLNREDLLRKQRTFDNGSIPHQIHLGELHAILRRQEDFYPFLKDNREKIEKILTFRIPYYVGPLARGNSRFAWMTRKSEETITPWNFEEVVDKGASAQSFIERMTNFDKNLPNEKVLPKHSLLYEYFTVYNELTKVKYVTEGMRKPAFLSGEQKKAIVDLLFKTNRKVTVKQLKEDYFKKIECFDSVEISGVEDRFNASLGTYHDLLKIIKDKDFLDNEENEDILEDIVLTLTLFEDREMIEERLKTYAHLFDDKVMKQLKRRRYTGWGRLSRKLINGIRDKQSGKTILDFLKSDGFANRNFMQLIHDDSLTFKEDIQKAQVSGQGDSLHEHIANLAGSPAIKKGILQTVKVVDELVKVMGRHKPENIVIEMARENQTTQKGQKNSRERMKRIEEGIKELGSQILKEHPVENTQLQNEKLYLYYLQNGRDMYVDQELDINRLSDYDVDHIVPQSFLKDDSIDNKVLTRSDKARGKSDNVPSEEVVKKMKNYWRQLLNAKLITQRKFDNLTKAERGGLSELDKAGFIKRQLVETRQITKHVAQILDSRMNTKYDENDKLIREVKVITLKSKLVSDFRKDFQFYKVREINNYHHAHDAYLNAVVGTALIKKYPKLESEFVYGDYKVYDVRKMIAKSEQEIGKATAKYFFYSNIMNFFKTEITLANGEIRKRPLIETNGETGEIVWDKGRDFATVRKVLSMPQVNIVKKTEVQTGGFSKESILPKRNSDKLIARKKDWDPKKYGGFDSPTVAYSVLVVAKVEKGKSKKLKSVKELLGITIMERSSFEKNPIDFLEAKGYKEVKKDLIIKLPKYSLFELENGRKRMLASAGELQKGNELALPSKYVNFLYLASHYEKLKGSPEDNEQKQLFVEQHKHYLDEIIEQISEFSKRVILADANLDKVLSAYNKHRDKPIREQAENIIHLFTLTNLGAPAAFKYFDTTIDRKRYTSTKEVLDATLIHQSITGLYETRIDLSQLGGDGGGGSGGSGGSGGSGGSGGSGGGLEHLPRPPEISQFPLNPERLQALQHLVRKALEAGHIEPYTGPGNNPVFPVKKANGTWRFIHDLRATNSLTVDLSSSSPGPPDLSSPPTTLAHLQTIDLKDAFFQIPLPKQFQPYFAFTVPQQCNYGPGTRYAWKVLPQGFKNSPTLFQMQLASILQPIRQAFPQCVILQYMDDILLASPSPEDLQQLSEATMASLISHGLPVSQDKTQQTPGTIKFLGQIISPNHITYDAVPTVPIRSRWALPELQALLGEIQWVSKGTPTLRQPLHSLYCALQGHTDPRDQIYLNPSQVQSLMQLQQALSQNCRSRLAQTLPLLGAIMLTLTGTTTVVFQSKQQWPLVWLHAPLPHTSQCPWGQLLASAVLLLDKYTLQSYGLLCQTIHHNISIQTFNQFIQTSDHPSVPILLHHSHRFKNLGAQTGELWNTFLKTAAPLAPVKALTPVFTLSPIIINTAPCLFSDGSTSQAAYILWDKHILSQRSFPLPPPHKSAQQAELLGLLHGLSSARSWHCLNIFLDSKYLYHYLRTLAWGTFQGKSSQAPFQALLPRLLAHKVIYLHHVRSHTNLPDPISKLNALTDALLITPILAGKRTADGSEFEKRTADGSEFESPKKKAKVE

SEQ ID NO: 1504 - protein, 2099 aa, synthetic construct
MPAAKRVKLDGGDKKYSIGLDIGTNSVGWAVITDEYKVPSKKFKVLGNTDRHSIKKNLIGALLFDSGETAEATRLKRTARRRYTRRKNRICYLQEIFSNEMAKVDDSFFHRLEESFLVEEDKKHERHPIFGNIVDEVAYHEKYPTIYHLRKKLVDSTDKADLRLIYLALAHMIKFRGHFLIEGDLNPDNSDVDKLFIQLVQTYNQLFEENPINASGVDAKAILSARLSKSRRLENLIAQLPGEKKNGLFGNLIALSLGLTPNFKSNFDLAEDAKLQLSKDTYDDDLDNLLAQIGDQYADLFLAAKNLSDAILLSDILRVNTEITKAPLSASMIKRYDEHHQDLTLLKALVRQQLPEKYKEIFFDQSKNGYAGYIDGGASQEEFYKFIKPILEKMDGTEELLVKLNREDLLRKQRTFDNGSIPHQIHLGELHAILRRQEDFYPFLKDNREKIEKILTFRIPYYVGPLARGNSRFAWMTRKSEETITPWNFEEVVDKGASAQSFIERMTNFDKNLPNEKVLPKHSLLYEYFTVYNELTKVKYVTEGMRKPAFLSGEQKKAIVDLLFKTNRKVTVKQLKEDYFKKIECFDSVEISGVEDRFNASLGTYHDLLKIIKDKDFLDNEENEDILEDIVLTLTLFEDREMIEERLKTYAHLFDDKVMKQLKRRRYTGWGRLSRKLINGIRDKQSGKTILDFLKSDGFANRNFMQLIHDDSLTFKEDIQKAQVSGQGDSLHEHIANLAGSPAIKKGILQTVKVVDELVKVMGRHKPENIVIEMARENQTTQKGQKNSRERMKRIEEGIKELGSQILKEHPVENTQLQNEKLYLYYLQNGRDMYVDQELDINRLSDYDVDHIVPQSFLKDDSIDNKVLTRSDKARGKSDNVPSEEVVKKMKNYWRQLLNAKLITQRKFDNLTKAERGGLSELDKAGFIKRQLVETRQITKHVAQILDSRMNTKYDENDKLIREVKVITLKSKLVSDFRKDFQFYKVREINNYHHAHDAYLNAVVGTALIKKYPKLESEFVYGDYKVYDVRKMIAKSEQEIGKATAKYFFYSNIMNFFKTEITLANGEIRKRPLIETNGETGEIVWDKGRDFATVRKVLSMPQVNIVKKTEVQTGGFSKESILPKRNSDKLIARKKDWDPKKYGGFDSPTVAYSVLVVAKVEKGKSKKLKSVKELLGITIMERSSFEKNPIDFLEAKGYKEVKKDLIIKLPKYSLFELENGRKRMLASAGELQKGNELALPSKYVNFLYLASHYEKLKGSPEDNEQKQLFVEQHKHYLDEIIEQISEFSKRVILADANLDKVLSAYNKHRDKPIREQAENIIHLFTLTNLGAPAAFKYFDTTIDRKRYTSTKEVLDATLIHQSITGLYETRIDLSQLGGDGGEAAAKPAPGGTVSLQDEHRLFDIPVTTSLPDVWLQDFPQAWAETGGLGRAKCQAPIIIDLKPTAVPVSIKQYPMSLEAHMGIRQHIIKFLELGVLRPCRSPWNTPLLPVKKPGTQDYRPVQDLREINKRTVDIHPTVPNPYNLLSTLKPDYSWYTVLDLKDAFFCLPLAPQSQELFAFEWKDPERGISGQLTWTRLPQGFKNSPTLFDEALHRDLTDFRTQHPEVTLLQYVDDLLLAAPTKKACTQGTRHLLQELGEKGYRASAKKAQICQTKVTYLGYILSEGKRWLTPGRIETVARIPPPRNPREVREFLGTAGFCRLWIPGFAELAAPLYALTKESTPFTWQTEHQLAFEALKKALLSAPALGLPDTSKPFTLFLDERQGIAKGVLTQKLGPWKRPVAYLSKKLDPVAAGWPPCLRIMAATAMLVKDSAKLTLGQPLTVITPHTLEAIVRQPPDRWITNARLTHYQALLLDTDRVQFGPPVTLNPATLLPVPENQPSPHDCRQVLAETHGTREDLKDQELPDADHTWYTDGSSYLDSGTRRAGAAVVDGHNTIWAQSLPPGTSAQKAELIALTKALELSKGKKANIYTDSRYAFATAHTHGSIYERRGLLTSEGKEIKNKAEIIALLKALFLPQEVAIIHCPGHQKGQDPVAVGNRQADRVARQAAMAEVLTLATEPDNTSHITAGKRTADGSEFEKRTADGSEFESPKKKAKVE

SEQ ID NO: 1505 - protein, 2100 aa, synthetic construct
MPAAKRVKLDGGDKKYSIGLDIGTNSVGWAVITDEYKVPSKKFKVLGNTDRHSIKKNLIGALLFDSGETAEATRLKRTARRRYTRRKNRICYLQEIFSNEMAKVDDSFFHRLEESFLVEEDKKHERHPIFGNIVDEVAYHEKYPTIYHLRKKLVDSTDKADLRLIYLALAHMIKFRGHFLIEGDLNPDNSDVDKLFIQLVQTYNQLFEENPINASGVDAKAILSARLSKSRRLENLIAQLPGEKKNGLFGNLIALSLGLTPNFKSNFDLAEDAKLQLSKDTYDDDLDNLLAQIGDQYADLFLAAKNLSDAILLSDILRVNTEITKAPLSASMIKRYDEHHQDLTLLKALVRQQLPEKYKEIFFDQSKNGYAGYIDGGASQEEFYKFIKPILEKMDGTEELLVKLNREDLLRKQRTFDNGSIPHQIHLGELHAILRRQEDFYPFLKDNREKIEKILTFRIPYYVGPLARGNSRFAWMTRKSEETITPWNFEEVVDKGASAQSFIERMTNFDKNLPNEKVLPKHSLLYEYFTVYNELTKVKYVTEGMRKPAFLSGEQKKAIVDLLFKTNRKVTVKQLKEDYFKKIECFDSVEISGVEDRFNASLGTYHDLLKIIKDKDFLDNEENEDILEDIVLTLTLFEDREMIEERLKTYAHLFDDKVMKQLKRRRYTGWGRLSRKLINGIRDKQSGKTILDFLKSDGFANRNFMQLIHDDSLTFKEDIQKAQVSGQGDSLHEHIANLAGSPAIKKGILQTVKVVDELVKVMGRHKPENIVIEMARENQTTQKGQKNSRERMKRIEEGIKELGSQILKEHPVENTQLQNEKLYLYYLQNGRDMYVDQELDINRLSDYDVDHIVPQSFLKDDSIDNKVLTRSDKARGKSDNVPSEEVVKKMKNYWRQLLNAKLITQRKFDNLTKAERGGLSELDKAGFIKRQLVETRQITKHVAQILDSRMNTKYDENDKLIREVKVITLKSKLVSDFRKDFQFYKVREINNYHHAHDAYLNAVVGTALIKKYPKLESEFVYGDYKVYDVRKMIAKSEQEIGKATAKYFFYSNIMNFFKTEITLANGEIRKRPLIETNGETGEIVWDKGRDFATVRKVLSMPQVNIVKKTEVQTGGFSKESILPKRNSDKLIARKKDWDPKKYGGFDSPTVAYSVLVVAKVEKGKSKKLKSVKELLGITIMERSSFEKNPIDFLEAKGYKEVKKDLIIKLPKYSLFELENGRKRMLASAGELQKGNELALPSKYVNFLYLASHYEKLKGSPEDNEQKQLFVEQHKHYLDEIIEQISEFSKRVILADANLDKVLSAYNKHRDKPIREQAENIIHLFTLTNLGAPAAFKYFDTTIDRKRYTSTKEVLDATLIHQSITGLYETRIDLSQLGGDGGGGGGSSPAPGGTVSLQDEHRLFDIPVTTSLPDVWLQDFPQAWAETGGLGRAKCQAPIIIDLKPTAVPVSIKQYPMSLEAHMGIRQHIIKFLELGVLRPCRSPWNTPLLPVKKPGTQDYRPVQDLREINKRTVDIHPTVPNPYNLLSTLKPDYSWYTVLDLKDAFFCLPLAPQSQELFAFEWKDPERGISGQLTWTRLPQGFKNSPTLFDEALHRDLTDFRTQHPEVTLLQYVDDLLLAAPTKKACTQGTRHLLQELGEKGYRASAKKAQICQTKVTYLGYILSEGKRWLTPGRIETVARIPPPRNPREVREFLGTAGFCRLWIPGFAELAAPLYALTKESTPFTWQTEHQLAFEALKKALLSAPALGLPDTSKPFTLFLDERQGIAKGVLTQKLGPWKRPVAYLSKKLDPVAAGWPPCLRIMAATAMLVKDSAKLTLGQPLTVITPHTLEAIVRQPPDRWITNARLTHYQALLLDTDRVQFGPPVTLNPATLLPVPENQPSPHDCRQVLAETHGTREDLKDQELPDADHTWYTDGSSYLDSGTRRAGAAVVDGHNTIWAQSLPPGTSAQKAELIALTKALELSKGKKANIYTDSRYAFATAHTHGSIYERRGLLTSEGKEIKNKAEIIALLKALFLPQEVAIIHCPGHQKGQDPVAVGNRQADRVARQAAMAEVLTLATEPDNTSHITAGKRTADGSEFEKRTADGSEFESPKKKAKVE

SEQ ID NO: 1506 - protein, 2100 aa, synthetic construct
MPAAKRVKLDGGDKKYSIGLDIGTNSVGWAVITDEYKVPSKKFKVLGNTDRHSIKKNLIGALLFDSGETAEATRLKRTARRRYTRRKNRICYLQEIFSNEMAKVDDSFFHRLEESFLVEEDKKHERHPIFGNIVDEVAYHEKYPTIYHLRKKLVDSTDKADLRLIYLALAHMIKFRGHFLIEGDLNPDNSDVDKLFIQLVQTYNQLFEENPINASGVDAKAILSARLSKSRRLENLIAQLPGEKKNGLFGNLIALSLGLTPNFKSNFDLAEDAKLQLSKDTYDDDLDNLLAQIGDQYADLFLAAKNLSDAILLSDILRVNTEITKAPLSASMIKRYDEHHQDLTLLKALVRQQLPEKYKEIFFDQSKNGYAGYIDGGASQEEFYKFIKPILEKMDGTEELLVKLNREDLLRKQRTFDNGSIPHQIHLGELHAILRRQEDFYPFLKDNREKIEKILTFRIPYYVGPLARGNSRFAWMTRKSEETITPWNFEEVVDKGASAQSFIERMTNFDKNLPNEKVLPKHSLLYEYFTVYNELTKVKYVTEGMRKPAFLSGEQKKAIVDLLFKTNRKVTVKQLKEDYFKKIECFDSVEISGVEDRFNASLGTYHDLLKIIKDKDFLDNEENEDILEDIVLTLTLFEDREMIEERLKTYAHLFDDKVMKQLKRRRYTGWGRLSRKLINGIRDKQSGKTILDFLKSDGFANRNFMQLIHDDSLTFKEDIQKAQVSGQGDSLHEHIANLAGSPAIKKGILQTVKVVDELVKVMGRHKPENIVIEMARENQTTQKGQKNSRERMKRIEEGIKELGSQILKEHPVENTQLQNEKLYLYYLQNGRDMYVDQELDINRLSDYDVDHIVPQSFLKDDSIDNKVLTRSDKARGKSDNVPSEEVVKKMKNYWRQLLNAKLITQRKFDNLTKAERGGLSELDKAGFIKRQLVETRQITKHVAQILDSRMNTKYDENDKLIREVKVITLKSKLVSDFRKDFQFYKVREINNYHHAHDAYLNAVVGTALIKKYPKLESEFVYGDYKVYDVRKMIAKSEQEIGKATAKYFFYSNIMNFFKTEITLANGEIRKRPLIETNGETGEIVWDKGRDFATVRKVLSMPQVNIVKKTEVQTGGFSKESILPKRNSDKLIARKKDWDPKKYGGFDSPTVAYSVLVVAKVEKGKSKKLKSVKELLGITIMERSSFEKNPIDFLEAKGYKEVKKDLIIKLPKYSLFELENGRKRMLASAGELQKGNELALPSKYVNFLYLASHYEKLKGSPEDNEQKQLFVEQHKHYLDEIIEQISEFSKRVILADANLDKVLSAYNKHRDKPIREQAENIIHLFTLTNLGAPAAFKYFDTTIDRKRYTSTKEVLDATLIHQSITGLYETRIDLSQLGGDGGPAPGGSGGGGGTVSLQDEHRLFDIPVTTSLPDVWLQDFPQAWAETGGLGRAKCQAPIIIDLKPTAVPVSIKQYPMSLEAHMGIRQHIIKFLELGVLRPCRSPWNTPLLPVKKPGTQDYRPVQDLREINKRTVDIHPTVPNPYNLLSTLKPDYSWYTVLDLKDAFFCLPLAPQSQELFAFEWKDPERGISGQLTWTRLPQGFKNSPTLFDEALHRDLTDFRTQHPEVTLLQYVDDLLLAAPTKKACTQGTRHLLQELGEKGYRASAKKAQICQTKVTYLGYILSEGKRWLTPGRIETVARIPPPRNPREVREFLGTAGFCRLWIPGFAELAAPLYALTKESTPFTWQTEHQLAFEALKKALLSAPALGLPDTSKPFTLFLDERQGIAKGVLTQKLGPWKRPVAYLSKKLDPVAAGWPPCLRIMAATAMLVKDSAKLTLGQPLTVITPHTLEAIVRQPPDRWITNARLTHYQALLLDTDRVQFGPPVTLNPATLLPVPENQPSPHDCRQVLAETHGTREDLKDQELPDADHTWYTDGSSYLDSGTRRAGAAVVDGHNTIWAQSLPPGTSAQKAELIALTKALELSKGKKANIYTDSRYAFATAHTHGSIYERRGLLTSEGKEIKNKAEIIALLKALFLPQEVAIIHCPGHQKGQDPVAVGNRQADRVARQAAMAEVLTLATEPDNTSHITAGKRTADGSEFEKRTADGSEFESPKKKAKVE

SEQ ID NO: 1507 - protein, 2106 aa, synthetic construct
MPAAKRVKLDGGDKKYSIGLDIGTNSVGWAVITDEYKVPSKKFKVLGNTDRHSIKKNLIGALLFDSGETAEATRLKRTARRRYTRRKNRICYLQEIFSNEMAKVDDSFFHRLEESFLVEEDKKHERHPIFGNIVDEVAYHEKYPTIYHLRKKLVDSTDKADLRLIYLALAHMIKFRGHFLIEGDLNPDNSDVDKLFIQLVQTYNQLFEENPINASGVDAKAILSARLSKSRRLENLIAQLPGEKKNGLFGNLIALSLGLTPNFKSNFDLAEDAKLQLSKDTYDDDLDNLLAQIGDQYADLFLAAKNLSDAILLSDILRVNTEITKAPLSASMIKRYDEHHQDLTLLKALVRQQLPEKYKEIFFDQSKNGYAGYIDGGASQEEFYKFIKPILEKMDGTEELLVKLNREDLLRKQRTFDNGSIPHQIHLGELHAILRRQEDFYPFLKDNREKIEKILTFRIPYYVGPLARGNSRFAWMTRKSEETITPWNFEEVVDKGASAQSFIERMTNFDKNLPNEKVLPKHSLLYEYFTVYNELTKVKYVTEGMRKPAFLSGEQKKAIVDLLFKTNRKVTVKQLKEDYFKKIECFDSVEISGVEDRFNASLGTYHDLLKIIKDKDFLDNEENEDILEDIVLTLTLFEDREMIEERLKTYAHLFDDKVMKQLKRRRYTGWGRLSRKLINGIRDKQSGKTILDFLKSDGFANRNFMQLIHDDSLTFKEDIQKAQVSGQGDSLHEHIANLAGSPAIKKGILQTVKVVDELVKVMGRHKPENIVIEMARENQTTQKGQKNSRERMKRIEEGIKELGSQILKEHPVENTQLQNEKLYLYYLQNGRDMYVDQELDINRLSDYDVDHIVPQSFLKDDSIDNKVLTRSDKARGKSDNVPSEEVVKKMKNYWRQLLNAKLITQRKFDNLTKAERGGLSELDKAGFIKRQLVETRQITKHVAQILDSRMNTKYDENDKLIREVKVITLKSKLVSDFRKDFQFYKVREINNYHHAHDAYLNAVVGTALIKKYPKLESEFVYGDYKVYDVRKMIAKSEQEIGKATAKYFFYSNIMNFFKTEITLANGEIRKRPLIETNGETGEIVWDKGRDFATVRKVLSMPQVNIVKKTEVQTGGFSKESILPKRNSDKLIARKKDWDPKKYGGFDSPTVAYSVLVVAKVEKGKSKKLKSVKELLGITIMERSSFEKNPIDFLEAKGYKEVKKDLIIKLPKYSLFELENGRKRMLASAGELQKGNELALPSKYVNFLYLASHYEKLKGSPEDNEQKQLFVEQHKHYLDEIIEQISEFSKRVILADANLDKVLSAYNKHRDKPIREQAENIIHLFTLTNLGAPAAFKYFDTTIDRKRYTSTKEVLDATLIHQSITGLYETRIDLSQLGGDGGGGSGGSGGSGGSGGSGGTVSLQDEHRLFDIPVTTSLPDVWLQDFPQAWAETGGLGRAKCQAPIIIDLKPTAVPVSIKQYPMSLEAHMGIRQHIIKFLELGVLRPCRSPWNTPLLPVKKPGTQDYRPVQDLREINKRTVDIHPTVPNPYNLLSTLKPDYSWYTVLDLKDAFFCLPLAPQSQELFAFEWKDPERGISGQLTWTRLPQGFKNSPTLFDEALHRDLTDFRTQHPEVTLLQYVDDLLLAAPTKKACTQGTRHLLQELGEKGYRASAKKAQICQTKVTYLGYILSEGKRWLTPGRIETVARIPPPRNPREVREFLGTAGFCRLWIPGFAELAAPLYALTKESTPFTWQTEHQLAFEALKKALLSAPALGLPDTSKPFTLFLDERQGIAKGVLTQKLGPWKRPVAYLSKKLDPVAAGWPPCLRIMAATAMLVKDSAKLTLGQPLTVITPHTLEAIVRQPPDRWITNARLTHYQALLLDTDRVQFGPPVTLNPATLLPVPENQPSPHDCRQVLAETHGTREDLKDQELPDADHTWYTDGSSYLDSGTRRAGAAVVDGHNTIWAQSLPPGTSAQKAELIALTKALELSKGKKANIYTDSRYAFATAHTHGSIYERRGLLTSEGKEIKNKAEIIALLKALFLPQEVAIIHCPGHQKGQDPVAVGNRQADRVARQAAMAEVLTLATEPDNTSHITAGKRTADGSEFEKRTADGSEFESPKKKAKVE

SEQ ID NO: 1508 - protein, 2100 aa, synthetic construct
MPAAKRVKLDGGDKKYSIGLDIGTNSVGWAVITDEYKVPSKKFKVLGNTDRHSIKKNLIGALLFDSGETAEATRLKRTARRRYTRRKNRICYLQEIFSNEMAKVDDSFFHRLEESFLVEEDKKHERHPIFGNIVDEVAYHEKYPTIYHLRKKLVDSTDKADLRLIYLALAHMIKFRGHFLIEGDLNPDNSDVDKLFIQLVQTYNQLFEENPINASGVDAKAILSARLSKSRRLENLIAQLPGEKKNGLFGNLIALSLGLTPNFKSNFDLAEDAKLQLSKDTYDDDLDNLLAQIGDQYADLFLAAKNLSDAILLSDILRVNTEITKAPLSASMIKRYDEHHQDLTLLKALVRQQLPEKYKEIFFDQSKNGYAGYIDGGASQEEFYKFIKPILEKMDGTEELLVKLNREDLLRKQRTFDNGSIPHQIHLGELHAILRRQEDFYPFLKDNREKIEKILTFRIPYYVGPLARGNSRFAWMTRKSEETITPWNFEEVVDKGASAQSFIERMTNFDKNLPNEKVLPKHSLLYEYFTVYNELTKVKYVTEGMRKPAFLSGEQKKAIVDLLFKTNRKVTVKQLKEDYFKKIECFDSVEISGVEDRFNASLGTYHDLLKIIKDKDFLDNEENEDILEDIVLTLTLFEDREMIEERLKTYAHLFDDKVMKQLKRRRYTGWGRLSRKLINGIRDKQSGKTILDFLKSDGFANRNFMQLIHDDSLTFKEDIQKAQVSGQGDSLHEHIANLAGSPAIKKGILQTVKVVDELVKVMGRHKPENIVIEMARENQTTQKGQKNSRERMKRIEEGIKELGSQILKEHPVENTQLQNEKLYLYYLQNGRDMYVDQELDINRLSDYDVDHIVPQSFLKDDSIDNKVLTRSDKARGKSDNVPSEEVVKKMKNYWRQLLNAKLITQRKFDNLTKAERGGLSELDKAGFIKRQLVETRQITKHVAQILDSRMNTKYDENDKLIREVKVITLKSKLVSDFRKDFQFYKVREINNYHHAHDAYLNAVVGTALIKKYPKLESEFVYGDYKVYDVRKMIAKSEQEIGKATAKYFFYSNIMNFFKTEITLANGEIRKRPLIETNGETGEIVWDKGRDFATVRKVLSMPQVNIVKKTEVQTGGFSKESILPKRNSDKLIARKKDWDPKKYGGFDSPTVAYSVLVVAKVEKGKSKKLKSVKELLGITIMERSSFEKNPIDFLEAKGYKEVKKDLIIKLPKYSLFELENGRKRMLASAGELQKGNELALPSKYVNFLYLASHYEKLKGSPEDNEQKQLFVEQHKHYLDEIIEQISEFSKRVILADANLDKVLSAYNKHRDKPIREQAENIIHLFTLTNLGAPAAFKYFDTTIDRKRYTSTKEVLDATLIHQSITGLYETRIDLSQLGGDGGGSSGGSPAPGGTVSLQDEHRLFDIPVTTSLPDVWLQDFPQAWAETGGLGRAKCQAPIIIDLKPTAVPVSIKQYPMSLEAHMGIRQHIIKFLELGVLRPCRSPWNTPLLPVKKPGTQDYRPVQDLREINKRTVDIHPTVPNPYNLLSTLKPDYSWYTVLDLKDAFFCLPLAPQSQELFAFEWKDPERGISGQLTWTRLPQGFKNSPTLFDEALHRDLTDFRTQHPEVTLLQYVDDLLLAAPTKKACTQGTRHLLQELGEKGYRASAKKAQICQTKVTYLGYILSEGKRWLTPGRIETVARIPPPRNPREVREFLGTAGFCRLWIPGFAELAAPLYALTKESTPFTWQTEHQLAFEALKKALLSAPALGLPDTSKPFTLFLDERQGIAKGVLTQKLGPWKRPVAYLSKKLDPVAAGWPPCLRIMAATAMLVKDSAKLTLGQPLTVITPHTLEAIVRQPPDRWITNARLTHYQALLLDTDRVQFGPPVTLNPATLLPVPENQPSPHDCRQVLAETHGTREDLKDQELPDADHTWYTDGSSYLDSGTRRAGAAVVDGHNTIWAQSLPPGTSAQKAELIALTKALELSKGKKANIYTDSRYAFATAHTHGSIYERRGLLTSEGKEIKNKAEIIALLKALFLPQEVAIIHCPGHQKGQDPVAVGNRQADRVARQAAMAEVLTLATEPDNTSHITAGKRTADGSEFEKRTADGSEFESPKKKAKVE

SEQ ID NO: 1509 - protein, 2097 aa, synthetic construct
MPAAKRVKLDGGDKKYSIGLDIGTNSVGWAVITDEYKVPSKKFKVLGNTDRHSIKKNLIGALLFDSGETAEATRLKRTARRRYTRRKNRICYLQEIFSNEMAKVDDSFFHRLEESFLVEEDKKHERHPIFGNIVDEVAYHEKYPTIYHLRKKLVDSTDKADLRLIYLALAHMIKFRGHFLIEGDLNPDNSDVDKLFIQLVQTYNQLFEENPINASGVDAKAILSARLSKSRRLENLIAQLPGEKKNGLFGNLIALSLGLTPNFKSNFDLAEDAKLQLSKDTYDDDLDNLLAQIGDQYADLFLAAKNLSDAILLSDILRVNTEITKAPLSASMIKRYDEHHQDLTLLKALVRQQLPEKYKEIFFDQSKNGYAGYIDGGASQEEFYKFIKPILEKMDGTEELLVKLNREDLLRKQRTFDNGSIPHQIHLGELHAILRRQEDFYPFLKDNREKIEKILTFRIPYYVGPLARGNSRFAWMTRKSEETITPWNFEEVVDKGASAQSFIERMTNFDKNLPNEKVLPKHSLLYEYFTVYNELTKVKYVTEGMRKPAFLSGEQKKAIVDLLFKTNRKVTVKQLKEDYFKKIECFDSVEISGVEDRFNASLGTYHDLLKIIKDKDFLDNEENEDILEDIVLTLTLFEDREMIEERLKTYAHLFDDKVMKQLKRRRYTGWGRLSRKLINGIRDKQSGKTILDFLKSDGFANRNFMQLIHDDSLTFKEDIQKAQVSGQGDSLHEHIANLAGSPAIKKGILQTVKVVDELVKVMGRHKPENIVIEMARENQTTQKGQKNSRERMKRIEEGIKELGSQILKEHPVENTQLQNEKLYLYYLQNGRDMYVDQELDINRLSDYDVDHIVPQSFLKDDSIDNKVLTRSDKARGKSDNVPSEEVVKKMKNYWRQLLNAKLITQRKFDNLTKAERGGLSELDKAGFIKRQLVETRQITKHVAQILDSRMNTKYDENDKLIREVKVITLKSKLVSDFRKDFQFYKVREINNYHHAHDAYLNAVVGTALIKKYPKLESEFVYGDYKVYDVRKMIAKSEQEIGKATAKYFFYSNIMNFFKTEITLANGEIRKRPLIETNGETGEIVWDKGRDFATVRKVLSMPQVNIVKKTEVQTGGFSKESILPKRNSDKLIARKKDWDPKKYGGFDSPTVAYSVLVVAKVEKGKSKKLKSVKELLGITIMERSSFEKNPIDFLEAKGYKEVKKDLIIKLPKYSLFELENGRKRMLASAGELQKGNELALPSKYVNFLYLASHYEKLKGSPEDNEQKQLFVEQHKHYLDEIIEQISEFSKRVILADANLDKVLSAYNKHRDKPIREQAENIIHLFTLTNLGAPAAFKYFDTTIDRKRYTSTKEVLDATLIHQSITGLYETRIDLSQLGGDGGPAPGSSGGTVSLQDEHRLFDIPVTTSLPDVWLQDFPQAWAETGGLGRAKCQAPIIIDLKPTAVPVSIKQYPMSLEAHMGIRQHIIKFLELGVLRPCRSPWNTPLLPVKKPGTQDYRPVQDLREINKRTVDIHPTVPNPYNLLSTLKPDYSWYTVLDLKDAFFCLPLAPQSQELFAFEWKDPERGISGQLTWTRLPQGFKNSPTLFDEALHRDLTDFRTQHPEVTLLQYVDDLLLAAPTKKACTQGTRHLLQELGEKGYRASAKKAQICQTKVTYLGYILSEGKRWLTPGRIETVARIPPPRNPREVREFLGTAGFCRLWIPGFAELAAPLYALTKESTPFTWQTEHQLAFEALKKALLSAPALGLPDTSKPFTLFLDERQGIAKGVLTQKLGPWKRPVAYLSKKLDPVAAGWPPCLRIMAATAMLVKDSAKLTLGQPLTVITPHTLEAIVRQPPDRWITNARLTHYQALLLDTDRVQFGPPVTLNPATLLPVPENQPSPHDCRQVLAETHGTREDLKDQELPDADHTWYTDGSSYLDSGTRRAGAAVVDGHNTIWAQSLPPGTSAQKAELIALTKALELSKGKKANIYTDSRYAFATAHTHGSIYERRGLLTSEGKEIKNKAEIIALLKALFLPQEVAIIHCPGHQKGQDPVAVGNRQADRVARQAAMAEVLTLATEPDNTSHITAGKRTADGSEFEKRTADGSEFESPKKKAKVE

SEQ ID NO: 1510 - protein, 2009 aa, synthetic construct
MPAAKRVKLDGGDKKYSIGLDIGTNSVGWAVITDEYKVPSKKFKVLGNTDRHSIKKNLIGALLFDSGETAEATRLKRTARRRYTRRKNRICYLQEIFSNEMAKVDDSFFHRLEESFLVEEDKKHERHPIFGNIVDEVAYHEKYPTIYHLRKKLVDSTDKADLRLIYLALAHMIKFRGHFLIEGDLNPDNSDVDKLFIQLVQTYNQLFEENPINASGVDAKAILSARLSKSRRLENLIAQLPGEKKNGLFGNLIALSLGLTPNFKSNFDLAEDAKLQLSKDTYDDDLDNLLAQIGDQYADLFLAAKNLSDAILLSDILRVNTEITKAPLSASMIKRYDEHHQDLTLLKALVRQQLPEKYKEIFFDQSKNGYAGYIDGGASQEEFYKFIKPILEKMDGTEELLVKLNREDLLRKQRTFDNGSIPHQIHLGELHAILRRQEDFYPFLKDNREKIEKILTFRIPYYVGPLARGNSRFAWMTRKSEETITPWNFEEVVDKGASAQSFIERMTNFDKNLPNEKVLPKHSLLYEYFTVYNELTKVKYVTEGMRKPAFLSGEQKKAIVDLLFKTNRKVTVKQLKEDYFKKIECFDSVEISGVEDRFNASLGTYHDLLKIIKDKDFLDNEENEDILEDIVLTLTLFEDREMIEERLKTYAHLFDDKVMKQLKRRRYTGWGRLSRKLINGIRDKQSGKTILDFLKSDGFANRNFMQLIHDDSLTFKEDIQKAQVSGQGDSLHEHIANLAGSPAIKKGILQTVKVVDELVKVMGRHKPENIVIEMARENQTTQKGQKNSRERMKRIEEGIKELGSQILKEHPVENTQLQNEKLYLYYLQNGRDMYVDQELDINRLSDYDVDHIVPQSFLKDDSIDNKVLTRSDKARGKSDNVPSEEVVKKMKNYWRQLLNAKLITQRKFDNLTKAERGGLSELDKAGFIKRQLVETRQITKHVAQILDSRMNTKYDENDKLIREVKVITLKSKLVSDFRKDFQFYKVREINNYHHAHDAYLNAVVGTALIKKYPKLESEFVYGDYKVYDVRKMIAKSEQEIGKATAKYFFYSNIMNFFKTEITLANGEIRKRPLIETNGETGEIVWDKGRDFATVRKVLSMPQVNIVKKTEVQTGGFSKESILPKRNSDKLIARKKDWDPKKYGGFDSPTVAYSVLVVAKVEKGKSKKLKSVKELLGITIMERSSFEKNPIDFLEAKGYKEVKKDLIIKLPKYSLFELENGRKRMLASAGELQKGNELALPSKYVNFLYLASHYEKLKGSPEDNEQKQLFVEQHKHYLDEIIEQISEFSKRVILADANLDKVLSAYNKHRDKPIREQAENIIHLFTLTNLGAPAAFKYFDTTIDRKRYTSTKEVLDATLIHQSITGLYETRIDLSQLGGDGGEAAAKGGGPAPGGGLEHLPPPPEVSQFPLNPERLQALTDLVSRALEAKHIEPYQGPGNNPIFPVKKPNGKWRFIHDLRATNSVTRDLASPSPGPPDLTSLPQGLPHLRTIDLTDAFFQIPLPTIFQPYFAFTLPQPNNYGPGTRYSWRVLPQGFKNSPTLFEQQLSHILTPVRKTFPNSLIIQYMDDILLASPAPGELAALTDKVTNALTKEGLPLSPEKTQATPGPIHFLGQVISQDCITYETLPSINVKSTWSLAELQSMLGELQWVSKGTPVLRSSLHQLYLALRGHRDPRDTIKLTSIQVQALRTIQKALTLNCRSRLVNQLPILALIMLRPTGTTAVLFQTKQKWPLVWLHTPHPATSLRPWGQLLANAVIILDKYSLQHYGQVCKSFHHNISNQALTYYLHTSDQSSVAILLQHSHRFHNLGAQPSGPWRSLLQMPQIFQNIDVLRPPFTISPVVINHAPCLFSDGSASKAAFIIWDRQVIHQQVLSLPSTCSAQAGELFGLLAGLQKSQPWVALNIFLDSKFLIGHLRRMALGAFPGPSTQCELHTQLLPLLQGKTVYVHHVRSHTLLQDPISRLNEATDALMLAPLLPLAGKRTADGSEFEKRTADGSEFESPKKKAKVE

SEQ ID NO: 1511 - protein, 2001 aa, synthetic construct
MPAAKRVKLDGGDKKYSIGLDIGTNSVGWAVITDEYKVPSKKFKVLGNTDRHSIKKNLIGALLFDSGETAEATRLKRTARRRYTRRKNRICYLQEIFSNEMAKVDDSFFHRLEESFLVEEDKKHERHPIFGNIVDEVAYHEKYPTIYHLRKKLVDSTDKADLRLIYLALAHMIKFRGHFLIEGDLNPDNSDVDKLFIQLVQTYNQLFEENPINASGVDAKAILSARLSKSRRLENLIAQLPGEKKNGLFGNLIALSLGLTPNFKSNFDLAEDAKLQLSKDTYDDDLDNLLAQIGDQYADLFLAAKNLSDAILLSDILRVNTEITKAPLSASMIKRYDEHHQDLTLLKALVRQQLPEKYKEIFFDQSKNGYAGYIDGGASQEEFYKFIKPILEKMDGTEELLVKLNREDLLRKQRTFDNGSIPHQIHLGELHAILRRQEDFYPFLKDNREKIEKILTFRIPYYVGPLARGNSRFAWMTRKSEETITPWNFEEVVDKGASAQSFIERMTNFDKNLPNEKVLPKHSLLYEYFTVYNELTKVKYVTEGMRKPAFLSGEQKKAIVDLLFKTNRKVTVKQLKEDYFKKIECFDSVEISGVEDRFNASLGTYHDLLKIIKDKDFLDNEENEDILEDIVLTLTLFEDREMIEERLKTYAHLFDDKVMKQLKRRRYTGWGRLSRKLINGIRDKQSGKTILDFLKSDGFANRNFMQLIHDDSLTFKEDIQKAQVSGQGDSLHEHIANLAGSPAIKKGILQTVKVVDELVKVMGRHKPENIVIEMARENQTTQKGQKNSRERMKRIEEGIKELGSQILKEHPVENTQLQNEKLYLYYLQNGRDMYVDQELDINRLSDYDVDHIVPQSFLKDDSIDNKVLTRSDKARGKSDNVPSEEVVKKMKNYWRQLLNAKLITQRKFDNLTKAERGGLSELDKAGFIKRQLVETRQITKHVAQILDSRMNTKYDENDKLIREVKVITLKSKLVSDFRKDFQFYKVREINNYHHAHDAYLNAVVGTALIKKYPKLESEFVYGDYKVYDVRKMIAKSEQEIGKATAKYFFYSNIMNFFKTEITLANGEIRKRPLIETNGETGEIVWDKGRDFATVRKVLSMPQVNIVKKTEVQTGGFSKESILPKRNSDKLIARKKDWDPKKYGGFDSPTVAYSVLVVAKVEKGKSKKLKSVKELLGITIMERSSFEKNPIDFLEAKGYKEVKKDLIIKLPKYSLFELENGRKRMLASAGELQKGNELALPSKYVNFLYLASHYEKLKGSPEDNEQKQLFVEQHKHYLDEIIEQISEFSKRVILADANLDKVLSAYNKHRDKPIREQAENIIHLFTLTNLGAPAAFKYFDTTIDRKRYTSTKEVLDATLIHQSITGLYETRIDLSQLGGDGGGGSGGGLEHLPPPPEVSQFPLNPERLQALTDLVSRALEAKHIEPYQGPGNNPIFPVKKPNGKWRFIHDLRATNSVTRDLASPSPGPPDLTSLPQGLPHLRTIDLTDAFFQIPLPTIFQPYFAFTLPQPNNYGPGTRYSWRVLPQGFKNSPTLFQQQLSHILTPVRKTFPNSLIIQYMDDILLASPAPGELAALTDKVTNALTKEGLPLSPEKTQATPGPIHFLGQVISQDCITYETLPSINVKSTWSLAELQSMLGELQWVSKGTPVLRSSLHQLYLALRGHRDPRDTIKLTSIQVQALRTIQKALTLNCRSRLVNQLPILALIMLRPTGTTAVLFQTKQKWPLVWLHTPHPATSLRPWGQLLANAVIILDKYSLQHYGQVCKSFHHNISNQALTYYLHTSDQSSVAILLQHSHRFHNLGAQPSGPWRSLLQMPQIFQNIDVLRPPFTISPVVINHAPCLFSDGSASKAAFIIWDRQVIHQQVLSLPSTCSAQAGELFGLLAGLQKSQPWVALNIFLDSKFLIGHLRRMAWGAFPGPSTQCELHTQLLPLLQGKTVYVHHVRSHTLLQDPISRLNEATDALMLAPLLPLAGKRTADGSEFEKRTADGSEFESPKKKAKVE

SEQ ID NO: 1512 - protein, 2004 aa, synthetic construct
MPAAKRVKLDGGDKKYSIGLDIGTNSVGWAVITDEYKVPSKKFKVLGNTDRHSIKKNLIGALLFDSGETAEATRLKRTARRRYTRRKNRICYLQEIFSNEMAKVDDSFFHRLEESFLVEEDKKHERHPIFGNIVDEVAYHEKYPTIYHLRKKLVDSTDKADLRLIYLALAHMIKFRGHFLIEGDLNPDNSDVDKLFIQLVQTYNQLFEENPINASGVDAKAILSARLSKSRRLENLIAQLPGEKKNGLFGNLIALSLGLTPNFKSNFDLAEDAKLQLSKDTYDDDLDNLLAQIGDQYADLFLAAKNLSDAILLSDILRVNTEITKAPLSASMIKRYDEHHQDLTLLKALVRQQLPEKYKEIFFDQSKNGYAGYIDGGASQEEFYKFIKPILEKMDGTEELLVKLNREDLLRKQRTFDNGSIPHQIHLGELHAILRRQEDFYPFLKDNREKIEKILTFRIPYYVGPLARGNSRFAWMTRKSEETITPWNFEEVVDKGASAQSFIERMTNFDKNLPNEKVLPKHSLLYEYFTVYNELTKVKYVTEGMRKPAFLSGEQKKAIVDLLFKTNRKVTVKQLKEDYFKKIECFDSVEISGVEDRFNASLGTYHDLLKIIKDKDFLDNEENEDILEDIVLTLTLFEDREMIEERLKTYAHLFDDKVMKQLKRRRYTGWGRLSRKLINGIRDKQSGKTILDFLKSDGFANRNFMQLIHDDSLTFKEDIQKAQVSGQGDSLHEHIANLAGSPAIKKGILQTVKVVDELVKVMGRHKPENIVIEMARENQTTQKGQKNSRERMKRIEEGIKELGSQILKEHPVENTQLQNEKLYLYYLQNGRDMYVDQELDINRLSDYDVDHIVPQSFLKDDSIDNKVLTRSDKARGKSDNVPSEEVVKKMKNYWRQLLNAKLITQRKFDNLTKAERGGLSELDKAGFIKRQLVETRQITKHVAQILDSRMNTKYDENDKLIREVKVITLKSKLVSDFRKDFQFYKVREINNYHHAHDAYLNAVVGTALIKKYPKLESEFVYGDYKVYDVRKMIAKSEQEIGKATAKYFFYSNIMNFFKTEITLANGEIRKRPLIETNGETGEIVWDKGRDFATVRKVLSMPQVNIVKKTEVQTGGFSKESILPKRNSDKLIARKKDWDPKKYGGFDSPTVAYSVLVVAKVEKGKSKKLKSVKELLGITIMERSSFEKNPIDFLEAKGYKEVKKDLIIKLPKYSLFELENGRKRMLASAGELQKGNELALPSKYVNFLYLASHYEKLKGSPEDNEQKQLFVEQHKHYLDEIIEQISEFSKRVILADANLDKVLSAYNKHRDKPIREQAENIIHLFTLTNLGAPAAFKYFDTTIDRKRYTSTKEVLDATLIHQSITGLYETRIDLSQLGGDGGGGSGGGGGGLEHLPPPPEVSQFPLNPERLQALTDLVSRALEAKHIEPYQGPGNNPIFPVKKPNGKWRFIHDLRATNSVTRDLASPSPGPPDLTSLPQGLPHLRTIDLTDAFFQIPLPTIFQPYFAFTLPQPNNYGPGTRYSWRVLPQGFKNSPTLFQQQLSHILTPVRKTFPNSLIIQYMDDILLASPAPGELAALTDKVTNALTKEGLPLSPEKTQATPGPIHFLGQVISQDCITYETLPSINVKSTWSLAELQSMLGELQWVSKGTPVLRSSLHQLYLALRGHRDPRDTIKLTSIQVQALRTIQKALTLNCRSRLVNQLPILALIMLRPTGTTAVLFQTKQKWPLVWLHTPHPATSLRPWGQLLANAVIILDKYSLQHYGQVCKSFHHNISNQALTYYLHTSDQSSVAILLQHSHRFHNLGAQPSGPWRSLLQMPQIFQNIDVLRPPFTISPVVINHAPCLFSDGSASKAAFIIWDRQVIHQQVLSLPSTCSAQAGELFGLLAGLQKSQPWVALNIFLDSKFLIGHLRRMAWGAFPGPSTQCELHTQLLPLLQGKTVYVHHVRSHTLLQDPISRLNEATDALMLAPLLPLAGKRTADGSEFEKRTADGSEFESPKKKAKVE

SEQ ID NO: 1513 - protein, 2007 aa, synthetic construct
MPAAKRVKLDGGDKKYSIGLDIGTNSVGWAVITDEYKVPSKKFKVLGNTDRHSIKKNLIGALLFDSGETAEATRLKRTARRRYTRRKNRICYLQEIFSNEMAKVDDSFFHRLEESFLVEEDKKHERHPIFGNIVDEVAYHEKYPTIYHLRKKLVDSTDKADLRLIYLALAHMIKFRGHFLIEGDLNPDNSDVDKLFIQLVQTYNQLFEENPINASGVDAKAILSARLSKSRRLENLIAQLPGEKKNGLFGNLIALSLGLTPNFKSNFDLAEDAKLQLSKDTYDDDLDNLLAQIGDQYADLFLAAKNLSDAILLSDILRVNTEITKAPLSASMIKRYDEHHQDLTLLKALVRQQLPEKYKEIFFDQSKNGYAGYIDGGASQEEFYKFIKPILEKMDGTEELLVKLNREDLLRKQRTFDNGSIPHQIHLGELHAILRRQEDFYPFLKDNREKIEKILTFRIPYYVGPLARGNSRFAWMTRKSEETITPWNFEEVVDKGASAQSFIERMTNFDKNLPNEKVLPKHSLLYEYFTVYNELTKVKYVTEGMRKPAFLSGEQKKAIVDLLFKTNRKVTVKQLKEDYFKKIECFDSVEISGVEDRFNASLGTYHDLLKIIKDKDFLDNEENEDILEDIVLTLTLFEDREMIEERLKTYAHLFDDKVMKQLKRRRYTGWGRLSRKLINGIRDKQSGKTILDFLKSDGFANRNFMQLIHDDSLTFKEDIQKAQVSGQGDSLHEHIANLAGSPAIKKGILQTVKVVDELVKVMGRHKPENIVIEMARENQTTQKGQKNSRERMKRIEEGIKELGSQILKEHPVENTQLQNEKLYLYYLQNGRDMYVDQELDINRLSDYDVDHIVPQSFLKDDSIDNKVLTRSDKARGKSDNVPSEEVVKKMKNYWRQLLNAKLITQRKFDNLTKAERGGLSELDKAGFIKRQLVETRQITKHVAQILDSRMNTKYDENDKLIREVKVITLKSKLVSDFRKDFQFYKVREINNYHHAHDAYLNAVVGTALIKKYPKLESEFVYGDYKVYDVRKMIAKSEQEIGKATAKYFFYSNIMNFFKTEITLANGEIRKRPLIETNGETGEIVWDKGRDFATVRKVLSMPQVNIVKKTEVQTGGFSKESILPKRNSDKLIARKKDWDPKKYGGFDSPTVAYSVLVVAKVEKGKSKKLKSVKELLGITIMERSSFEKNPIDFLEAKGYKEVKKDLIIKLPKYSLFELENGRKRMLASAGELQKGNELALPSKYVNFLYLASHYEKLKGSPEDNEQKQLFVEQHKHYLDEIIEQISEFSKRVILADANLDKVLSAYNKHRDKPIREQAENIIHLFTLTNLGAPAAFKYFDTTIDRKRYTSTKEVLDATLIHQSITGLYETRIDLSQLGGDGGPAPGGGGSSGGGLEHLPPPPEVSQFPLNPERLQALTDLVSRALEAKHIEPYQGPGNNPIFPVKKPNGKWRFIHDLRATNSVTRDLASPSPGPPDLTSLPQGLPHLRTIDLTDAFFQIPLPTIFQPYFAFTLPQPNNYGPGTRYSWRVLPQGFKNSPTLFQQQLSHILTPVRKTFPNSLIIQYMDDILLASPAPGELAALTDKVTNALTKEGLPLSPEKTQATPGPIHFLGQVISQDCITYETLPSINVKSTWSLAELQSMLGELQWVSKGTPVLRSSLHQLYLALRGHRDPRDTIKLTSIQVQALRTIQKALTLNCRSRLVNQLPILALIMLRPTGTTAVLFQTKQKWPLVWLHTPHPATSLRPWGQLLANAVIILDKYSLQHYGQVCKSFHHNISNQALTYYLHTSDQSSVAILLQHSHRFHNLGAQPSGPWRSLLQMPQIFQNIDVLRPPFTISPVVINHAPCLFSDGSASKAAFIIWDRQVIHQQVLSLPSTCSAQAGELFGLLAGLQKSQPWVALNIFLDSKFLIGHLRRMAWGAFPGPSTQCELHTQLLPLLQGKTVYVHHVRSHTLLQDPISRLNEATDALMLAPLLPLAGKRTADGSEFEKRTADGSEFESPKKKAKVE

SEQ ID NO: 1514 - protein, 2007 aa, synthetic construct
MPAAKRVKLDGGDKKYSIGLDIGTNSVGWAVITDEYKVPSKKFKVLGNTDRHSIKKNLIGALLFDSGETAEATRLKRTARRRYTRRKNRICYLQEIFSNEMAKVDDSFFHRLEESFLVEEDKKHERHPIFGNIVDEVAYHEKYPTIYHLRKKLVDSTDKADLRLIYLALAHMIKFRGHFLIEGDLNPDNSDVDKLFIQLVQTYNQLFEENPINASGVDAKAILSARLSKSRRLENLIAQLPGEKKNGLFGNLIALSLGLTPNFKSNFDLAEDAKLQLSKDTYDDDLDNLLAQIGDQYADLFLAAKNLSDAILLSDILRVNTEITKAPLSASMIKRYDEHHQDLTLLKALVRQQLPEKYKEIFFDQSKNGYAGYIDGGASQEEFYKFIKPILEKMDGTEELLVKLNREDLLRKQRTFDNGSIPHQIHLGELHAILRRQEDFYPFLKDNREKIEKILTFRIPYYVGPLARGNSRFAWMTRKSEETITPWNFEEVVDKGASAQSFIERMTNFDKNLPNEKVLPKHSLLYEYFTVYNELTKVKYVTEGMRKPAFLSGEQKKAIVDLLFKTNRKVTVKQLKEDYFKKIECFDSVEISGVEDRFNASLGTYHDLLKIIKDKDFLDNEENEDILEDIVLTLTLFEDREMIEERLKTYAHLFDDKVMKQLKRRRYTGWGRLSRKLINGIRDKQSGKTILDFLKSDGFANRNFMQLIHDDSLTFKEDIQKAQVSGQGDSLHEHIANLAGSPAIKKGILQTVKVVDELVKVMGRHKPENIVIEMARENQTTQKGQKNSRERMKRIEEGIKELGSQILKEHPVENTQLQNEKLYLYYLQNGRDMYVDQELDINRLSDYDVDHIVPQSFLKDDSIDNKVLTRSDKARGKSDNVPSEEVVKKMKNYWRQLLNAKLITQRKFDNLTKAERGGLSELDKAGFIKRQLVETRQITKHVAQILDSRMNTKYDENDKLIREVKVITLKSKLVSDFRKDFQFYKVREINNYHHAHDAYLNAVVGTALIKKYPKLESEFVYGDYKVYDVRKMIAKSEQEIGKATAKYFFYSNIMNFFKTEITLANGEIRKRPLIETNGETGEIVWDKGRDFATVRKVLSMPQVNIVKKTEVQTGGFSKESILPKRNSDKLIARKKDWDPKKYGGFDSPTVAYSVLVVAKVEKGKSKKLKSVKELLGITIMERSSFEKNPIDFLEAKGYKEVKKDLIIKLPKYSLFELENGRKRMLASAGELQKGNELALPSKYVNFLYLASHYEKLKGSPEDNEQKQLFVEQHKHYLDEIIEQISEFSKRVILADANLDKVLSAYNKHRDKPIREQAENIIHLFTLTNLGAPAAFKYFDTTIDRKRYTSTKEVLDATLIHQSITGLYETRIDLSQLGGDGGGGGPAPGSSGGGLEHLPPPPEVSQFPLNPERLQALTDLVSRALEAKHIEPYQGPGNNPIFPVKKPNGKWRFIHDLRATNSVTRDLASPSPGPPDLTSPPQGLPHLRTIDLTDAFFQIPLPTIFQPYFAFTLPQPNNYGPGTRYSWRVLPQGFKNSPTLFQQQLSHILTPVRKTFPNSLIIQYMDDILLASPAPGELAALTDKVTNALTKEGLPLSPEKTQATPGPIHFLGQVISQDCITYETLPSINVKSTWSLAELQSMLGELQWVSKGTPVLRSSLHQLYLALRGHRDPRDTIKLTSIQVQALRTIQKALTLNCRSRLVNQLPILALIMLRPTGTTAVLFQTKQKWPLVWLHTPHPATSLRPWGQLLANAVIILDKYSLQHYGQVCKSFHHNISNQALTYYLHTSDQSSVAILLQHSHRFHNLGAQPSGPWRSLLQMPQIFQNIDVLRPPFTISPVVINHAPCLFSDGSASKAAFIIWDRQVIHQQVLSLPSTCSAQAGELFGLLAGLQKSQPWVALNIFLDSKFLIGHLRRMAWGAFPGPSTQCELHTQLLPLLQGKTVYVHHVRSHTLLQDPISRLNEATDALMLAPLLPLAGKRTADGSEFEKRTADGSEFESPKKKAKVE

SEQ ID NO: 1515 - protein, 2007 aa, synthetic construct
MPAAKRVKLDGGDKKYSIGLDIGTNSVGWAVITDEYKVPSKKFKVLGNTDRHSIKKNLIGALLFDSGETAEATRLKRTARRRYTRRKNRICYLQEIFSNEMAKVDDSFFHRLEESFLVEEDKKHERHPIFGNIVDEVAYHEKYPTIYHLRKKLVDSTDKADLRLIYLALAHMIKFRGHFLIEGDLNPDNSDVDKLFIQLVQTYNQLFEENPINASGVDAKAILSARLSKSRRLENLIAQLPGEKKNGLFGNLIALSLGLTPNFKSNFDLAEDAKLQLSKDTYDDDLDNLLAQIGDQYADLFLAAKNLSDAILLSDILRVNTEITKAPLSASMIKRYDEHHQDLTLLKALVRQQLPEKYKEIFFDQSKNGYAGYIDGGASQEEFYKFIKPILEKMDGTEELLVKLNREDLLRKQRTFDNGSIPHQIHLGELHAILRRQEDFYPFLKDNREKIEKILTFRIPYYVGPLARGNSRFAWMTRKSEETITPWNFEEVVDKGASAQSFIERMTNFDKNLPNEKVLPKHSLLYEYFTVYNELTKVKYVTEGMRKPAFLSGEQKKAIVDLLFKTNRKVTVKQLKEDYFKKIECFDSVEISGVEDRFNASLGTYHDLLKIIKDKDFLDNEENEDILEDIVLTLTLFEDREMIEERLKTYAHLFDDKVMKQLKRRRYTGWGRLSRKLINGIRDKQSGKTILDFLKSDGFANRNFMQLIHDDSLTFKEDIQKAQVSGQGDSLHEHIANLAGSPAIKKGILQTVKVVDELVKVMGRHKPENIVIEMARENQTTQKGQKNSRERMKRIEEGIKELGSQILKEHPVENTQLQNEKLYLYYLQNGRDMYVDQELDINRLSDYDVDHIVPQSFLKDDSIDNKVLTRSDKARGKSDNVPSEEVVKKMKNYWRQLLNAKLITQRKFDNLTKAERGGLSELDKAGFIKRQLVETRQITKHVAQILDSRMNTKYDENDKLIREVKVITLKSKLVSDFRKDFQFYKVREINNYHHAHDAYLNAVVGTALIKKYPKLESEFVYGDYKVYDVRKMIAKSEQEIGKATAKYFFYSNIMNFFKTEITLANGEIRKRPLIETNGETGEIVWDKGRDFATVRKVLSMPQVNIVKKTEVQTGGFSKESILPKRNSDKLIARKKDWDPKKYGGFDSPTVAYSVLVVAKVEKGKSKKLKSVKELLGITIMERSSFEKNPIDFLEAKGYKEVKKDLIIKLPKYSLFELENGRKRMLASAGELQKGNELALPSKYVNFLYLASHYEKLKGSPEDNEQKQLFVEQHKHYLDEIIEQISEFSKRVILADANLDKVLSAYNKHRDKPIREQAENIIHLFTLTNLGAPAAFKYFDTTIDRKRYTSTKEVLDATLIHQSITGLYETRIDLSQLGGDGGGSSGGGPAPGGGLEHLPPPPEVSQFPLNPERLQALTDLVSRALEAKHIEPYQGPGNNPIFPVKKPNGKWRFIHDLRATNSVTRDLASPSPGPPDLTSPPQGLPHLRTIDLTDAFFQIPLPTIFQPYFAFTLPQPNNYGPGTRYSWRVLPQGFKNSPTLFQQQLSHILTPVRKTFPNSLIIQYMDDILLASPAPGELAALTDKVTNALTKEGLPLSPEKTQATPGPIHFLGQVISQDCITYETLPSINVKSTWSLAELQSMLGELQWVSKGTPVLRSSLHQLYLALRGHRDPRDTIKLTSIQVQALRTIQKALTLNCRSRLVNQLPILALIMLRPTGTTAVLFQTKQKWPLVWLHTPHPATSLRPWGQLLANAVIILDKYSLQHYGQVCKSFHHNISNQALTYYLHTSDQSSVAILLQHSHRFHNLGAQPSGPWRSLLQMPQIFQNIDVLRPPFTISPVVINHAPCLFSDGSASKAAFIIWDRQVIHQQVLSLPSTCSAQAGELFGLLAGLQKSQPWVALNIFLDSKFLIGHLRRMAWGAFPGPSTQCELHTQLLPLLQGKTVYVHHVRSHTLLQDPISRLNEATDALMLAPLLPLAGKRTADGSEFEKRTADGSEFESPKKKAKVE

SEQ ID NO: 1516 - protein, 2006 aa, synthetic construct
MPAAKRVKLDGGDKKYSIGLDIGTNSVGWAVITDEYKVPSKKFKVLGNTDRHSIKKNLIGALLFDSGETAEATRLKRTARRRYTRRKNRICYLQEIFSNEMAKVDDSFFHRLEESFLVEEDKKHERHPIFGNIVDEVAYHEKYPTIYHLRKKLVDSTDKADLRLIYLALAHMIKFRGHFLIEGDLNPDNSDVDKLFIQLVQTYNQLFEENPINASGVDAKAILSARLSKSRRLENLIAQLPGEKKNGLFGNLIALSLGLTPNFKSNFDLAEDAKLQLSKDTYDDDLDNLLAQIGDQYADLFLAAKNLSDAILLSDILRVNTEITKAPLSASMIKRYDEHHQDLTLLKALVRQQLPEKYKEIFFDQSKNGYAGYIDGGASQEEFYKFIKPILEKMDGTEELLVKLNREDLLRKQRTFDNGSIPHQIHLGELHAILRRQEDFYPFLKDNREKIEKILTFRIPYYVGPLARGNSRFAWMTRKSEETITPWNFEEVVDKGASAQSFIERMTNFDKNLPNEKVLPKHSLLYEYFTVYNELTKVKYVTEGMRKPAFLSGEQKKAIVDLLFKTNRKVTVKQLKEDYFKKIECFDSVEISGVEDRFNASLGTYHDLLKIIKDKDFLDNEENEDILEDIVLTLTLFEDREMIEERLKTYAHLFDDKVMKQLKRRRYTGWGRLSRKLINGIRDKQSGKTILDFLKSDGFANRNFMQLIHDDSLTFKEDIQKAQVSGQGDSLHEHIANLAGSPAIKKGILQTVKVVDELVKVMGRHKPENIVIEMARENQTTQKGQKNSRERMKRIEEGIKELGSQILKEHPVENTQLQNEKLYLYYLQNGRDMYVDQELDINRLSDYDVDHIVPQSFLKDDSIDNKVLTRSDKARGKSDNVPSEEVVKKMKNYWRQLLNAKLITQRKFDNLTKAERGGLSELDKAGFIKRQLVETRQITKHVAQILDSRMNTKYDENDKLIREVKVITLKSKLVSDFRKDFQFYKVREINNYHHAHDAYLNAVVGTALIKKYPKLESEFVYGDYKVYDVRKMIAKSEQEIGKATAKYFFYSNIMNFFKTEITLANGEIRKRPLIETNGETGEIVWDKGRDFATVRKVLSMPQVNIVKKTEVQTGGFSKESILPKRNSDKLIARKKDWDPKKYGGFDSPTVAYSVLVVAKVEKGKSKKLKSVKELLGITIMERSSFEKNPIDFLEAKGYKEVKKDLIIKLPKYSLFELENGRKRMLASAGELQKGNELALPSKYVNFLYLASHYEKLKGSPEDNEQKQLFVEQHKHYLDEIIEQISEFSKRVILADANLDKVLSAYNKHRDKPIREQAENIIHLFTLTNLGAPAAFKYFDTTIDRKRYTSTKEVLDATLIHQSITGLYETRIDLSQLGGDGGGGSEAAAKGGGLEHLPPPPEVSQFPLNPERLQALTDLVSRALEAKHIEPYQGPGNNPIFPVKKPNGKWRFIHDLRATNSVTRDLASPSPGPPDLTSPPQGLPHLRTIDLTDAFFQIPLPTIFQPYFAFTLPQPNNYGPGTRYSWRVLPQGFKNSPTLFQQQLSHILTPVRKTFPNSLIIQYMDDILLASPAPGELAALTDKVTNALTKEGLPLSPEKTQATPGPIHFLGQVISQDCITYETLPSINVKSTWSLAELQSMLGELQWVSKGTPVLRSSLHQLYLALRGHRDPRDTIKLTSIQVQALRTIQKALTLNCRSRLVNQLPILALIMLRPTGTTAVLFQTKQKWPLVWLHTPHPATSLRPWGQLLANAVIILDKYSLQHYGQVCKSFHHNISNQALTYYLHTSDQSSVAILLQHSHRFHNLGAQPSGPWRSLLQMPQIFQNIDVLRPPFTISPVVINHAPCLFSDGSASKAAFIIWDRQVIHQQVLSLPSTCSAQAGELFGLLAGLQKSQPWVALNIFLDSKFLIGHLRRMAWGAFPGPSTQCELHTQLLPLLQGKTVYVHHVRSHTLLQDPISRLNEATDALMLAPLLPLAGKRTADGSEFEKRTADGSEFESPKKKAKVE

SEQ ID NO: 1517 - protein, 2009 aa, synthetic construct
MPAAKRVKLDGGDKKYSIGLDIGTNSVGWAVITDEYKVPSKKFKVLGNTDRHSIKKNLIGALLFDSGETAEATRLKRTARRRYTRRKNRICYLQEIFSNEMAKVDDSFFHRLEESFLVEEDKKHERHPIFGNIVDEVAYHEKYPTIYHLRKKLVDSTDKADLRLIYLALAHMIKFRGHFLIEGDLNPDNSDVDKLFIQLVQTYNQLFEENPINASGVDAKAILSARLSKSRRLENLIAQLPGEKKNGLFGNLIALSLGLTPNFKSNFDLAEDAKLQLSKDTYDDDLDNLLAQIGDQYADLFLAAKNLSDAILLSDILRVNTEITKAPLSASMIKRYDEHHQDLTLLKALVRQQLPEKYKEIFFDQSKNGYAGYIDGGASQEEFYKFIKPILEKMDGTEELLVKLNREDLLRKQRTFDNGSIPHQIHLGELHAILRRQEDFYPFLKDNREKIEKILTFRIPYYVGPLARGNSRFAWMTRKSEETITPWNFEEVVDKGASAQSFIERMTNFDKNLPNEKVLPKHSLLYEYFTVYNELTKVKYVTEGMRKPAFLSGEQKKAIVDLLFKTNRKVTVKQLKEDYFKKIECFDSVEISGVEDRFNASLGTYHDLLKIIKDKDFLDNEENEDILEDIVLTLTLFEDREMIEERLKTYAHLFDDKVMKQLKRRRYTGWGRLSRKLINGIRDKQSGKTILDFLKSDGFANRNFMQLIHDDSLTFKEDIQKAQVSGQGDSLHEHIANLAGSPAIKKGILQTVKVVDELVKVMGRHKPENIVIEMARENQTTQKGQKNSRERMKRIEEGIKELGSQILKEHPVENTQLQNEKLYLYYLQNGRDMYVDQELDINRLSDYDVDHIVPQSFLKDDSIDNKVLTRSDKARGKSDNVPSEEVVKKMKNYWRQLLNAKLITQRKFDNLTKAERGGLSELDKAGFIKRQLVETRQITKHVAQILDSRMNTKYDENDKLIREVKVITLKSKLVSDFRKDFQFYKVREINNYHHAHDAYLNAVVGTALIKKYPKLESEFVYGDYKVYDVRKMIAKSEQEIGKATAKYFFYSNIMNFFKTEITLANGEIRKRPLIETNGETGEIVWDKGRDFATVRKVLSMPQVNIVKKTEVQTGGFSKESILPKRNSDKLIARKKDWDPKKYGGFDSPTVAYSVLVVAKVEKGKSKKLKSVKELLGITIMERSSFEKNPIDFLEAKGYKEVKKDLIIKLPKYSLFELENGRKRMLASAGELQKGNELALPSKYVNFLYLASHYEKLKGSPEDNEQKQLFVEQHKHYLDEIIEQISEFSKRVILADANLDKVLSAYNKHRDKPIREQAENIIHLFTLTNLGAPAAFKYFDTTIDRKRYTSTKEVLDATLIHQSITGLYETRIDLSQLGGDGGPAPEAAAKGSSGGGLEHLPPPPEVSQFPLNPERLQALTDLVSRALEAKHIEPYQGPGNNPIFPVKKPNGKWRFIHDLRATNSVTRDLASPSPGPPDLTSPPQGLPHLRTIDLTDAFFQIPLPTIFQPYFAFTLPQPNNYGPGTRYSWRVLPQGFKNSPTLFQQQLSHILTPVRKTFPNSLIIQYMDDILLASPAPGELAALTDKVTNALTKEGLPLSPEKTQATPGPIHFLGQVISQDCITYETLPSINVKSTWSLAELQSMLGELQWVSKGTPVLRSSLHQLYLALRGHRDPRDTIKLTSIQVQALRTIQKALTLNCRSRLVNQLPILALIMLRPTGTTAVLFQTKQKWPLVWLHTPHPATSLRPWGQLLANAVIILDKYSLQHYGQVCKSFHHNISNQALTYYLHTSDQSSVAILLQHSHRFHNLGAQPSGPWRSLLQMPQIFQNIDVLRPPFTISPVVINHAPCLFSDGSASKAAFIIWDRQVIHQQVLSLPSTCSAQAGELFGLLAGLQKSQPWVALNIFLDSKFLIGHLRRMAWGAFPGPSTQCELHTQLLPLLQGKTVYVHHVRSHTLLQDPISRLNEATDALMLAPLLPLAGKRTADGSEFEKRTADGSEFESPKKKAKVE

SEQ ID NO: 1518 - protein, 2007 aa, synthetic construct
MPAAKRVKLDGGDKKYSIGLDIGTNSVGWAVITDEYKVPSKKFKVLGNTDRHSIKKNLIGALLFDSGETAEATRLKRTARRRYTRRKNRICYLQEIFSNEMAKVDDSFFHRLEESFLVEEDKKHERHPIFGNIVDEVAYHEKYPTIYHLRKKLVDSTDKADLRLIYLALAHMIKFRGHFLIEGDLNPDNSDVDKLFIQLVQTYNQLFEENPINASGVDAKAILSARLSKSRRLENLIAQLPGEKKNGLFGNLIALSLGLTPNFKSNFDLAEDAKLQLSKDTYDDDLDNLLAQIGDQYADLFLAAKNLSDAILLSDILRVNTEITKAPLSASMIKRYDEHHQDLTLLKALVRQQLPEKYKEIFFDQSKNGYAGYIDGGASQEEFYKFIKPILEKMDGTEELLVKLNREDLLRKQRTFDNGSIPHQIHLGELHAILRRQEDFYPFLKDNREKIEKILTFRIPYYVGPLARGNSRFAWMTRKSEETITPWNFEEVVDKGASAQSFIERMTNFDKNLPNEKVLPKHSLLYEYFTVYNELTKVKYVTEGMRKPAFLSGEQKKAIVDLLFKTNRKVTVKQLKEDYFKKIECFDSVEISGVEDRFNASLGTYHDLLKIIKDKDFLDNEENEDILEDIVLTLTLFEDREMIEERLKTYAHLFDDKVMKQLKRRRYTGWGRLSRKLINGIRDKQSGKTILDFLKSDGFANRNFMQLIHDDSLTFKEDIQKAQVSGQGDSLHEHIANLAGSPAIKKGILQTVKVVDELVKVMGRHKPENIVIEMARENQTTQKGQKNSRERMKRIEEGIKELGSQILKEHPVENTQLQNEKLYLYYLQNGRDMYVDQELDINRLSDYDVDHIVPQSFLKDDSIDNKVLTRSDKARGKSDNVPSEEVVKKMKNYWRQLLNAKLITQRKFDNLTKAERGGLSELDKAGFIKRQLVETRQITKHVAQILDSRMNTKYDENDKLIREVKVITLKSKLVSDFRKDFQFYKVREINNYHHAHDAYLNAVVGTALIKKYPKLESEFVYGDYKVYDVRKMIAKSEQEIGKATAKYFFYSNIMNFFKTEITLANGEIRKRPLIETNGETGEIVWDKGRDFATVRKVLSMPQVNIVKKTEVQTGGFSKESILPKRNSDKLIARKKDWDPKKYGGFDSPTVAYSVLVVAKVEKGKSKKLKSVKELLGITIMERSSFEKNPIDFLEAKGYKEVKKDLIIKLPKYSLFELENGRKRMLASAGELQKGNELALPSKYVNFLYLASHYEKLKGSPEDNEQKQLFVEQHKHYLDEIIEQISEFSKRVILADANLDKVLSAYNKHRDKPIREQAENIIHLFTLTNLGAPAAFKYFDTTIDRKRYTSTKEVLDATLIHQSITGLYETRIDLSQLGGDGGGGGGSSGGSGGGLEHLPPPPEVSQFPLNPERLQALTDLVSRALEAKHIEPYQGPGNNPIFPVKKPNGKWRFIHDLRATNSLTRDLASPSPGPPDLTSLPQDLPHLRTIDLTDAFFQIPLPAVFQPYFAFTLPQPNNHGPGTRYSWRVLPQGFKNSPTLFEQQLSHILAPVRKAFPNSLIIQYMDDILLASPALRELTALTDKVTNALTKEGLPMSLEKTQATPGSIHFLGQVISPDCITYETLPSIHVKSIWSLAELQSMLGELQWVSKGTPVLRSSLHQLYLALRGHRDPRDTIELTSTQVQALKTIQKALALNCRSRLVSQLPILALIILRPTGTTAVLFQTKQKWPLVWLHTPHPATSLRPWGQLLANAIITLDKYSLQHYGQICKSFHHNISNQALTYYLHTSDQSSVAILLQHSHRFHNLGAQPSGPWRSLLQVPQIFQNIDVLRPPFIISPVVIDHAPCLFSDGATSKAAFILWDKQVIHQQVLPLPSTCSAQAGELFGLLAGLQKSKPWPALNIFLDSKFLIGHLRRMALGAFLGPSTQCDLHARLFPLLQGKTVYVHHVRSHTLLQDPISRLNEATDALMLAPLLPLAGKRTADGSEFEKRTADGSEFESPKKKAKVE

SEQ ID NO: 1519 - protein, 2007 aa, synthetic construct
MPAAKRVKLDGGDKKYSIGLDIGTNSVGWAVITDEYKVPSKKFKVLGNTDRHSIKKNLIGALLFDSGETAEATRLKRTARRRYTRRKNRICYLQEIFSNEMAKVDDSFFHRLEESFLVEEDKKHERHPIFGNIVDEVAYHEKYPTIYHLRKKLVDSTDKADLRLIYLALAHMIKFRGHFLIEGDLNPDNSDVDKLFIQLVQTYNQLFEENPINASGVDAKAILSARLSKSRRLENLIAQLPGEKKNGLFGNLIALSLGLTPNFKSNFDLAEDAKLQLSKDTYDDDLDNLLAQIGDQYADLFLAAKNLSDAILLSDILRVNTEITKAPLSASMIKRYDEHHQDLTLLKALVRQQLPEKYKEIFFDQSKNGYAGYIDGGASQEEFYKFIKPILEKMDGTEELLVKLNREDLLRKQRTFDNGSIPHQIHLGELHAILRRQEDFYPFLKDNREKIEKILTFRIPYYVGPLARGNSRFAWMTRKSEETITPWNFEEVVDKGASAQSFIERMTNFDKNLPNEKVLPKHSLLYEYFTVYNELTKVKYVTEGMRKPAFLSGEQKKAIVDLLFKTNRKVTVKQLKEDYFKKIECFDSVEISGVEDRFNASLGTYHDLLKIIKDKDFLDNEENEDILEDIVLTLTLFEDREMIEERLKTYAHLFDDKVMKQLKRRRYTGWGRLSRKLINGIRDKQSGKTILDFLKSDGFANRNFMQLIHDDSLTFKEDIQKAQVSGQGDSLHEHIANLAGSPAIKKGILQTVKVVDELVKVMGRHKPENIVIEMARENQTTQKGQKNSRERMKRIEEGIKELGSQILKEHPVENTQLQNEKLYLYYLQNGRDMYVDQELDINRLSDYDVDHIVPQSFLKDDSIDNKVLTRSDKARGKSDNVPSEEVVKKMKNYWRQLLNAKLITQRKFDNLTKAERGGLSELDKAGFIKRQLVETRQITKHVAQILDSRMNTKYDENDKLIREVKVITLKSKLVSDFRKDFQFYKVREINNYHHAHDAYLNAVVGTALIKKYPKLESEFVYGDYKVYDVRKMIAKSEQEIGKATAKYFFYSNIMNFFKTEITLANGEIRKRPLIETNGETGEIVWDKGRDFATVRKVLSMPQVNIVKKTEVQTGGFSKESILPKRNSDKLIARKKDWDPKKYGGFDSPTVAYSVLVVAKVEKGKSKKLKSVKELLGITIMERSSFEKNPIDFLEAKGYKEVKKDLIIKLPKYSLFELENGRKRMLASAGELQKGNELALPSKYVNFLYLASHYEKLKGSPEDNEQKQLFVEQHKHYLDEIIEQISEFSKRVILADANLDKVLSAYNKHRDKPIREQAENIIHLFTLTNLGAPAAFKYFDTTIDRKRYTSTKEVLDATLIHQSITGLYETRIDLSQLGGDGGGGGGSSPAPGGGLEHLPPPPEVSQFPLNPERLQALTDLVSRALEAKHIEPYQGPGNNPIFPVKKPNGKWRFIHDLRATNSLTRDLASPSPGPPDLTSLPQDLPHLRTIDLTDAFFQIPLPAVFQPYFAFTLPQPNNHGPGTRYSWRVLPQGFKNSPTLFQQQLSHILAPVRKAFPNSLIIQYMDDILLASPALRELTALTDKVTNALTKEGLPMSLEKTQATPGSIHFLGQVISPDCITYETLPSIHVKSIWSLAELQSMLGELQWVSKGTPVLRSSLHQLYLALRGHRDPRDTIELTSTQVQALKTIQKALALNCRSRLVSQLPILALIILRPTGTTAVLFQTKQKWPLVWLHTPHPATSLRPWGQLLANAIITLDKYSLQHYGQICKSFHHNISNQALTYYLHTSDQSSVAILLQHSHRFHNLGAQPSGPWRSLLQVPQIFQNIDVLRPPFIISPVVIDHAPCLFSDGATSKAAFILWDKQVIHQQVLPLPSTCSAQAGELFGLLAGLQKSKPWPALNIFLDSKFLIGHLRRMAWGAFLGPSTQCDLHARLFPLLQGKTVYVHHVRSHTLLQDPISRLNEATDALMLAPLLPLAGKRTADGSEFEKRTADGSEFESPKKKAKVE

SEQ ID NO: 1520 - protein, 2009 aa, synthetic construct
MPAAKRVKLDGGDKKYSIGLDIGTNSVGWAVITDEYKVPSKKFKVLGNTDRHSIKKNLIGALLFDSGETAEATRLKRTARRRYTRRKNRICYLQEIFSNEMAKVDDSFFHRLEESFLVEEDKKHERHPIFGNIVDEVAYHEKYPTIYHLRKKLVDSTDKADLRLIYLALAHMIKFRGHFLIEGDLNPDNSDVDKLFIQLVQTYNQLFEENPINASGVDAKAILSARLSKSRRLENLIAQLPGEKKNGLFGNLIALSLGLTPNFKSNFDLAEDAKLQLSKDTYDDDLDNLLAQIGDQYADLFLAAKNLSDAILLSDILRVNTEITKAPLSASMIKRYDEHHQDLTLLKALVRQQLPEKYKEIFFDQSKNGYAGYIDGGASQEEFYKFIKPILEKMDGTEELLVKLNREDLLRKQRTFDNGSIPHQIHLGELHAILRRQEDFYPFLKDNREKIEKILTFRIPYYVGPLARGNSRFAWMTRKSEETITPWNFEEVVDKGASAQSFIERMTNFDKNLPNEKVLPKHSLLYEYFTVYNELTKVKYVTEGMRKPAFLSGEQKKAIVDLLFKTNRKVTVKQLKEDYFKKIECFDSVEISGVEDRFNASLGTYHDLLKIIKDKDFLDNEENEDILEDIVLTLTLFEDREMIEERLKTYAHLFDDKVMKQLKRRRYTGWGRLSRKLINGIRDKQSGKTILDFLKSDGFANRNFMQLIHDDSLTFKEDIQKAQVSGQGDSLHEHIANLAGSPAIKKGILQTVKVVDELVKVMGRHKPENIVIEMARENQTTQKGQKNSRERMKRIEEGIKELGSQILKEHPVENTQLQNEKLYLYYLQNGRDMYVDQELDINRLSDYDVDHIVPQSFLKDDSIDNKVLTRSDKARGKSDNVPSEEVVKKMKNYWRQLLNAKLITQRKFDNLTKAERGGLSELDKAGFIKRQLVETRQITKHVAQILDSRMNTKYDENDKLIREVKVITLKSKLVSDFRKDFQFYKVREINNYHHAHDAYLNAVVGTALIKKYPKLESEFVYGDYKVYDVRKMIAKSEQEIGKATAKYFFYSNIMNFFKTEITLANGEIRKRPLIETNGETGEIVWDKGRDFATVRKVLSMPQVNIVKKTEVQTGGFSKESILPKRNSDKLIARKKDWDPKKYGGFDSPTVAYSVLVVAKVEKGKSKKLKSVKELLGITIMERSSFEKNPIDFLEAKGYKEVKKDLIIKLPKYSLFELENGRKRMLASAGELQKGNELALPSKYVNFLYLASHYEKLKGSPEDNEQKQLFVEQHKHYLDEIIEQISEFSKRVILADANLDKVLSAYNKHRDKPIREQAENIIHLFTLTNLGAPAAFKYFDTTIDRKRYTSTKEVLDATLIHQSITGLYETRIDLSQLGGDGGPAPEAAAKGGGGGGLEHLPPPPEVSQFPLNPERLQALTDLVSRALEAKHIEPYQGPGNNPIFPVKKPNGKWRFIHDLRATNSLTRDLASPSPGPPDLTSLPQDLPHLRTIDLTDAFFQIPLPAVFQPYFAFTLPQPNNHGPGTRYSWRVLPQGFKNSPTLFQQQLSHILAPVRKAFPNSLIIQYMDDILLASPALRELTALTDKVTNALTKEGLPMSLEKTQATPGSIHFLGQVISPDCITYETLPSIHVKSIWSLAELQSMLGELQWVSKGTPVLRSSLHQLYLALRGHRDPRDTIELTSTQVQALKTIQKALALNCRSRLVSQLPILALIILRPTGTTAVLFQTKQKWPLVWLHTPHPATSLRPWGQLLANAIITLDKYSLQHYGQICKSFHHNISNQALTYYLHTSDQSSVAILLQHSHRFHNLGAQPSGPWRSLLQVPQIFQNIDVLRPPFIISPVVIDHAPCLFSDGATSKAAFILWDKQVIHQQVLPLPSTCSAQAGELFGLLAGLQKSKPWPALNIFLDSKFLIGHLRRMAWGAFLGPSTQCDLHARLFPLLQGKTVYVHHVRSHTLLQDPISRLNEATDALMLAPLLPLAGKRTADGSEFEKRTADGSEFESPKKKAKVE

SEQ ID NO: 1521 - protein, 2023 aa, synthetic construct
MPAAKRVKLDGGDKKYSIGLDIGTNSVGWAVITDEYKVPSKKFKVLGNTDRHSIKKNLIGALLFDSGETAEATRLKRTARRRYTRRKNRICYLQEIFSNEMAKVDDSFFHRLEESFLVEEDKKHERHPIFGNIVDEVAYHEKYPTIYHLRKKLVDSTDKADLRLIYLALAHMIKFRGHFLIEGDLNPDNSDVDKLFIQLVQTYNQLFEENPINASGVDAKAILSARLSKSRRLENLIAQLPGEKKNGLFGNLIALSLGLTPNFKSNFDLAEDAKLQLSKDTYDDDLDNLLAQIGDQYADLFLAAKNLSDAILLSDILRVNTEITKAPLSASMIKRYDEHHQDLTLLKALVRQQLPEKYKEIFFDQSKNGYAGYIDGGASQEEFYKFIKPILEKMDGTEELLVKLNREDLLRKQRTFDNGSIPHQIHLGELHAILRRQEDFYPFLKDNREKIEKILTFRIPYYVGPLARGNSRFAWMTRKSEETITPWNFEEVVDKGASAQSFIERMTNFDKNLPNEKVLPKHSLLYEYFTVYNELTKVKYVTEGMRKPAFLSGEQKKAIVDLLFKTNRKVTVKQLKEDYFKKIECFDSVEISGVEDRFNASLGTYHDLLKIIKDKDFLDNEENEDILEDIVLTLTLFEDREMIEERLKTYAHLFDDKVMKQLKRRRYTGWGRLSRKLINGIRDKQSGKTILDFLKSDGFANRNFMQLIHDDSLTFKEDIQKAQVSGQGDSLHEHIANLAGSPAIKKGILQTVKVVDELVKVMGRHKPENIVIEMARENQTTQKGQKNSRERMKRIEEGIKELGSQILKEHPVENTQLQNEKLYLYYLQNGRDMYVDQELDINRLSDYDVDHIVPQSFLKDDSIDNKVLTRSDKARGKSDNVPSEEVVKKMKNYWRQLLNAKLITQRKFDNLTKAERGGLSELDKAGFIKRQLVETRQITKHVAQILDSRMNTKYDENDKLIREVKVITLKSKLVSDFRKDFQFYKVREINNYHHAHDAYLNAVVGTALIKKYPKLESEFVYGDYKVYDVRKMIAKSEQEIGKATAKYFFYSNIMNFFKTEITLANGEIRKRPLIETNGETGEIVWDKGRDFATVRKVLSMPQVNIVKKTEVQTGGFSKESILPKRNSDKLIARKKDWDPKKYGGFDSPTVAYSVLVVAKVEKGKSKKLKSVKELLGITIMERSSFEKNPIDFLEAKGYKEVKKDLIIKLPKYSLFELENGRKRMLASAGELQKGNELALPSKYVNFLYLASHYEKLKGSPEDNEQKQLFVEQHKHYLDEIIEQISEFSKRVILADANLDKVLSAYNKHRDKPIREQAENIIHLFTLTNLGAPAAFKYFDTTIDRKRYTSTKEVLDATLIHQSITGLYETRIDLSQLGGDGGGGGGSGGGGSGGGGSGGGGSGGGGSGGGLEHLPPPPEVSQFPLNPERLQALTDLVSRALEAKHIEPYQGPGNNPIFPVKKPNGKWRFIHDLRATNSLTRDLASPSPGPPDLTSLPQDLPHLRTIDLTDAFFQIPLPAVFQPYFAFTLPQPNNHGPGTRYSWRVLPQGFKNSPTLFQQQLSHILAPVRKAFPNSLIIQYMDDILLASPALRELTALTDKVTNALTKEGLPMSLEKTQATPGSIHFLGQVISPDCITYETLPSIHVKSIWSLAELQSMLGELQWVSKGTPVLRSSLHQLYLALRGHRDPRDTIELTSTQVQALKTIQKALALNCRSRLVSQLPILALIILRPTGTTAVLFQTKQKWPLVWLHTPHPATSLRPWGQLLANAIITLDKYSLQHYGQICKSFHHNISNQALTYYLHTSDQSSVAILLQHSHRFHNLGAQPSGPWRSLLQVPQIFQNIDVLRPPFIISPVVIDHAPCLFSDGATSKAAFILWDKQVIHQQVLPLPSTCSAQAGELFGLLAGLQKSKPWPALNIFLDSKFLIGHLRRMAWGAFLGPSTQCDLHARLFPLLQGKTVYVHHVRSHTLLQDPISRLNEATDALMLAPLLPLAGKRTADGSEFEKRTADGSEFESPKKKAKVE

SEQ ID NO: 1522 - protein, 2006 aa, synthetic construct
MPAAKRVKLDGGDKKYSIGLDIGTNSVGWAVITDEYKVPSKKFKVLGNTDRHSIKKNLIGALLFDSGETAEATRLKRTARRRYTRRKNRICYLQEIFSNEMAKVDDSFFHRLEESFLVEEDKKHERHPIFGNIVDEVAYHEKYPTIYHLRKKLVDSTDKADLRLIYLALAHMIKFRGHFLIEGDLNPDNSDVDKLFIQLVQTYNQLFEENPINASGVDAKAILSARLSKSRRLENLIAQLPGEKKNGLFGNLIALSLGLTPNFKSNFDLAEDAKLQLSKDTYDDDLDNLLAQIGDQYADLFLAAKNLSDAILLSDILRVNTEITKAPLSASMIKRYDEHHQDLTLLKALVRQQLPEKYKEIFFDQSKNGYAGYIDGGASQEEFYKFIKPILEKMDGTEELLVKLNREDLLRKQRTFDNGSIPHQIHLGELHAILRRQEDFYPFLKDNREKIEKILTFRIPYYVGPLARGNSRFAWMTRKSEETITPWNFEEVVDKGASAQSFIERMTNFDKNLPNEKVLPKHSLLYEYFTVYNELTKVKYVTEGMRKPAFLSGEQKKAIVDLLFKTNRKVTVKQLKEDYFKKIECFDSVEISGVEDRFNASLGTYHDLLKIIKDKDFLDNEENEDILEDIVLTLTLFEDREMIEERLKTYAHLFDDKVMKQLKRRRYTGWGRLSRKLINGIRDKQSGKTILDFLKSDGFANRNFMQLIHDDSLTFKEDIQKAQVSGQGDSLHEHIANLAGSPAIKKGILQTVKVVDELVKVMGRHKPENIVIEMARENQTTQKGQKNSRERMKRIEEGIKELGSQILKEHPVENTQLQNEKLYLYYLQNGRDMYVDQELDINRLSDYDVDHIVPQSFLKDDSIDNKVLTRSDKARGKSDNVPSEEVVKKMKNYWRQLLNAKLITQRKFDNLTKAERGGLSELDKAGFIKRQLVETRQITKHVAQILDSRMNTKYDENDKLIREVKVITLKSKLVSDFRKDFQFYKVREINNYHHAHDAYLNAVVGTALIKKYPKLESEFVYGDYKVYDVRKMIAKSEQEIGKATAKYFFYSNIMNFFKTEITLANGEIRKRPLIETNGETGEIVWDKGRDFATVRKVLSMPQVNIVKKTEVQTGGFSKESILPKRNSDKLIARKKDWDPKKYGGFDSPTVAYSVLVVAKVEKGKSKKLKSVKELLGITIMERSSFEKNPIDFLEAKGYKEVKKDLIIKLPKYSLFELENGRKRMLASAGELQKGNELALPSKYVNFLYLASHYEKLKGSPEDNEQKQLFVEQHKHYLDEIIEQISEFSKRVILADANLDKVLSAYNKHRDKPIREQAENIIHLFTLTNLGAPAAFKYFDTTIDRKRYTSTKEVLDATLIHQSITGLYETRIDLSQLGGDGGEAAAKGGSGGGLEHLPPPPEVSQFPLNPERLQALTDLVSRALEAKHIEPYQGPGNNPIFPVKKPNGKWRFIHDLRATNSLTRDLASPSPGPPDLTSLPQDLPHLRTIDLTDAFFQIPLPAVFQPYFAFTLPQPNNHGPGTRYSWRVLPQGFKNSPTLFQQQLSHILAPVRKAFPNSLIIQYMDDILLASPALRELTALTDKVTNALTKEGLPMSLEKTQATPGSIHFLGQVISPDCITYETLPSIHVKSIWSLAELQSMLGELQWVSKGTPVLRSSLHQLYLALRGHRDPRDTIELTSTQVQALKTIQKALALNCRSRLVSQLPILALIILRPTGTTAVLFQTKQKWPLVWLHTPHPATSLRPWGQLLANAIITLDKYSLQHYGQICKSFHHNISNQALTYYLHTSDQSSVAILLQHSHRFHNLGAQPSGPWRSLLQVPQIFQNIDVLRPPFIISPVVIDHAPCLFSDGATSKAAFILWDKQVIHQQVLPLPSTCSAQAGELFGLLAGLQKSKPWPALNIFLDSKFLIGHLRRMAWGAFLGPSTQCDLHARLFPLLQGKTVYVHHVRSHTLLQDPISRLNEATDALMLAPLLPLAGKRTADGSEFEKRTADGSEFESPKKKAKVE

SEQ ID NO: 1523 - protein, 2007 aa, synthetic construct
MPAAKRVKLDGGDKKYSIGLDIGTNSVGWAVITDEYKVPSKKFKVLGNTDRHSIKKNLIGALLFDSGETAEATRLKRTARRRYTRRKNRICYLQEIFSNEMAKVDDSFFHRLEESFLVEEDKKHERHPIFGNIVDEVAYHEKYPTIYHLRKKLVDSTDKADLRLIYLALAHMIKFRGHFLIEGDLNPDNSDVDKLFIQLVQTYNQLFEENPINASGVDAKAILSARLSKSRRLENLIAQLPGEKKNGLFGNLIALSLGLTPNFKSNFDLAEDAKLQLSKDTYDDDLDNLLAQIGDQYADLFLAAKNLSDAILLSDILRVNTEITKAPLSASMIKRYDEHHQDLTLLKALVRQQLPEKYKEIFFDQSKNGYAGYIDGGASQEEFYKFIKPILEKMDGTEELLVKLNREDLLRKQRTFDNGSIPHQIHLGELHAILRRQEDFYPFLKDNREKIEKILTFRIPYYVGPLARGNSRFAWMTRKSEETITPWNFEEVVDKGASAQSFIERMTNFDKNLPNEKVLPKHSLLYEYFTVYNELTKVKYVTEGMRKPAFLSGEQKKAIVDLLFKTNRKVTVKQLKEDYFKKIECFDSVEISGVEDRFNASLGTYHDLLKIIKDKDFLDNEENEDILEDIVLTLTLFEDREMIEERLKTYAHLFDDKVMKQLKRRRYTGWGRLSRKLINGIRDKQSGKTILDFLKSDGFANRNFMQLIHDDSLTFKEDIQKAQVSGQGDSLHEHIANLAGSPAIKKGILQTVKVVDELVKVMGRHKPENIVIEMARENQTTQKGQKNSRERMKRIEEGIKELGSQILKEHPVENTQLQNEKLYLYYLQNGRDMYVDQELDINRLSDYDVDHIVPQSFLKDDSIDNKVLTRSDKARGKSDNVPSEEVVKKMKNYWRQLLNAKLITQRKFDNLTKAERGGLSELDKAGFIKRQLVETRQITKHVAQILDSRMNTKYDENDKLIREVKVITLKSKLVSDFRKDFQFYKVREINNYHHAHDAYLNAVVGTALIKKYPKLESEFVYGDYKVYDVRKMIAKSEQEIGKATAKYFFYSNIMNFFKTEITLANGEIRKRPLIETNGETGEIVWDKGRDFATVRKVLSMPQVNIVKKTEVQTGGFSKESILPKRNSDKLIARKKDWDPKKYGGFDSPTVAYSVLVVAKVEKGKSKKLKSVKELLGITIMERSSFEKNPIDFLEAKGYKEVKKDLIIKLPKYSLFELENGRKRMLASAGELQKGNELALPSKYVNFLYLASHYEKLKGSPEDNEQKQLFVEQHKHYLDEIIEQISEFSKRVILADANLDKVLSAYNKHRDKPIREQAENIIHLFTLTNLGAPAAFKYFDTTIDRKRYTSTKEVLDATLIHQSITGLYETRIDLSQLGGDGGGGGGSSGGSGGGLEHLPPPPEVSQFPLNPERLQALTDLVSRALEAKHIEPYQGPGNNPIFPVKKPNGKWRFIHDLRATNSLTRDLASPSPGPPDLTSLPQDLPHLRTIDLTDAFFQIPLPAVFQPYFAFTLPQPNNHGPGTRYSWRVLPQGFKNSPTLFQQQLSHILAPVRKAFPNSLIIQYMDDILLASPALRELTALTDKVTNALTKEGLPMSLEKTQATPGSIHFLGQVISPDCITYETLPSIHVKSIWSLAELQSMLGELQWVSKGTPVLRSSLHQLYLALRGHRDPRDTIELTSTQVQALKTIQKALALNCRSRLVSQLPILALIILRPTGTTAVLFQTKQKWPLVWLHTPHPATSLRPWGQLLANAIITLDKYSLQHYGQICKSFHHNISNQALTYYLHTSDQSSVAILLQHSHRFHNLGAQPSGPWRSLLQVPQIFQNIDVLRPPFIISPVVIDHAPCLFSDGATSKAAFILWDKQVIHQQVLPLPSTCSAQAGELFGLLAGLQKSKPWPALNIFLDSKFLIGHLRRMAWGAFLGPSTQCDLHARLFPLLQGKTVYVHHVRSHTLLQDPISRLNEATDALMLAPLLPLAGKRTADGSEFEKRTADGSEFESPKKKAKVE

SEQ ID NO: 1524 - protein, 2009 aa, synthetic construct
MPAAKRVKLDGGDKKYSIGLDIGTNSVGWAVITDEYKVPSKKFKVLGNTDRHSIKKNLIGALLFDSGETAEATRLKRTARRRYTRRKNRICYLQEIFSNEMAKVDDSFFHRLEESFLVEEDKKHERHPIFGNIVDEVAYHEKYPTIYHLRKKLVDSTDKADLRLIYLALAHMIKFRGHFLIEGDLNPDNSDVDKLFIQLVQTYNQLFEENPINASGVDAKAILSARLSKSRRLENLIAQLPGEKKNGLFGNLIALSLGLTPNFKSNFDLAEDAKLQLSKDTYDDDLDNLLAQIGDQYADLFLAAKNLSDAILLSDILRVNTEITKAPLSASMIKRYDEHHQDLTLLKALVRQQLPEKYKEIFFDQSKNGYAGYIDGGASQEEFYKFIKPILEKMDGTEELLVKLNREDLLRKQRTFDNGSIPHQIHLGELHAILRRQEDFYPFLKDNREKIEKILTFRIPYYVGPLARGNSRFAWMTRKSEETITPWNFEEVVDKGASAQSFIERMTNFDKNLPNEKVLPKHSLLYEYFTVYNELTKVKYVTEGMRKPAFLSGEQKKAIVDLLFKTNRKVTVKQLKEDYFKKIECFDSVEISGVEDRFNASLGTYHDLLKIIKDKDFLDNEENEDILEDIVLTLTLFEDREMIEERLKTYAHLFDDKVMKQLKRRRYTGWGRLSRKLINGIRDKQSGKTILDFLKSDGFANRNFMQLIHDDSLTFKEDIQKAQVSGQGDSLHEHIANLAGSPAIKKGILQTVKVVDELVKVMGRHKPENIVIEMARENQTTQKGQKNSRERMKRIEEGIKELGSQILKEHPVENTQLQNEKLYLYYLQNGRDMYVDQELDINRLSDYDVDHIVPQSFLKDDSIDNKVLTRSDKARGKSDNVPSEEVVKKMKNYWRQLLNAKLITQRKFDNLTKAERGGLSELDKAGFIKRQLVETRQITKHVAQILDSRMNTKYDENDKLIREVKVITLKSKLVSDFRKDFQFYKVREINNYHHAHDAYLNAVVGTALIKKYPKLESEFVYGDYKVYDVRKMIAKSEQEIGKATAKYFFYSNIMNFFKTEITLANGEIRKRPLIETNGETGEIVWDKGRDFATVRKVLSMPQVNIVKKTEVQTGGFSKESILPKRNSDKLIARKKDWDPKKYGGFDSPTVAYSVLVVAKVEKGKSKKLKSVKELLGITIMERSSFEKNPIDFLEAKGYKEVKKDLIIKLPKYSLFELENGRKRMLASAGELQKGNELALPSKYVNFLYLASHYEKLKGSPEDNEQKQLFVEQHKHYLDEIIEQISEFSKRVILADANLDKVLSAYNKHRDKPIREQAENIIHLFTLTNLGAPAAFKYFDTTIDRKRYTSTKEVLDATLIHQSITGLYETRIDLSQLGGDGGEAAAKGGSGGGGGGLEHLPPPPEVSQFPLNPERLQALTDLVSRALEAKHIEPYQGPGNNPIFPVKKPNGKWRFIHDLRATNSLTRDLASPSPGPPDLTSLPQDLPHLRTIDLTDAFFQIPLPAVFQPYFAFTLPQPNNHGPGTRYSWRVLPQGFKNSPTLFQQQLSHILAPVRKAFPNSLIIQYMDDILLASPALRELTALTDKVTNALTKEGLPMSLEKTQATPGSIHFLGQVISPDCITYETLPSIHVKSIWSLAELQSMLGELQWVSKGTPVLRSSLHQLYLALRGHRDPRDTIELTSTQVQALKTIQKALALNCRSRLVSQLPILALIILRPTGTTAVLFQTKQKWPLVWLHTPHPATSLRPWGQLLANAIITLDKYSLQHYGQICKSFHHNISNQALTYYLHTSDQSSVAILLQHSHRFHNLGAQPSGPWRSLLQVPQIFQNIDVLRPPFIISPVVIDHAPCLFSDGATSKAAFILWDKQVIHQQVLPLPSTCSAQAGELFGLLAGLQKSKPWPALNIFLDSKFLIGHLRRMAWGAFLGPSTQCDLHARLFPLLQGKTVYVHHVRSHTLLQDPISRLNEATDALMLAPLLPLAGKRTADGSEFEKRTADGSEFESPKKKAKVE

SEQ ID NO: 1525 - protein, 2007 aa, synthetic construct
MPAAKRVKLDGGDKKYSIGLDIGTNSVGWAVITDEYKVPSKKFKVLGNTDRHSIKKNLIGALLFDSGETAEATRLKRTARRRYTRRKNRICYLQEIFSNEMAKVDDSFFHRLEESFLVEEDKKHERHPIFGNIVDEVAYHEKYPTIYHLRKKLVDSTDKADLRLIYLALAHMIKFRGHFLIEGDLNPDNSDVDKLFIQLVQTYNQLFEENPINASGVDAKAILSARLSKSRRLENLIAQLPGEKKNGLFGNLIALSLGLTPNFKSNFDLAEDAKLQLSKDTYDDDLDNLLAQIGDQYADLFLAAKNLSDAILLSDILRVNTEITKAPLSASMIKRYDEHHQDLTLLKALVRQQLPEKYKEIFFDQSKNGYAGYIDGGASQEEFYKFIKPILEKMDGTEELLVKLNREDLLRKQRTFDNGSIPHQIHLGELHAILRRQEDFYPFLKDNREKIEKILTFRIPYYVGPLARGNSRFAWMTRKSEETITPWNFEEVVDKGASAQSFIERMTNFDKNLPNEKVLPKHSLLYEYFTVYNELTKVKYVTEGMRKPAFLSGEQKKAIVDLLFKTNRKVTVKQLKEDYFKKIECFDSVEISGVEDRFNASLGTYHDLLKIIKDKDFLDNEENEDILEDIVLTLTLFEDREMIEERLKTYAHLFDDKVMKQLKRRRYTGWGRLSRKLINGIRDKQSGKTILDFLKSDGFANRNFMQLIHDDSLTFKEDIQKAQVSGQGDSLHEHIANLAGSPAIKKGILQTVKVVDELVKVMGRHKPENIVIEMARENQTTQKGQKNSRERMKRIEEGIKELGSQILKEHPVENTQLQNEKLYLYYLQNGRDMYVDQELDINRLSDYDVDHIVPQSFLKDDSIDNKVLTRSDKARGKSDNVPSEEVVKKMKNYWRQLLNAKLITQRKFDNLTKAERGGLSELDKAGFIKRQLVETRQITKHVAQILDSRMNTKYDENDKLIREVKVITLKSKLVSDFRKDFQFYKVREINNYHHAHDAYLNAVVGTALIKKYPKLESEFVYGDYKVYDVRKMIAKSEQEIGKATAKYFFYSNIMNFFKTEITLANGEIRKRPLIETNGETGEIVWDKGRDFATVRKVLSMPQVNIVKKTEVQTGGFSKESILPKRNSDKLIARKKDWDPKKYGGFDSPTVAYSVLVVAKVEKGKSKKLKSVKELLGITIMERSSFEKNPIDFLEAKGYKEVKKDLIIKLPKYSLFELENGRKRMLASAGELQKGNELALPSKYVNFLYLASHYEKLKGSPEDNEQKQLFVEQHKHYLDEIIEQISEFSKRVILADANLDKVLSAYNKHRDKPIREQAENIIHLFTLTNLGAPAAFKYFDTTIDRKRYTSTKEVLDATLIHQSITGLYETRIDLSQLGGDGGGSSPAPGGGGGGLEHLPPPPEVSQFPLNPERLQALTDLVSRALEAKHIEPYQGPGNNPIFPVKKPNGKWRFIHDLRATNSLTRDLASPSPGPPDLTSLPQDLPHLRTIDLTDAFFQIPLPAVFQPYFAFTLPQPNNHGPGTRYSWRVLPQGFKNSPTLFQQQLSHILAPVRKAFPNSLIIQYMDDILLASPALRELTALTDKVTNALTKEGLPMSLEKTQATPGSIHFLGQVISPDCITYETLPSIHVKSIWSLAELQSMLGELQWVSKGTPVLRSSLHQLYLALRGHRDPRDTIELTSTQVQALKTIQKALALNCRSRLVSQLPILALIILRPTGTTAVLFQTKQKWPLVWLHTPHPATSLRPWGQLLANAIITLDKYSLQHYGQICKSFHHNISNQALTYYLHTSDQSSVAILLQHSHRFHNLGAQPSGPWRSLLQVPQIFQNIDVLRPPFIISPVVIDHAPCLFSDGATSKAAFILWDKQVIHQQVLPLPSTCSAQAGELFGLLAGLQKSKPWPALNIFLDSKFLIGHLRRMAWGAFLGPSTQCDLHARLFPLLQGKTVYVHHVRSHTLLQDPISRLNEATDALMLAPLLPLAGKRTADGSEFEKRTADGSEFESPKKKAKVE

SEQ ID NO: 1526 - protein, 2009 aa, synthetic construct
MPAAKRVKLDGGDKKYSIGLDIGTNSVGWAVITDEYKVPSKKFKVLGNTDRHSIKKNLIGALLFDSGETAEATRLKRTARRRYTRRKNRICYLQEIFSNEMAKVDDSFFHRLEESFLVEEDKKHERHPIFGNIVDEVAYHEKYPTIYHLRKKLVDSTDKADLRLIYLALAHMIKFRGHFLIEGDLNPDNSDVDKLFIQLVQTYNQLFEENPINASGVDAKAILSARLSKSRRLENLIAQLPGEKKNGLFGNLIALSLGLTPNFKSNFDLAEDAKLQLSKDTYDDDLDNLLAQIGDQYADLFLAAKNLSDAILLSDILRVNTEITKAPLSASMIKRYDEHHQDLTLLKALVRQQLPEKYKEIFFDQSKNGYAGYIDGGASQEEFYKFIKPILEKMDGTEELLVKLNREDLLRKQRTFDNGSIPHQIHLGELHAILRRQEDFYPFLKDNREKIEKILTFRIPYYVGPLARGNSRFAWMTRKSEETITPWNFEEVVDKGASAQSFIERMTNFDKNLPNEKVLPKHSLLYEYFTVYNELTKVKYVTEGMRKPAFLSGEQKKAIVDLLFKTNRKVTVKQLKEDYFKKIECFDSVEISGVEDRFNASLGTYHDLLKIIKDKDFLDNEENEDILEDIVLTLTLFEDREMIEERLKTYAHLFDDKVMKQLKRRRYTGWGRLSRKLINGIRDKQSGKTILDFLKSDGFANRNFMQLIHDDSLTFKEDIQKAQVSGQGDSLHEHIANLAGSPAIKKGILQTVKVVDELVKVMGRHKPENIVIEMARENQTTQKGQKNSRERMKRIEEGIKELGSQILKEHPVENTQLQNEKLYLYYLQNGRDMYVDQELDINRLSDYDVDHIVPQSFLKDDSIDNKVLTRSDKARGKSDNVPSEEVVKKMKNYWRQLLNAKLITQRKFDNLTKAERGGLSELDKAGFIKRQLVETRQITKHVAQILDSRMNTKYDENDKLIREVKVITLKSKLVSDFRKDFQFYKVREINNYHHAHDAYLNAVVGTALIKKYPKLESEFVYGDYKVYDVRKMIAKSEQEIGKATAKYFFYSNIMNFFKTEITLANGEIRKRPLIETNGETGEIVWDKGRDFATVRKVLSMPQVNIVKKTEVQTGGFSKESILPKRNSDKLIARKKDWDPKKYGGFDSPTVAYSVLVVAKVEKGKSKKLKSVKELLGITIMERSSFEKNPIDFLEAKGYKEVKKDLIIKLPKYSLFELENGRKRMLASAGELQKGNELALPSKYVNFLYLASHYEKLKGSPEDNEQKQLFVEQHKHYLDEIIEQISEFSKRVILADANLDKVLSAYNKHRDKPIREQAENIIHLFTLTNLGAPAAFKYFDTTIDRKRYTSTKEVLDATLIHQSITGLYETRIDLSQLGGDGGEAAAKGGGGSSGGGLEHLPPPPEVSQFPLNPERLQALTDLVSRALEAKHIEPYQGPGNNPIFPVKKPNGKWRFIHDLRATNSLTRDLASPSPGPPDLTSLPQDLPHLRTIDLTDAFFQIPLPAVFQPYFAFTLPQPNNHGPGTRYSWRVLPQGFKNSPTLFQQQLSHILAPVRKAFPNSLIIQYMDDILLASPALRELTALTDKVTNALTKEGLPMSLEKTQATPGSIHFLGQVISPDCITYETLPSIHVKSIWSLAELQSMLGELQWVSKGTPVLRSSLHQLYLALRGHRDPRDTIELTSTQVQALKTIQKALALNCRSRLVSQLPILALIILRPTGTTAVLFQTKQKWPLVWLHTPHPATSLRPWGQLLANAIITLDKYSLQHYGQICKSFHHNISNQALTYYLHTSDQSSVAILLQHSHRFHNLGAQPSGPWRSLLQVPQIFQNIDVLRPPFIISPVVIDHAPCLFSDGATSKAAFILWDKQVIHQQVLPLPSTCSAQAGELFGLLAGLQKSKPWPALNIFLDSKFLIGHLRRMAWGAFLGPSTQCDLHARLFPLLQGKTVYVHHVRSHTLLQDPISRLNEATDALMLAPLLPLAGKRTADGSEFEKRTADGSEFESPKKKAKVE

SEQ ID NO: 1527 - protein, 2007 aa, synthetic construct
MPAAKRVKLDGGDKKYSIGLDIGTNSVGWAVITDEYKVPSKKFKVLGNTDRHSIKKNLIGALLFDSGETAEATRLKRTARRRYTRRKNRICYLQEIFSNEMAKVDDSFFHRLEESFLVEEDKKHERHPIFGNIVDEVAYHEKYPTIYHLRKKLVDSTDKADLRLIYLALAHMIKFRGHFLIEGDLNPDNSDVDKLFIQLVQTYNQLFEENPINASGVDAKAILSARLSKSRRLENLIAQLPGEKKNGLFGNLIALSLGLTPNFKSNFDLAEDAKLQLSKDTYDDDLDNLLAQIGDQYADLFLAAKNLSDAILLSDILRVNTEITKAPLSASMIKRYDEHHQDLTLLKALVRQQLPEKYKEIFFDQSKNGYAGYIDGGASQEEFYKFIKPILEKMDGTEELLVKLNREDLLRKQRTFDNGSIPHQIHLGELHAILRRQEDFYPFLKDNREKIEKILTFRIPYYVGPLARGNSRFAWMTRKSEETITPWNFEEVVDKGASAQSFIERMTNFDKNLPNEKVLPKHSLLYEYFTVYNELTKVKYVTEGMRKPAFLSGEQKKAIVDLLFKTNRKVTVKQLKEDYFKKIECFDSVEISGVEDRFNASLGTYHDLLKIIKDKDFLDNEENEDILEDIVLTLTLFEDREMIEERLKTYAHLFDDKVMKQLKRRRYTGWGRLSRKLINGIRDKQSGKTILDFLKSDGFANRNFMQLIHDDSLTFKEDIQKAQVSGQGDSLHEHIANLAGSPAIKKGILQTVKVVDELVKVMGRHKPENIVIEMARENQTTQKGQKNSRERMKRIEEGIKELGSQILKEHPVENTQLQNEKLYLYYLQNGRDMYVDQELDINRLSDYDVDHIVPQSFLKDDSIDNKVLTRSDKARGKSDNVPSEEVVKKMKNYWRQLLNAKLITQRKFDNLTKAERGGLSELDKAGFIKRQLVETRQITKHVAQILDSRMNTKYDENDKLIREVKVITLKSKLVSDFRKDFQFYKVREINNYHHAHDAYLNAVVGTALIKKYPKLESEFVYGDYKVYDVRKMIAKSEQEIGKATAKYFFYSNIMNFFKTEITLANGEIRKRPLIETNGETGEIVWDKGRDFATVRKVLSMPQVNIVKKTEVQTGGFSKESILPKRNSDKLIARKKDWDPKKYGGFDSPTVAYSVLVVAKVEKGKSKKLKSVKELLGITIMERSSFEKNPIDFLEAKGYKEVKKDLIIKLPKYSLFELENGRKRMLASAGELQKGNELALPSKYVNFLYLASHYEKLKGSPEDNEQKQLFVEQHKHYLDEIIEQISEFSKRVILADANLDKVLSAYNKHRDKPIREQAENIIHLFTLTNLGAPAAFKYFDTTIDRKRYTSTKEVLDATLIHQSITGLYETRIDLSQLGGDGGPAPGGGGSSGGGLEHLPPPPEVSQFPLNPERLQALTDLVSRALEAKHIEPYQGPGNNPIFPVKKPNGKWRFIHDLRATNSLTRDLASPSPGPPDLTSPPQDLPHLRTIDLTDAFFQIPLPAVFQPYFAFTLPQPNNHGPGTRYSWRVLPQGFKNSPTLFQQQLSHILAPVRKAFPNSLIIQYMDDILLASPALRELTALTDKVTNALTKEGLPMSLEKTQATPGSIHFLGQVISPDCITYETLPSIHVKSIWSLAELQSMLGELQWVSKGTPVLRSSLHQLYLALRGHRDPRDTIELTSTQVQALKTIQKALALNCRSRLVSQLPILALIILRPTGTTAVLFQTKQKWPLVWLHTPHPATSLRPWGQLLANAIITLDKYSLQHYGQICKSFHHNISNQALTYYLHTSDQSSVAILLQHSHRFHNLGAQPSGPWRSLLQVPQIFQNIDVLRPPFIISPVVIDHAPCLFSDGATSKAAFILWDKQVIHQQVLPLPSTCSAQAGELFGLLAGLQKSKPWPALNIFLDSKFLIGHLRRMAWGAFLGPSTQCDLHARLFPLLQGKTVYVHHVRSHTLLQDPISRLNEATDALMLAPLLPLAGKRTADGSEFEKRTADGSEFESPKKKAKVE

SEQ ID NO: 1528 - protein, 2028 aa, synthetic construct
MPAAKRVKLDGGDKKYSIGLDIGTNSVGWAVITDEYKVPSKKFKVLGNTDRHSIKKNLIGALLFDSGETAEATRLKRTARRRYTRRKNRICYLQEIFSNEMAKVDDSFFHRLEESFLVEEDKKHERHPIFGNIVDEVAYHEKYPTIYHLRKKLVDSTDKADLRLIYLALAHMIKFRGHFLIEGDLNPDNSDVDKLFIQLVQTYNQLFEENPINASGVDAKAILSARLSKSRRLENLIAQLPGEKKNGLFGNLIALSLGLTPNFKSNFDLAEDAKLQLSKDTYDDDLDNLLAQIGDQYADLFLAAKNLSDAILLSDILRVNTEITKAPLSASMIKRYDEHHQDLTLLKALVRQQLPEKYKEIFFDQSKNGYAGYIDGGASQEEFYKFIKPILEKMDGTEELLVKLNREDLLRKQRTFDNGSIPHQIHLGELHAILRRQEDFYPFLKDNREKIEKILTFRIPYYVGPLARGNSRFAWMTRKSEETITPWNFEEVVDKGASAQSFIERMTNFDKNLPNEKVLPKHSLLYEYFTVYNELTKVKYVTEGMRKPAFLSGEQKKAIVDLLFKTNRKVTVKQLKEDYFKKIECFDSVEISGVEDRFNASLGTYHDLLKIIKDKDFLDNEENEDILEDIVLTLTLFEDREMIEERLKTYAHLFDDKVMKQLKRRRYTGWGRLSRKLINGIRDKQSGKTILDFLKSDGFANRNFMQLIHDDSLTFKEDIQKAQVSGQGDSLHEHIANLAGSPAIKKGILQTVKVVDELVKVMGRHKPENIVIEMARENQTTQKGQKNSRERMKRIEEGIKELGSQILKEHPVENTQLQNEKLYLYYLQNGRDMYVDQELDINRLSDYDVDHIVPQSFLKDDSIDNKVLTRSDKARGKSDNVPSEEVVKKMKNYWRQLLNAKLITQRKFDNLTKAERGGLSELDKAGFIKRQLVETRQITKHVAQILDSRMNTKYDENDKLIREVKVITLKSKLVSDFRKDFQFYKVREINNYHHAHDAYLNAVVGTALIKKYPKLESEFVYGDYKVYDVRKMIAKSEQEIGKATAKYFFYSNIMNFFKTEITLANGEIRKRPLIETNGETGEIVWDKGRDFATVRKVLSMPQVNIVKKTEVQTGGFSKESILPKRNSDKLIARKKDWDPKKYGGFDSPTVAYSVLVVAKVEKGKSKKLKSVKELLGITIMERSSFEKNPIDFLEAKGYKEVKKDLIIKLPKYSLFELENGRKRMLASAGELQKGNELALPSKYVNFLYLASHYEKLKGSPEDNEQKQLFVEQHKHYLDEIIEQISEFSKRVILADANLDKVLSAYNKHRDKPIREQAENIIHLFTLTNLGAPAAFKYFDTTIDRKRYTSTKEVLDATLIHQSITGLYETRIDLSQLGGDGGGGGGSGGGGSGGGGSGGGGSGGGGSGGGGSGGGLEHLPPPPEVSQFPLNPERLQALTDLVSRALEAKHIEPYQGPGNNPIFPVKKPNGKWRFIHDLRATNSLTRDLASPSPGPPDLTSPPQDLPHLRTIDLTDAFFQIPLPAVFQPYFAFTLPQPNNHGPGTRYSWRVLPQGFKNSPTLFQQQLSHILAPVRKAFPNSLIIQYMDDILLASPALRELTALTDKVTNALTKEGLPMSLEKTQATPGSIHFLGQVISPDCITYETLPSIHVKSIWSLAELQSMLGELQWVSKGTPVLRSSLHQLYLALRGHRDPRDTIELTSTQVQALKTIQKALALNCRSRLVSQLPILALIILRPTGTTAVLFQTKQKWPLVWLHTPHPATSLRPWGQLLANAIITLDKYSLQHYGQICKSFHHNISNQALTYYLHTSDQSSVAILLQHSHRFHNLGAQPSGPWRSLLQVPQIFQNIDVLRPPFIISPVVIDHAPCLFSDGATSKAAFILWDKQVIHQQVLPLPSTCSAQAGELFGLLAGLQKSKPWPALNIFLDSKFLIGHLRRMAWGAFLGPSTQCDLHARLFPLLQGKTVYVHHVRSHTLLQDPISRLNEATDALMLAPLLPLAGKRTADGSEFEKRTADGSEFESPKKKAKVE

SEQ ID NO: 1529 - protein, 2007 aa, synthetic construct
MPAAKRVKLDGGDKKYSIGLDIGTNSVGWAVITDEYKVPSKKFKVLGNTDRHSIKKNLIGALLFDSGETAEATRLKRTARRRYTRRKNRICYLQEIFSNEMAKVDDSFFHRLEESFLVEEDKKHERHPIFGNIVDEVAYHEKYPTIYHLRKKLVDSTDKADLRLIYLALAHMIKFRGHFLIEGDLNPDNSDVDKLFIQLVQTYNQLFEENPINASGVDAKAILSARLSKSRRLENLIAQLPGEKKNGLFGNLIALSLGLTPNFKSNFDLAEDAKLQLSKDTYDDDLDNLLAQIGDQYADLFLAAKNLSDAILLSDILRVNTEITKAPLSASMIKRYDEHHQDLTLLKALVRQQLPEKYKEIFFDQSKNGYAGYIDGGASQEEFYKFIKPILEKMDGTEELLVKLNREDLLRKQRTFDNGSIPHQIHLGELHAILRRQEDFYPFLKDNREKIEKILTFRIPYYVGPLARGNSRFAWMTRKSEETITPWNFEEVVDKGASAQSFIERMTNFDKNLPNEKVLPKHSLLYEYFTVYNELTKVKYVTEGMRKPAFLSGEQKKAIVDLLFKTNRKVTVKQLKEDYFKKIECFDSVEISGVEDRFNASLGTYHDLLKIIKDKDFLDNEENEDILEDIVLTLTLFEDREMIEERLKTYAHLFDDKVMKQLKRRRYTGWGRLSRKLINGIRDKQSGKTILDFLKSDGFANRNFMQLIHDDSLTFKEDIQKAQVSGQGDSLHEHIANLAGSPAIKKGILQTVKVVDELVKVMGRHKPENIVIEMARENQTTQKGQKNSRERMKRIEEGIKELGSQILKEHPVENTQLQNEKLYLYYLQNGRDMYVDQELDINRLSDYDVDHIVPQSFLKDDSIDNKVLTRSDKARGKSDNVPSEEVVKKMKNYWRQLLNAKLITQRKFDNLTKAERGGLSELDKAGFIKRQLVETRQITKHVAQILDSRMNTKYDENDKLIREVKVITLKSKLVSDFRKDFQFYKVREINNYHHAHDAYLNAVVGTALIKKYPKLESEFVYGDYKVYDVRKMIAKSEQEIGKATAKYFFYSNIMNFFKTEITLANGEIRKRPLIETNGETGEIVWDKGRDFATVRKVLSMPQVNIVKKTEVQTGGFSKESILPKRNSDKLIARKKDWDPKKYGGFDSPTVAYSVLVVAKVEKGKSKKLKSVKELLGITIMERSSFEKNPIDFLEAKGYKEVKKDLIIKLPKYSLFELENGRKRMLASAGELQKGNELALPSKYVNFLYLASHYEKLKGSPEDNEQKQLFVEQHKHYLDEIIEQISEFSKRVILADANLDKVLSAYNKHRDKPIREQAENIIHLFTLTNLGAPAAFKYFDTTIDRKRYTSTKEVLDATLIHQSITGLYETRIDLSQLGGDGGGGGGGSPAPGGGLEHLPPPPEVSQFPLNPERLQALTDLVSRALEAKHIEPYQGPGNNPIFPVKKPNGKWRFIHDLRATNSLTRDLASPSPGPPDLTSPPQDLPHLRTIDLTDAFFQIPLPAVFQPYFAFTLPQPNNHGPGTRYSWRVLPQGFKNSPTLFQQQLSHILAPVRKAFPNSLIIQYMDDILLASPALRELTALTDKVTNALTKEGLPMSLEKTQATPGSIHFLGQVISPDCITYETLPSIHVKSIWSLAELQSMLGELQWVSKGTPVLRSSLHQLYLALRGHRDPRDTIELTSTQVQALKTIQKALALNCRSRLVSQLPILALIILRPTGTTAVLFQTKQKWPLVWLHTPHPATSLRPWGQLLANAIITLDKYSLQHYGQICKSFHHNISNQALTYYLHTSDQSSVAILLQHSHRFHNLGAQPSGPWRSLLQVPQIFQNIDVLRPPFIISPVVIDHAPCLFSDGATSKAAFILWDKQVIHQQVLPLPSTCSAQAGELFGLLAGLQKSKPWPALNIFLDSKFLIGHLRRMAWGAFLGPSTQCDLHARLFPLLQGKTVYVHHVRSHTLLQDPISRLNEATDALMLAPLLPLAGKRTADGSEFEKRTADGSEFESPKKKAKVE

SEQ ID NO: 1530 - protein, 2004 aa, synthetic construct
MPAAKRVKLDGGDKKYSIGLDIGTNSVGWAVITDEYKVPSKKFKVLGNTDRHSIKKNLIGALLFDSGETAEATRLKRTARRRYTRRKNRICYLQEIFSNEMAKVDDSFFHRLEESFLVEEDKKHERHPIFGNIVDEVAYHEKYPTIYHLRKKLVDSTDKADLRLIYLALAHMIKFRGHFLIEGDLNPDNSDVDKLFIQLVQTYNQLFEENPINASGVDAKAILSARLSKSRRLENLIAQLPGEKKNGLFGNLIALSLGLTPNFKSNFDLAEDAKLQLSKDTYDDDLDNLLAQIGDQYADLFLAAKNLSDAILLSDILRVNTEITKAPLSASMIKRYDEHHQDLTLLKALVRQQLPEKYKEIFFDQSKNGYAGYIDGGASQEEFYKFIKPILEKMDGTEELLVKLNREDLLRKQRTFDNGSIPHQIHLGELHAILRRQEDFYPFLKDNREKIEKILTFRIPYYVGPLARGNSRFAWMTRKSEETITPWNFEEVVDKGASAQSFIERMTNFDKNLPNEKVLPKHSLLYEYFTVYNELTKVKYVTEGMRKPAFLSGEQKKAIVDLLFKTNRKVTVKQLKEDYFKKIECFDSVEISGVEDRFNASLGTYHDLLKIIKDKDFLDNEENEDILEDIVLTLTLFEDREMIEERLKTYAHLFDDKVMKQLKRRRYTGWGRLSRKLINGIRDKQSGKTILDFLKSDGFANRNFMQLIHDDSLTFKEDIQKAQVSGQGDSLHEHIANLAGSPAIKKGILQTVKVVDELVKVMGRHKPENIVIEMARENQTTQKGQKNSRERMKRIEEGIKELGSQILKEHPVENTQLQNEKLYLYYLQNGRDMYVDQELDINRLSDYDVDHIVPQSFLKDDSIDNKVLTRSDKARGKSDNVPSEEVVKKMKNYWRQLLNAKLITQRKFDNLTKAERGGLSELDKAGFIKRQLVETRQITKHVAQILDSRMNTKYDENDKLIREVKVITLKSKLVSDFRKDFQFYKVREINNYHHAHDAYLNAVVGTALIKKYPKLESEFVYGDYKVYDVRKMIAKSEQEIGKATAKYFFYSNIMNFFKTEITLANGEIRKRPLIETNGETGEIVWDKGRDFATVRKVLSMPQVNIVKKTEVQTGGFSKESILPKRNSDKLIARKKDWDPKKYGGFDSPTVAYSVLVVAKVEKGKSKKLKSVKELLGITIMERSSFEKNPIDFLEAKGYKEVKKDLIIKLPKYSLFELENGRKRMLASAGELQKGNELALPSKYVNFLYLASHYEKLKGSPEDNEQKQLFVEQHKHYLDEIIEQISEFSKRVILADANLDKVLSAYNKHRDKPIREQAENIIHLFTLTNLGAPAAFKYFDTTIDRKRYTSTKEVLDATLIHQSITGLYETRIDLSQLGGDGGGGGPAPGGHLPPPPQVDQFPLNLPERLQALNDLVSKALEAGHIEPYSGPGNNPVFPVKKPNGKWRFIHDLRATNAITTTLTSPSPGPPDLTSLPTALPHLQTIDLTDAFFQIPLPKQYQPYFAFTIPQPCNYGPGTRYAWTVLPQGFKNSPTLFQQQLAAVLNPMRKMFPTSTIVQYMDDILLASPTNEELQQLSQLTLQALTTHGLPISQEKTQQTPGQIRFLGQVISPNHITYESTPTIPIKSQWTLTELQVILGEIQWVSKGTPILRKHLQSLYSALHPYRDPRACITLTPQQLHALHAIQQALQHNCRGRLNPALPLLGLISLSTSGTTSVIFQPKQNWPLAWLHTPHPPTSLCPWGHLLACTILTLDKYTLQHYGQLCQSFHHNMSKQALCDFLRNSPHPSVGILIHHMGRFHNLGSQPSGPWKTLLHLPTLLQEPRLLRPIFTLSPVVLDTAPCLFSDGSPQKAAYVLWDQTILQQDITPLPSHETHSAQKGELLALICGLRAAKPWPSLNIFLDSKYLIKYLHSLAIGAFLGTSAHQTLQAALPPLLQGKTIYLHHVRSHTNLPDPISTFNEYTDSLILAPLVPLAGKRTADGSEFEKRTADGSEFESPKKKAKVE

SEQ ID NO: 1531 - protein, 2009 aa, synthetic construct
MPAAKRVKLDGGDKKYSIGLDIGTNSVGWAVITDEYKVPSKKFKVLGNTDRHSIKKNLIGALLFDSGETAEATRLKRTARRRYTRRKNRICYLQEIFSNEMAKVDDSFFHRLEESFLVEEDKKHERHPIFGNIVDEVAYHEKYPTIYHLRKKLVDSTDKADLRLIYLALAHMIKFRGHFLIEGDLNPDNSDVDKLFIQLVQTYNQLFEENPINASGVDAKAILSARLSKSRRLENLIAQLPGEKKNGLFGNLIALSLGLTPNFKSNFDLAEDAKLQLSKDTYDDDLDNLLAQIGDQYADLFLAAKNLSDAILLSDILRVNTEITKAPLSASMIKRYDEHHQDLTLLKALVRQQLPEKYKEIFFDQSKNGYAGYIDGGASQEEFYKFIKPILEKMDGTEELLVKLNREDLLRKQRTFDNGSIPHQIHLGELHAILRRQEDFYPFLKDNREKIEKILTFRIPYYVGPLARGNSRFAWMTRKSEETITPWNFEEVVDKGASAQSFIERMTNFDKNLPNEKVLPKHSLLYEYFTVYNELTKVKYVTEGMRKPAFLSGEQKKAIVDLLFKTNRKVTVKQLKEDYFKKIECFDSVEISGVEDRFNASLGTYHDLLKIIKDKDFLDNEENEDILEDIVLTLTLFEDREMIEERLKTYAHLFDDKVMKQLKRRRYTGWGRLSRKLINGIRDKQSGKTILDFLKSDGFANRNFMQLIHDDSLTFKEDIQKAQVSGQGDSLHEHIANLAGSPAIKKGILQTVKVVDELVKVMGRHKPENIVIEMARENQTTQKGQKNSRERMKRIEEGIKELGSQILKEHPVENTQLQNEKLYLYYLQNGRDMYVDQELDINRLSDYDVDHIVPQSFLKDDSIDNKVLTRSDKARGKSDNVPSEEVVKKMKNYWRQLLNAKLITQRKFDNLTKAERGGLSELDKAGFIKRQLVETRQITKHVAQILDSRMNTKYDENDKLIREVKVITLKSKLVSDFRKDFQFYKVREINNYHHAHDAYLNAVVGTALIKKYPKLESEFVYGDYKVYDVRKMIAKSEQEIGKATAKYFFYSNIMNFFKTEITLANGEIRKRPLIETNGETGEIVWDKGRDFATVRKVLSMPQVNIVKKTEVQTGGFSKESILPKRNSDKLIARKKDWDPKKYGGFDSPTVAYSVLVVAKVEKGKSKKLKSVKELLGITIMERSSFEKNPIDFLEAKGYKEVKKDLIIKLPKYSLFELENGRKRMLASAGELQKGNELALPSKYVNFLYLASHYEKLKGSPEDNEQKQLFVEQHKHYLDEIIEQISEFSKRVILADANLDKVLSAYNKHRDKPIREQAENIIHLFTLTNLGAPAAFKYFDTTIDRKRYTSTKEVLDATLIHQSITGLYETRIDLSQLGGDGGEAAAKGSSGGGGGHLPPPPQVDQFPLNLPERLQALNDLVSKALEAGHIEPYSGPGNNPVFPVKKPNGKWRFIHDLRATNAITTTLTSPSPGPPDLTSLPTALPHLQTIDLTDAFFQIPLPKQYQPYFAFTIPQPCNYGPGTRYAWTVLPQGFKNSPTLFQQQLAAVLNPMRKMFPTSTIVQYMDDILLASPTNEELQQLSQLTLQALTTHGLPISQEKTQQTPGQIRFLGQVISPNHITYESTPTIPIKSQWTLTELQVILGEIQWVSKGTPILRKHLQSLYSALHPYRDPRACITLTPQQLHALHAIQQALQHNCRGRLNPALPLLGLISLSTSGTTSVIFQPKQNWPLAWLHTPHPPTSLCPWGHLLACTILTLDKYTLQHYGQLCQSFHHNMSKQALCDFLRNSPHPSVGILIHHMGRFHNLGSQPSGPWKTLLHLPTLLQEPRLLRPIFTLSPVVLDTAPCLFSDGSPQKAAYVLWDQTILQQDITPLPSHETHSAQKGELLALICGLRAAKPWPSLNIFLDSKYLIKYLHSLAIGAFLGTSAHQTLQAALPPLLQGKTIYLHHVRSHTNLPDPISTFNEYTDSLILAPLVPLAGKRTADGSEFEKRTADGSEFESPKKKAKVE

SEQ ID NO: 1532 - protein, 2009 aa, synthetic construct
MPAAKRVKLDGGDKKYSIGLDIGTNSVGWAVITDEYKVPSKKFKVLGNTDRHSIKKNLIGALLFDSGETAEATRLKRTARRRYTRRKNRICYLQEIFSNEMAKVDDSFFHRLEESFLVEEDKKHERHPIFGNIVDEVAYHEKYPTIYHLRKKLVDSTDKADLRLIYLALAHMIKFRGHFLIEGDLNPDNSDVDKLFIQLVQTYNQLFEENPINASGVDAKAILSARLSKSRRLENLIAQLPGEKKNGLFGNLIALSLGLTPNFKSNFDLAEDAKLQLSKDTYDDDLDNLLAQIGDQYADLFLAAKNLSDAILLSDILRVNTEITKAPLSASMIKRYDEHHQDLTLLKALVRQQLPEKYKEIFFDQSKNGYAGYIDGGASQEEFYKFIKPILEKMDGTEELLVKLNREDLLRKQRTFDNGSIPHQIHLGELHAILRRQEDFYPFLKDNREKIEKILTFRIPYYVGPLARGNSRFAWMTRKSEETITPWNFEEVVDKGASAQSFIERMTNFDKNLPNEKVLPKHSLLYEYFTVYNELTKVKYVTEGMRKPAFLSGEQKKAIVDLLFKTNRKVTVKQLKEDYFKKIECFDSVEISGVEDRFNASLGTYHDLLKIIKDKDFLDNEENEDILEDIVLTLTLFEDREMIEERLKTYAHLFDDKVMKQLKRRRYTGWGRLSRKLINGIRDKQSGKTILDFLKSDGFANRNFMQLIHDDSLTFKEDIQKAQVSGQGDSLHEHIANLAGSPAIKKGILQTVKVVDELVKVMGRHKPENIVIEMARENQTTQKGQKNSRERMKRIEEGIKELGSQILKEHPVENTQLQNEKLYLYYLQNGRDMYVDQELDINRLSDYDVDHIVPQSFLKDDSIDNKVLTRSDKARGKSDNVPSEEVVKKMKNYWRQLLNAKLITQRKFDNLTKAERGGLSELDKAGFIKRQLVETRQITKHVAQILDSRMNTKYDENDKLIREVKVITLKSKLVSDFRKDFQFYKVREINNYHHAHDAYLNAVVGTALIKKYPKLESEFVYGDYKVYDVRKMIAKSEQEIGKATAKYFFYSNIMNFFKTEITLANGEIRKRPLIETNGETGEIVWDKGRDFATVRKVLSMPQVNIVKKTEVQTGGFSKESILPKRNSDKLIARKKDWDPKKYGGFDSPTVAYSVLVVAKVEKGKSKKLKSVKELLGITIMERSSFEKNPIDFLEAKGYKEVKKDLIIKLPKYSLFELENGRKRMLASAGELQKGNELALPSKYVNFLYLASHYEKLKGSPEDNEQKQLFVEQHKHYLDEIIEQISEFSKRVILADANLDKVLSAYNKHRDKPIREQAENIIHLFTLTNLGAPAAFKYFDTTIDRKRYTSTKEVLDATLIHQSITGLYETRIDLSQLGGDGGEAAAKGGSPAPGGHLPPPPQVDQFPLNLPERLQALNDLVSKALEAGHIEPYSGPGNNPVFPVKKPNGKWRFIHDLRATNAITTTLTSPSPGPPDLTSLPTALPHLQTIDLTDAFFQIPLPKQYQPYFAFTIPQPCNYGPGTRYAWTVLPQGFKNSPTLFQQQLAAVLNPMRKMFPTSTIVQYMDDILLASPTNEELQQLSQLTLQALTTHGLPISQEKTQQTPGQIRFLGQVISPNHITYESTPTIPIKSQWTLTELQVILGEIQWVSKGTPILRKHLQSLYSALHPYRDPRACITLTPQQLHALHAIQQALQHNCRGRLNPALPLLGLISLSTSGTTSVIFQPKQNWPLAWLHTPHPPTSLCPWGHLLACTILTLDKYTLQHYGQLCQSFHHNMSKQALCDFLRNSPHPSVGILIHHMGRFHNLGSQPSGPWKTLLHLPTLLQEPRLLRPIFTLSPVVLDTAPCLFSDGSPQKAAYVLWDQTILQQDITPLPSHETHSAQKGELLALICGLRAAKPWPSLNIFLDSKYLIKYLHSLAIGAFLGTSAHQTLQAALPPLLQGKTIYLHHVRSHTNLPDPISTFNEYTDSLILAPLVPLAGKRTADGSEFEKRTADGSEFESPKKKAKVE

SEQ ID NO: 1533 - protein, 2031 aa, synthetic construct
MPAAKRVKLDGGDKKYSIGLDIGTNSVGWAVITDEYKVPSKKFKVLGNTDRHSIKKNLIGALLFDSGETAEATRLKRTARRRYTRRKNRICYLQEIFSNEMAKVDDSFFHRLEESFLVEEDKKHERHPIFGNIVDEVAYHEKYPTIYHLRKKLVDSTDKADLRLIYLALAHMIKFRGHFLIEGDLNPDNSDVDKLFIQLVQTYNQLFEENPINASGVDAKAILSARLSKSRRLENLIAQLPGEKKNGLFGNLIALSLGLTPNFKSNFDLAEDAKLQLSKDTYDDDLDNLLAQIGDQYADLFLAAKNLSDAILLSDILRVNTEITKAPLSASMIKRYDEHHQDLTLLKALVRQQLPEKYKEIFFDQSKNGYAGYIDGGASQEEFYKFIKPILEKMDGTEELLVKLNREDLLRKQRTFDNGSIPHQIHLGELHAILRRQEDFYPFLKDNREKIEKILTFRIPYYVGPLARGNSRFAWMTRKSEETITPWNFEEVVDKGASAQSFIERMTNFDKNLPNEKVLPKHSLLYEYFTVYNELTKVKYVTEGMRKPAFLSGEQKKAIVDLLFKTNRKVTVKQLKEDYFKKIECFDSVEISGVEDRFNASLGTYHDLLKIIKDKDFLDNEENEDILEDIVLTLTLFEDREMIEERLKTYAHLFDDKVMKQLKRRRYTGWGRLSRKLINGIRDKQSGKTILDFLKSDGFANRNFMQLIHDDSLTFKEDIQKAQVSGQGDSLHEHIANLAGSPAIKKGILQTVKVVDELVKVMGRHKPENIVIEMARENQTTQKGQKNSRERMKRIEEGIKELGSQILKEHPVENTQLQNEKLYLYYLQNGRDMYVDQELDINRLSDYDVDHIVPQSFLKDDSIDNKVLTRSDKARGKSDNVPSEEVVKKMKNYWRQLLNAKLITQRKFDNLTKAERGGLSELDKAGFIKRQLVETRQITKHVAQILDSRMNTKYDENDKLIREVKVITLKSKLVSDFRKDFQFYKVREINNYHHAHDAYLNAVVGTALIKKYPKLESEFVYGDYKVYDVRKMIAKSEQEIGKATAKYFFYSNIMNFFKTEITLANGEIRKRPLIETNGETGEIVWDKGRDFATVRKVLSMPQVNIVKKTEVQTGGFSKESILPKRNSDKLIARKKDWDPKKYGGFDSPTVAYSVLVVAKVEKGKSKKLKSVKELLGITIMERSSFEKNPIDFLEAKGYKEVKKDLIIKLPKYSLFELENGRKRMLASAGELQKGNELALPSKYVNFLYLASHYEKLKGSPEDNEQKQLFVEQHKHYLDEIIEQISEFSKRVILADANLDKVLSAYNKHRDKPIREQAENIIHLFTLTNLGAPAAFKYFDTTIDRKRYTSTKEVLDATLIHQSITGLYETRIDLSQLGGDGGSGGSSGGSSGSETPGTSESATPESSGGSSGGSSGGHLPPPPQVDQFPLNLPERLQALNDLVSKALEAGHIEPYSGPGNNPVFPVKKPNGKWRFIHDLRATNAITTTLTSPSPGPPDLTSLPTALPHLQTIDLTDAFFQIPLPKQYQPYFAFTIPQPCNYGPGTRYAWTVLPQGFKNSPTLFQQQLAAVLNPMRKMFPTSTIVQYMDDILLASPTNEELQQLSQLTLQALTTHGLPISQEKTQQTPGQIRFLGQVISPNHITYESTPTIPIKSQWTLTELQVILGEIQWVSKGTPILRKHLQSLYSALHPYRDPRACITLTPQQLHALHAIQQALQHNCRGRLNPALPLLGLISLSTSGTTSVIFQPKQNWPLAWLHTPHPPTSLCPWGHLLACTILTLDKYTLQHYGQLCQSFHHNMSKQALCDFLRNSPHPSVGILIHHMGRFHNLGSQPSGPWKTLLHLPTLLQEPRLLRPIFTLSPVVLDTAPCLFSDGSPQKAAYVLWDQTILQQDITPLPSHETHSAQKGELLALICGLRAAKPWPSLNIFLDSKYLIKYLHSLAIGAFLGTSAHQTLQAALPPLLQGKTIYLHHVRSHTNLPDPISTFNEYTDSLILAPLVPLAGKRTADGSEFEKRTADGSEFESPKKKAKVE

SEQ ID NO: 1534 - protein, 2006 aa, synthetic construct
MPAAKRVKLDGGDKKYSIGLDIGTNSVGWAVITDEYKVPSKKFKVLGNTDRHSIKKNLIGALLFDSGETAEATRLKRTARRRYTRRKNRICYLQEIFSNEMAKVDDSFFHRLEESFLVEEDKKHERHPIFGNIVDEVAYHEKYPTIYHLRKKLVDSTDKADLRLIYLALAHMIKFRGHFLIEGDLNPDNSDVDKLFIQLVQTYNQLFEENPINASGVDAKAILSARLSKSRRLENLIAQLPGEKKNGLFGNLIALSLGLTPNFKSNFDLAEDAKLQLSKDTYDDDLDNLLAQIGDQYADLFLAAKNLSDAILLSDILRVNTEITKAPLSASMIKRYDEHHQDLTLLKALVRQQLPEKYKEIFFDQSKNGYAGYIDGGASQEEFYKFIKPILEKMDGTEELLVKLNREDLLRKQRTFDNGSIPHQIHLGELHAILRRQEDFYPFLKDNREKIEKILTFRIPYYVGPLARGNSRFAWMTRKSEETITPWNFEEVVDKGASAQSFIERMTNFDKNLPNEKVLPKHSLLYEYFTVYNELTKVKYVTEGMRKPAFLSGEQKKAIVDLLFKTNRKVTVKQLKEDYFKKIECFDSVEISGVEDRFNASLGTYHDLLKIIKDKDFLDNEENEDILEDIVLTLTLFEDREMIEERLKTYAHLFDDKVMKQLKRRRYTGWGRLSRKLINGIRDKQSGKTILDFLKSDGFANRNFMQLIHDDSLTFKEDIQKAQVSGQGDSLHEHIANLAGSPAIKKGILQTVKVVDELVKVMGRHKPENIVIEMARENQTTQKGQKNSRERMKRIEEGIKELGSQILKEHPVENTQLQNEKLYLYYLQNGRDMYVDQELDINRLSDYDVDHIVPQSFLKDDSIDNKVLTRSDKARGKSDNVPSEEVVKKMKNYWRQLLNAKLITQRKFDNLTKAERGGLSELDKAGFIKRQLVETRQITKHVAQILDSRMNTKYDENDKLIREVKVITLKSKLVSDFRKDFQFYKVREINNYHHAHDAYLNAVVGTALIKKYPKLESEFVYGDYKVYDVRKMIAKSEQEIGKATAKYFFYSNIMNFFKTEITLANGEIRKRPLIETNGETGEIVWDKGRDFATVRKVLSMPQVNIVKKTEVQTGGFSKESILPKRNSDKLIARKKDWDPKKYGGFDSPTVAYSVLVVAKVEKGKSKKLKSVKELLGITIMERSSFEKNPIDFLEAKGYKEVKKDLIIKLPKYSLFELENGRKRMLASAGELQKGNELALPSKYVNFLYLASHYEKLKGSPEDNEQKQLFVEQHKHYLDEIIEQISEFSKRVILADANLDKVLSAYNKHRDKPIREQAENIIHLFTLTNLGAPAAFKYFDTTIDRKRYTSTKEVLDATLIHQSITGLYETRIDLSQLGGDGGPAPEAAAKGGHLPPPPQVDQFPLNLPERLQALNDLVSKALEAGHIEPYSGPGNNPVFPVKKPNGKWRFIHDLRATNAITTTLTSPSPGPPDLTSLPTALPHLQTIDLTDAFFQIPLPKQYQPYFAFTIPQPCNYGPGTRYAWTVLPQGFKNSPTLFQQQLAAVLNPMRKMFPTSTIVQYMDDILLASPTNEELQQLSQLTLQALTTHGLPISQEKTQQTPGQIRFLGQVISPNHITYESTPTIPIKSQWTLTELQVILGEIQWVSKGTPILRKHLQSLYSALHPYRDPRACITLTPQQLHALHAIQQALQHNCRGRLNPALPLLGLISLSTSGTTSVIFQPKQNWPLAWLHTPHPPTSLCPWGHLLACTILTLDKYTLQHYGQLCQSFHHNMSKQALCDFLRNSPHPSVGILIHHMGRFHNLGSQPSGPWKTLLHLPTLLQEPRLLRPIFTLSPVVLDTAPCLFSDGSPQKAAYVLWDQTILQQDITPLPSHETHSAQKGELLALICGLRAAKPWPSLNIFLDSKYLIKYLHSLAIGAFLGTSAHQTLQAALPPLLQGKTIYLHHVRSHTNLPDPISTFNEYTDSLILAPLVPLAGKRTADGSEFEKRTADGSEFESPKKKAKVE

SEQ ID NO: 1535 - protein, 2007 aa, synthetic construct
MPAAKRVKLDGGDKKYSIGLDIGTNSVGWAVITDEYKVPSKKFKVLGNTDRHSIKKNLIGALLFDSGETAEATRLKRTARRRYTRRKNRICYLQEIFSNEMAKVDDSFFHRLEESFLVEEDKKHERHPIFGNIVDEVAYHEKYPTIYHLRKKLVDSTDKADLRLIYLALAHMIKFRGHFLIEGDLNPDNSDVDKLFIQLVQTYNQLFEENPINASGVDAKAILSARLSKSRRLENLIAQLPGEKKNGLFGNLIALSLGLTPNFKSNFDLAEDAKLQLSKDTYDDDLDNLLAQIGDQYADLFLAAKNLSDAILLSDILRVNTEITKAPLSASMIKRYDEHHQDLTLLKALVRQQLPEKYKEIFFDQSKNGYAGYIDGGASQEEFYKFIKPILEKMDGTEELLVKLNREDLLRKQRTFDNGSIPHQIHLGELHAILRRQEDFYPFLKDNREKIEKILTFRIPYYVGPLARGNSRFAWMTRKSEETITPWNFEEVVDKGASAQSFIERMTNFDKNLPNEKVLPKHSLLYEYFTVYNELTKVKYVTEGMRKPAFLSGEQKKAIVDLLFKTNRKVTVKQLKEDYFKKIECFDSVEISGVEDRFNASLGTYHDLLKIIKDKDFLDNEENEDILEDIVLTLTLFEDREMIEERLKTYAHLFDDKVMKQLKRRRYTGWGRLSRKLINGIRDKQSGKTILDFLKSDGFANRNFMQLIHDDSLTFKEDIQKAQVSGQGDSLHEHIANLAGSPAIKKGILQTVKVVDELVKVMGRHKPENIVIEMARENQTTQKGQKNSRERMKRIEEGIKELGSQILKEHPVENTQLQNEKLYLYYLQNGRDMYVDQELDINRLSDYDVDHIVPQSFLKDDSIDNKVLTRSDKARGKSDNVPSEEVVKKMKNYWRQLLNAKLITQRKFDNLTKAERGGLSELDKAGFIKRQLVETRQITKHVAQILDSRMNTKYDENDKLIREVKVITLKSKLVSDFRKDFQFYKVREINNYHHAHDAYLNAVVGTALIKKYPKLESEFVYGDYKVYDVRKMIAKSEQEIGKATAKYFFYSNIMNFFKTEITLANGEIRKRPLIETNGETGEIVWDKGRDFATVRKVLSMPQVNIVKKTEVQTGGFSKESILPKRNSDKLIARKKDWDPKKYGGFDSPTVAYSVLVVAKVEKGKSKKLKSVKELLGITIMERSSFEKNPIDFLEAKGYKEVKKDLIIKLPKYSLFELENGRKRMLASAGELQKGNELALPSKYVNFLYLASHYEKLKGSPEDNEQKQLFVEQHKHYLDEIIEQISEFSKRVILADANLDKVLSAYNKHRDKPIREQAENIIHLFTLTNLGAPAAFKYFDTTIDRKRYTSTKEVLDATLIHQSITGLYETRIDLSQLGGDGGGSSGGSGGGGGHLPPPPQVDQFPLNLPERLQALNDLVSKALEAGHIEPYSGPGNNPVFPVKKPNGKWRFIHDLRATNAITTTLTSPSPGPPDLTSLPTALPHLQTIDLTDAFFQIPLPKQYQPYFAFTIPQPCNYGPGTRYAWTVLPQGFKNSPTLFQQQLAAVLNPMRKMFPTSTIVQYMDDILLASPTNEELQQLSQLTLQALTTHGLPISQEKTQQTPGQIRFLGQVISPNHITYESTPTIPIKSQWTLTELQVILGEIQWVSKGTPILRKHLQSLYSALHPYRDPRACITLTPQQLHALHAIQQALQHNCRGRLNPALPLLGLISLSTSGTTSVIFQPKQNWPLAWLHTPHPPTSLCPWGHLLACTILTLDKYTLQHYGQLCQSFHHNMSKQALCDFLRNSPHPSVGILIHHMGRFHNLGSQPSGPWKTLLHLPTLLQEPRLLRPIFTLSPVVLDTAPCLFSDGSPQKAAYVLWDQTILQQDITPLPSHETHSAQKGELLALICGLRAAKPWPSLNIFLDSKYLIKYLHSLAIGAFLGTSAHQTLQAALPPLLQGKTIYLHHVRSHTNLPDPISTFNEYTDSLILAPLVPLAGKRTADGSEFEKRTADGSEFESPKKKAKVE

SEQ ID NO: 1536 - protein, 2007 aa, synthetic construct
MPAAKRVKLDGGDKKYSIGLDIGTNSVGWAVITDEYKVPSKKFKVLGNTDRHSIKKNLIGALLFDSGETAEATRLKRTARRRYTRRKNRICYLQEIFSNEMAKVDDSFFHRLEESFLVEEDKKHERHPIFGNIVDEVAYHEKYPTIYHLRKKLVDSTDKADLRLIYLALAHMIKFRGHFLIEGDLNPDNSDVDKLFIQLVQTYNQLFEENPINASGVDAKAILSARLSKSRRLENLIAQLPGEKKNGLFGNLIALSLGLTPNFKSNFDLAEDAKLQLSKDTYDDDLDNLLAQIGDQYADLFLAAKNLSDAILLSDILRVNTEITKAPLSASMIKRYDEHHQDLTLLKALVRQQLPEKYKEIFFDQSKNGYAGYIDGGASQEEFYKFIKPILEKMDGTEELLVKLNREDLLRKQRTFDNGSIPHQIHLGELHAILRRQEDFYPFLKDNREKIEKILTFRIPYYVGPLARGNSRFAWMTRKSEETITPWNFEEVVDKGASAQSFIERMTNFDKNLPNEKVLPKHSLLYEYFTVYNELTKVKYVTEGMRKPAFLSGEQKKAIVDLLFKTNRKVTVKQLKEDYFKKIECFDSVEISGVEDRFNASLGTYHDLLKIIKDKDFLDNEENEDILEDIVLTLTLFEDREMIEERLKTYAHLFDDKVMKQLKRRRYTGWGRLSRKLINGIRDKQSGKTILDFLKSDGFANRNFMQLIHDDSLTFKEDIQKAQVSGQGDSLHEHIANLAGSPAIKKGILQTVKVVDELVKVMGRHKPENIVIEMARENQTTQKGQKNSRERMKRIEEGIKELGSQILKEHPVENTQLQNEKLYLYYLQNGRDMYVDQELDINRLSDYDVDHIVPQSFLKDDSIDNKVLTRSDKARGKSDNVPSEEVVKKMKNYWRQLLNAKLITQRKFDNLTKAERGGLSELDKAGFIKRQLVETRQITKHVAQILDSRMNTKYDENDKLIREVKVITLKSKLVSDFRKDFQFYKVREINNYHHAHDAYLNAVVGTALIKKYPKLESEFVYGDYKVYDVRKMIAKSEQEIGKATAKYFFYSNIMNFFKTEITLANGEIRKRPLIETNGETGEIVWDKGRDFATVRKVLSMPQVNIVKKTEVQTGGFSKESILPKRNSDKLIARKKDWDPKKYGGFDSPTVAYSVLVVAKVEKGKSKKLKSVKELLGITIMERSSFEKNPIDFLEAKGYKEVKKDLIIKLPKYSLFELENGRKRMLASAGELQKGNELALPSKYVNFLYLASHYEKLKGSPEDNEQKQLFVEQHKHYLDEIIEQISEFSKRVILADANLDKVLSAYNKHRDKPIREQAENIIHLFTLTNLGAPAAFKYFDTTIDRKRYTSTKEVLDATLIHQSITGLYETRIDLSQLGGDGGPAPAPAPAPGGHLPPPPQVDQFPLNLPERLQALNDLVSKALEAGHIEPYSGPGNNPVFPVKKPNGKWRFIHDLRATNAITTTLTSPSPGPPDLTSLPTALPHLQTIDLTDAFFQIPLPKQYQPYFAFTIPQPCNYGPGTRYAWTVLPQGFKNSPTLFQQQLAAVLNPMRKMFPTSTIVQYMDDILLASPTNEELQQLSQLTLQALTTHGLPISQEKTQQTPGQIRFLGQVISPNHITYESTPTIPIKSQWTLTELQVILGEIQWVSKGTPILRKHLQSLYSALHPYRDPRACITLTPQQLHALHAIQQALQHNCRGRLNPALPLLGLISLSTSGTTSVIFQPKQNWPLAWLHTPHPPTSLCPWGHLLACTILTLDKYTLQHYGQLCQSFHHNMSKQALCDFLRNSPHPSVGILIHHMGRFHNLGSQPSGPWKTLLHLPTLLQEPRLLRPIFTLSPVVLDTAPCLFSDGSPQKAAYVLWDQTILQQDITPLPSHETHSAQKGELLALICGLRAAKPWPSLNIFLDSKYLIKYLHSLAIGAFLGTSAHQTLQAALPPLLQGKTIYLHHVRSHTNLPDPISTFNEYTDSLILAPLVPLAGKRTADGSEFEKRTADGSEFESPKKKAKVE

SEQ ID NO: 1537 - protein, 2010 aa, synthetic construct
MPAAKRVKLDGGDKKYSIGLDIGTNSVGWAVITDEYKVPSKKFKVLGNTDRHSIKKNLIGALLFDSGETAEATRLKRTARRRYTRRKNRICYLQEIFSNEMAKVDDSFFHRLEESFLVEEDKKHERHPIFGNIVDEVAYHEKYPTIYHLRKKLVDSTDKADLRLIYLALAHMIKFRGHFLIEGDLNPDNSDVDKLFIQLVQTYNQLFEENPINASGVDAKAILSARLSKSRRLENLIAQLPGEKKNGLFGNLIALSLGLTPNFKSNFDLAEDAKLQLSKDTYDDDLDNLLAQIGDQYADLFLAAKNLSDAILLSDILRVNTEITKAPLSASMIKRYDEHHQDLTLLKALVRQQLPEKYKEIFFDQSKNGYAGYIDGGASQEEFYKFIKPILEKMDGTEELLVKLNREDLLRKQRTFDNGSIPHQIHLGELHAILRRQEDFYPFLKDNREKIEKILTFRIPYYVGPLARGNSRFAWMTRKSEETITPWNFEEVVDKGASAQSFIERMTNFDKNLPNEKVLPKHSLLYEYFTVYNELTKVKYVTEGMRKPAFLSGEQKKAIVDLLFKTNRKVTVKQLKEDYFKKIECFDSVEISGVEDRFNASLGTYHDLLKIIKDKDFLDNEENEDILEDIVLTLTLFEDREMIEERLKTYAHLFDDKVMKQLKRRRYTGWGRLSRKLINGIRDKQSGKTILDFLKSDGFANRNFMQLIHDDSLTFKEDIQKAQVSGQGDSLHEHIANLAGSPAIKKGILQTVKVVDELVKVMGRHKPENIVIEMARENQTTQKGQKNSRERMKRIEEGIKELGSQILKEHPVENTQLQNEKLYLYYLQNGRDMYVDQELDINRLSDYDVDHIVPQSFLKDDSIDNKVLTRSDKARGKSDNVPSEEVVKKMKNYWRQLLNAKLITQRKFDNLTKAERGGLSELDKAGFIKRQLVETRQITKHVAQILDSRMNTKYDENDKLIREVKVITLKSKLVSDFRKDFQFYKVREINNYHHAHDAYLNAVVGTALIKKYPKLESEFVYGDYKVYDVRKMIAKSEQEIGKATAKYFFYSNIMNFFKTEITLANGEIRKRPLIETNGETGEIVWDKGRDFATVRKVLSMPQVNIVKKTEVQTGGFSKESILPKRNSDKLIARKKDWDPKKYGGFDSPTVAYSVLVVAKVEKGKSKKLKSVKELLGITIMERSSFEKNPIDFLEAKGYKEVKKDLIIKLPKYSLFELENGRKRMLASAGELQKGNELALPSKYVNFLYLASHYEKLKGSPEDNEQKQLFVEQHKHYLDEIIEQISEFSKRVILADANLDKVLSAYNKHRDKPIREQAENIIHLFTLTNLGAPAAFKYFDTTIDRKRYTSTKEVLDATLIHQSITGLYETRIDLSQLGGDGGEAAAKEAAAKEAAAKGGPLGTSDSPVTHADPIDWKSEEPVWVDQWPLTQEKLSAAQQLVQEQLRLGHIEPSTSAWNSPIFVIKKKSGKWRLLQDLRKVNETMMHMGALQPGLPTPSAIPDKSYIIVIDLKDCFYTIPLAPQDCKRFAFSLPSVNFKEPMQRYQWRVLPQGMTNSPTLCQKFVATAIAPVRQRFPQLYLVHYMDDILLAHTDEHLLYQAFSILKQHLSLNGLVIADEKIQTHFPYNYLGFSLYPRVYNTQLVKLQTDHLKTLNDFQKLLGDINWIRPYLKLPTYTLQPLFDILKGDSDPASPRTLSLEGRTALQSIEEAIRQQQITYCDYQRSWGLYILPTPRAPTGVLYQDKPLRWIYLSATPTKHLLPYYELVAKIIAKGRHEAIQYFGMEPPFICVPYALEQQDWLFQFSDNWSIAFANYPGQITHHYPSDKLLQFASSHAFIFPKIVRRQPIPEATLIFTDGSSNGTAALIINHQTYYAQTSFSSAQVVELFAVHQALLTVPTSFNLFTDSSYVVGALQMIETVPIIGTTSPEVLNLFTLIQQVLHCRQHPCFFGHIRAHSTLPGALVQGNHTADVLTKQVFFQSAGKRTADGSEFEKRTADGSEFESPKKKAKVE

SEQ ID NO: 1538 - protein, 2001 aa, synthetic construct
MPAAKRVKLDGGDKKYSIGLDIGTNSVGWAVITDEYKVPSKKFKVLGNTDRHSIKKNLIGALLFDSGETAEATRLKRTARRRYTRRKNRICYLQEIFSNEMAKVDDSFFHRLEESFLVEEDKKHERHPIFGNIVDEVAYHEKYPTIYHLRKKLVDSTDKADLRLIYLALAHMIKFRGHFLIEGDLNPDNSDVDKLFIQLVQTYNQLFEENPINASGVDAKAILSARLSKSRRLENLIAQLPGEKKNGLFGNLIALSLGLTPNFKSNFDLAEDAKLQLSKDTYDDDLDNLLAQIGDQYADLFLAAKNLSDAILLSDILRVNTEITKAPLSASMIKRYDEHHQDLTLLKALVRQQLPEKYKEIFFDQSKNGYAGYIDGGASQEEFYKFIKPILEKMDGTEELLVKLNREDLLRKQRTFDNGSIPHQIHLGELHAILRRQEDFYPFLKDNREKIEKILTFRIPYYVGPLARGNSRFAWMTRKSEETITPWNFEEVVDKGASAQSFIERMTNFDKNLPNEKVLPKHSLLYEYFTVYNELTKVKYVTEGMRKPAFLSGEQKKAIVDLLFKTNRKVTVKQLKEDYFKKIECFDSVEISGVEDRFNASLGTYHDLLKIIKDKDFLDNEENEDILEDIVLTLTLFEDREMIEERLKTYAHLFDDKVMKQLKRRRYTGWGRLSRKLINGIRDKQSGKTILDFLKSDGFANRNFMQLIHDDSLTFKEDIQKAQVSGQGDSLHEHIANLAGSPAIKKGILQTVKVVDELVKVMGRHKPENIVIEMARENQTTQKGQKNSRERMKRIEEGIKELGSQILKEHPVENTQLQNEKLYLYYLQNGRDMYVDQELDINRLSDYDVDHIVPQSFLKDDSIDNKVLTRSDKARGKSDNVPSEEVVKKMKNYWRQLLNAKLITQRKFDNLTKAERGGLSELDKAGFIKRQLVETRQITKHVAQILDSRMNTKYDENDKLIREVKVITLKSKLVSDFRKDFQFYKVREINNYHHAHDAYLNAVVGTALIKKYPKLESEFVYGDYKVYDVRKMIAKSEQEIGKATAKYFFYSNIMNFFKTEITLANGEIRKRPLIETNGETGEIVWDKGRDFATVRKVLSMPQVNIVKKTEVQTGGFSKESILPKRNSDKLIARKKDWDPKKYGGFDSPTVAYSVLVVAKVEKGKSKKLKSVKELLGITIMERSSFEKNPIDFLEAKGYKEVKKDLIIKLPKYSLFELENGRKRMLASAGELQKGNELALPSKYVNFLYLASHYEKLKGSPEDNEQKQLFVEQHKHYLDEIIEQISEFSKRVILADANLDKVLSAYNKHRDKPIREQAENIIHLFTLTNLGAPAAFKYFDTTIDRKRYTSTKEVLDATLIHQSITGLYETRIDLSQLGGDGGGSSGGGGGPLGTSDSPVTHADPIDWKSEEPVWVDQWPLTQEKLSAAQQLVQEQLRLGHIEPSTSAWNSPIFVIKKKSGKWRLLQDLRKVNETMMHMGALQPGLPTPSAIPDKSYIIVIDLKDCFYTIPLAPQDCKRFAFSLPSVNFKEPMQRYQWRVLPQGMTNSPTLCQKFVATAIAPVRQRFPQLYLVHYMDDILLAHTDEHLLYQAFSILKQHLSLNGLVIADEKIQTHFPYNYLGFSLYPRVYNTQLVKLQTDHLKTLNDFQKLLGDINWIRPYLKLPTYTLQPLFDILKGDSDPASPRTLSLEGRTALQSIEEAIRQQQITYCDYQRSWGLYILPTPRAPTGVLYQDKPLRWIYLSATPTKHLLPYYELVAKIIAKGRHEAIQYFGMEPPFICVPYALEQQDWLFQFSDNWSIAFANYPGQITHHYPSDKLLQFASSHAFIFPKIVRRQPIPEATLIFTDGSSNGTAALIINHQTYYAQTSFSSAQVVELFAVHQALLTVPTSFNLFTDSSYVVGALQMIETVPIIGTTSPEVLNLFTLIQQVLHCRQHPCFFGHIRAHSTLPGALVQGNHTADVLTKQVFFQSAGKRTADGSEFEKRTADGSEFESPKKKAKVE

SEQ ID NO: 1539 - protein, 2106 aa, synthetic construct
MPAAKRVKLDGGDKKYSIGLDIGTNSVGWAVITDEYKVPSKKFKVLGNTDRHSIKKNLIGALLFDSGETAEATRLKRTARRRYTRRKNRICYLQEIFSNEMAKVDDSFFHRLEESFLVEEDKKHERHPIFGNIVDEVAYHEKYPTIYHLRKKLVDSTDKADLRLIYLALAHMIKFRGHFLIEGDLNPDNSDVDKLFIQLVQTYNQLFEENPINASGVDAKAILSARLSKSRRLENLIAQLPGEKKNGLFGNLIALSLGLTPNFKSNFDLAEDAKLQLSKDTYDDDLDNLLAQIGDQYADLFLAAKNLSDAILLSDILRVNTEITKAPLSASMIKRYDEHHQDLTLLKALVRQQLPEKYKEIFFDQSKNGYAGYIDGGASQEEFYKFIKPILEKMDGTEELLVKLNREDLLRKQRTFDNGSIPHQIHLGELHAILRRQEDFYPFLKDNREKIEKILTFRIPYYVGPLARGNSRFAWMTRKSEETITPWNFEEVVDKGASAQSFIERMTNFDKNLPNEKVLPKHSLLYEYFTVYNELTKVKYVTEGMRKPAFLSGEQKKAIVDLLFKTNRKVTVKQLKEDYFKKIECFDSVEISGVEDRFNASLGTYHDLLKIIKDKDFLDNEENEDILEDIVLTLTLFEDREMIEERLKTYAHLFDDKVMKQLKRRRYTGWGRLSRKLINGIRDKQSGKTILDFLKSDGFANRNFMQLIHDDSLTFKEDIQKAQVSGQGDSLHEHIANLAGSPAIKKGILQTVKVVDELVKVMGRHKPENIVIEMARENQTTQKGQKNSRERMKRIEEGIKELGSQILKEHPVENTQLQNEKLYLYYLQNGRDMYVDQELDINRLSDYDVDHIVPQSFLKDDSIDNKVLTRSDKARGKSDNVPSEEVVKKMKNYWRQLLNAKLITQRKFDNLTKAERGGLSELDKAGFIKRQLVETRQITKHVAQILDSRMNTKYDENDKLIREVKVITLKSKLVSDFRKDFQFYKVREINNYHHAHDAYLNAVVGTALIKKYPKLESEFVYGDYKVYDVRKMIAKSEQEIGKATAKYFFYSNIMNFFKTEITLANGEIRKRPLIETNGETGEIVWDKGRDFATVRKVLSMPQVNIVKKTEVQTGGFSKESILPKRNSDKLIARKKDWDPKKYGGFDSPTVAYSVLVVAKVEKGKSKKLKSVKELLGITIMERSSFEKNPIDFLEAKGYKEVKKDLIIKLPKYSLFELENGRKRMLASAGELQKGNELALPSKYVNFLYLASHYEKLKGSPEDNEQKQLFVEQHKHYLDEIIEQISEFSKRVILADANLDKVLSAYNKHRDKPIREQAENIIHLFTLTNLGAPAAFKYFDTTIDRKRYTSTKEVLDATLIHQSITGLYETRIDLSQLGGDGGEAAAKGGGGSEAAAKGGTVSLQDEHRLFDIPVTTSLPDVWLQDFPQAWAETGGLGRAKCQAPIIIDLKPTAVPVSIKQYPMSLEAHMGIRQHIIKFLELGVLRPCRSPWNTPLLPVKKPGTQDYRPVQDLREINKRTVDIHPTVPNPYNLLSTLKPDYSWYTVLDLKDAFFCLPLAPQSQELFAFEWKDPERGISGQLTWTRLPQGFKNSPTLFNEALHRDLTDFRTQHPEVTLLQYVDDLLLAAPTKKACTQGTRHLLQELGEKGYRASAKKAQICQTKVTYLGYILSEGKRWLTPGRIETVARIPPPRNPREVREFLGTAGFCRLWIPGFAELAAPLYALTKPSTPFTWQTEHQLAFEALKKALLSAPALGLPDTSKPFTLFLDERQGIAKGVLTQKLGPWKRPVAYLSKKLDPVAAGWPPCLRIMAATAMLVKDSAKLTLGQPLTVITPHTLEAIVRQPPDRWITNARLTHYQALLLDTDRVQFGPPVTLNPATLLPVPENQPSPHDCRQVLAETHGTREDLKDQELPDADHTWYTDGSSYLDSGTRRAGAAVVDGHNTIWAQSLPPGTSAQKAELIALTKALELSKGKKANIYTDSRYAFATAHTHGSIYERRGWLTSEGKEIKNKAEIIALLKALFLPQEVAIIHCPGHQKGQDPVAVGNRQADRVARQAAMAEVLTLATEPDNTSHITAGKRTADGSEFEKRTADGSEFESPKKKAKVE

SEQ ID NO: 1540 - protein, 2102 aa, synthetic construct
MPAAKRVKLDGGDKKYSIGLDIGTNSVGWAVITDEYKVPSKKFKVLGNTDRHSIKKNLIGALLFDSGETAEATRLKRTARRRYTRRKNRICYLQEIFSNEMAKVDDSFFHRLEESFLVEEDKKHERHPIFGNIVDEVAYHEKYPTIYHLRKKLVDSTDKADLRLIYLALAHMIKFRGHFLIEGDLNPDNSDVDKLFIQLVQTYNQLFEENPINASGVDAKAILSARLSKSRRLENLIAQLPGEKKNGLFGNLIALSLGLTPNFKSNFDLAEDAKLQLSKDTYDDDLDNLLAQIGDQYADLFLAAKNLSDAILLSDILRVNTEITKAPLSASMIKRYDEHHQDLTLLKALVRQQLPEKYKEIFFDQSKNGYAGYIDGGASQEEFYKFIKPILEKMDGTEELLVKLNREDLLRKQRTFDNGSIPHQIHLGELHAILRRQEDFYPFLKDNREKIEKILTFRIPYYVGPLARGNSRFAWMTRKSEETITPWNFEEVVDKGASAQSFIERMTNFDKNLPNEKVLPKHSLLYEYFTVYNELTKVKYVTEGMRKPAFLSGEQKKAIVDLLFKTNRKVTVKQLKEDYFKKIECFDSVEISGVEDRFNASLGTYHDLLKIIKDKDFLDNEENEDILEDIVLTLTLFEDREMIEERLKTYAHLFDDKVMKQLKRRRYTGWGRLSRKLINGIRDKQSGKTILDFLKSDGFANRNFMQLIHDDSLTFKEDIQKAQVSGQGDSLHEHIANLAGSPAIKKGILQTVKVVDELVKVMGRHKPENIVIEMARENQTTQKGQKNSRERMKRIEEGIKELGSQILKEHPVENTQLQNEKLYLYYLQNGRDMYVDQELDINRLSDYDVDHIVPQSFLKDDSIDNKVLTRSDKARGKSDNVPSEEVVKKMKNYWRQLLNAKLITQRKFDNLTKAERGGLSELDKAGFIKRQLVETRQITKHVAQILDSRMNTKYDENDKLIREVKVITLKSKLVSDFRKDFQFYKVREINNYHHAHDAYLNAVVGTALIKKYPKLESEFVYGDYKVYDVRKMIAKSEQEIGKATAKYFFYSNIMNFFKTEITLANGEIRKRPLIETNGETGEIVWDKGRDFATVRKVLSMPQVNIVKKTEVQTGGFSKESILPKRNSDKLIARKKDWDPKKYGGFDSPTVAYSVLVVAKVEKGKSKKLKSVKELLGITIMERSSFEKNPIDFLEAKGYKEVKKDLIIKLPKYSLFELENGRKRMLASAGELQKGNELALPSKYVNFLYLASHYEKLKGSPEDNEQKQLFVEQHKHYLDEIIEQISEFSKRVILADANLDKVLSAYNKHRDKPIREQAENIIHLFTLTNLGAPAAFKYFDTTIDRKRYTSTKEVLDATLIHQSITGLYETRIDLSQLGGDGGGGGGSSEAAAKGGTVSLQDEHRLFDIPVTTSLPDVWLQDFPQAWAETGGLGRAKCQAPIIIDLKPTAVPVSIKQYPMSLEAHMGIRQHIIKFLELGVLRPCRSPWNTPLLPVKKPGTQDYRPVQDLREINKRTVDIHPTVPNPYNLLSTLKPDYSWYTVLDLKDAFFCLPLAPQSQELFAFEWKDPERGISGQLTWTRLPQGFKNSPTLFNEALHRDLTDFRTQHPEVTLLQYVDDLLLAAPTKKACTQGTRHLLQELGEKGYRASAKKAQICQTKVTYLGYILSEGKRWLTPGRIETVARIPPPRNPREVREFLGTAGFCRLWIPGFAELAAPLYALTKPSTPFTWQTEHQLAFEALKKALLSAPALGLPDTSKPFTLFLDERQGIAKGVLTQKLGPWKRPVAYLSKKLDPVAAGWPPCLRIMAATAMLVKDSAKLTLGQPLTVITPHTLEAIVRQPPDRWITNARLTHYQALLLDTDRVQFGPPVTLNPATLLPVPENQPSPHDCRQVLAETHGTREDLKDQELPDADHTWYTDGSSYLDSGTRRAGAAVVDGHNTIWAQSLPPGTSAQKAELIALTKALELSKGKKANIYTDSRYAFATAHTHGSIYERRGWLTSEGKEIKNKAEIIALLKALFLPQEVAIIHCPGHQKGQDPVAVGNRQADRVARQAAMAEVLTLATEPDNTSHITAGKRTADGSEFEKRTADGSEFESPKKKAKVE

SEQ ID NO: 1541 - protein, 2094 aa, synthetic construct
MPAAKRVKLDGGDKKYSIGLDIGTNSVGWAVITDEYKVPSKKFKVLGNTDRHSIKKNLIGALLFDSGETAEATRLKRTARRRYTRRKNRICYLQEIFSNEMAKVDDSFFHRLEESFLVEEDKKHERHPIFGNIVDEVAYHEKYPTIYHLRKKLVDSTDKADLRLIYLALAHMIKFRGHFLIEGDLNPDNSDVDKLFIQLVQTYNQLFEENPINASGVDAKAILSARLSKSRRLENLIAQLPGEKKNGLFGNLIALSLGLTPNFKSNFDLAEDAKLQLSKDTYDDDLDNLLAQIGDQYADLFLAAKNLSDAILLSDILRVNTEITKAPLSASMIKRYDEHHQDLTLLKALVRQQLPEKYKEIFFDQSKNGYAGYIDGGASQEEFYKFIKPILEKMDGTEELLVKLNREDLLRKQRTFDNGSIPHQIHLGELHAILRRQEDFYPFLKDNREKIEKILTFRIPYYVGPLARGNSRFAWMTRKSEETITPWNFEEVVDKGASAQSFIERMTNFDKNLPNEKVLPKHSLLYEYFTVYNELTKVKYVTEGMRKPAFLSGEQKKAIVDLLFKTNRKVTVKQLKEDYFKKIECFDSVEISGVEDRFNASLGTYHDLLKIIKDKDFLDNEENEDILEDIVLTLTLFEDREMIEERLKTYAHLFDDKVMKQLKRRRYTGWGRLSRKLINGIRDKQSGKTILDFLKSDGFANRNFMQLIHDDSLTFKEDIQKAQVSGQGDSLHEHIANLAGSPAIKKGILQTVKVVDELVKVMGRHKPENIVIEMARENQTTQKGQKNSRERMKRIEEGIKELGSQILKEHPVENTQLQNEKLYLYYLQNGRDMYVDQELDINRLSDYDVDHIVPQSFLKDDSIDNKVLTRSDKARGKSDNVPSEEVVKKMKNYWRQLLNAKLITQRKFDNLTKAERGGLSELDKAGFIKRQLVETRQITKHVAQILDSRMNTKYDENDKLIREVKVITLKSKLVSDFRKDFQFYKVREINNYHHAHDAYLNAVVGTALIKKYPKLESEFVYGDYKVYDVRKMIAKSEQEIGKATAKYFFYSNIMNFFKTEITLANGEIRKRPLIETNGETGEIVWDKGRDFATVRKVLSMPQVNIVKKTEVQTGGFSKESILPKRNSDKLIARKKDWDPKKYGGFDSPTVAYSVLVVAKVEKGKSKKLKSVKELLGITIMERSSFEKNPIDFLEAKGYKEVKKDLIIKLPKYSLFELENGRKRMLASAGELQKGNELALPSKYVNFLYLASHYEKLKGSPEDNEQKQLFVEQHKHYLDEIIEQISEFSKRVILADANLDKVLSAYNKHRDKPIREQAENIIHLFTLTNLGAPAAFKYFDTTIDRKRYTSTKEVLDATLIHQSITGLYETRIDLSQLGGDGGGGSGGTVSLQDEHRLFDIPVTTSLPDVWLQDFPQAWAETGGLGRAKCQAPIIIDLKPTAVPVSIKQYPMSLEAHMGIRQHIIKFLELGVLRPCRSPWNTPLLPVKKPGTQDYRPVQDLREINKRTVDIHPTVPNPYNLLSTLKPDYSWYTVLDLKDAFFCLPLAPQSQELFAFEWKDPERGISGQLTWTRLPQGFKNSPTLFNEALHRDLTDFRTQHPEVTLLQYVDDLLLAAPTKKACTQGTRHLLQELGEKGYRASAKKAQICQTKVTYLGYILSEGKRWLTPGRIETVARIPPPRNPREVREFLGTAGFCRLWIPGFAELAAPLYALTKPSTPFTWQTEHQLAFEALKKALLSAPALGLPDTSKPFTLFLDERQGIAKGVLTQKLGPWKRPVAYLSKKLDPVAAGWPPCLRIMAATAMLVKDSAKLTLGQPLTVITPHTLEAIVRQPPDRWITNARLTHYQALLLDTDRVQFGPPVTLNPATLLPVPENQPSPHDCRQVLAETHGTREDLKDQELPDADHTWYTDGSSYLDSGTRRAGAAVVDGHNTIWAQSLPPGTSAQKAELIALTKALELSKGKKANIYTDSRYAFATAHTHGSIYERRGWLTSEGKEIKNKAEIIALLKALFLPQEVAIIHCPGHQKGQDPVAVGNRQADRVARQAAMAEVLTLATEPDNTSHITAGKRTADGSEFEKRTADGSEFESPKKKAKVE

SEQ ID NO: 1542 - protein, 2137 aa, synthetic construct
MPAAKRVKLDGGDKKYSIGLDIGTNSVGWAVITDEYKVPSKKFKVLGNTDRHSIKKNLIGALLFDSGETAEATRLKRTARRRYTRRKNRICYLQEIFSNEMAKVDDSFFHRLEESFLVEEDKKHERHPIFGNIVDEVAYHEKYPTIYHLRKKLVDSTDKADLRLIYLALAHMIKFRGHFLIEGDLNPDNSDVDKLFIQLVQTYNQLFEENPINASGVDAKAILSARLSKSRRLENLIAQLPGEKKNGLFGNLIALSLGLTPNFKSNFDLAEDAKLQLSKDTYDDDLDNLLAQIGDQYADLFLAAKNLSDAILLSDILRVNTEITKAPLSASMIKRYDEHHQDLTLLKALVRQQLPEKYKEIFFDQSKNGYAGYIDGGASQEEFYKFIKPILEKMDGTEELLVKLNREDLLRKQRTFDNGSIPHQIHLGELHAILRRQEDFYPFLKDNREKIEKILTFRIPYYVGPLARGNSRFAWMTRKSEETITPWNFEEVVDKGASAQSFIERMTNFDKNLPNEKVLPKHSLLYEYFTVYNELTKVKYVTEGMRKPAFLSGEQKKAIVDLLFKTNRKVTVKQLKEDYFKKIECFDSVEISGVEDRFNASLGTYHDLLKIIKDKDFLDNEENEDILEDIVLTLTLFEDREMIEERLKTYAHLFDDKVMKQLKRRRYTGWGRLSRKLINGIRDKQSGKTILDFLKSDGFANRNFMQLIHDDSLTFKEDIQKAQVSGQGDSLHEHIANLAGSPAIKKGILQTVKVVDELVKVMGRHKPENIVIEMARENQTTQKGQKNSRERMKRIEEGIKELGSQILKEHPVENTQLQNEKLYLYYLQNGRDMYVDQELDINRLSDYDVDHIVPQSFLKDDSIDNKVLTRSDKARGKSDNVPSEEVVKKMKNYWRQLLNAKLITQRKFDNLTKAERGGLSELDKAGFIKRQLVETRQITKHVAQILDSRMNTKYDENDKLIREVKVITLKSKLVSDFRKDFQFYKVREINNYHHAHDAYLNAVVGTALIKKYPKLESEFVYGDYKVYDVRKMIAKSEQEIGKATAKYFFYSNIMNFFKTEITLANGEIRKRPLIETNGETGEIVWDKGRDFATVRKVLSMPQVNIVKKTEVQTGGFSKESILPKRNSDKLIARKKDWDPKKYGGFDSPTVAYSVLVVAKVEKGKSKKLKSVKELLGITIMERSSFEKNPIDFLEAKGYKEVKKDLIIKLPKYSLFELENGRKRMLASAGELQKGNELALPSKYVNFLYLASHYEKLKGSPEDNEQKQLFVEQHKHYLDEIIEQISEFSKRVILADANLDKVLSAYNKHRDKPIREQAENIIHLFTLTNLGAPAAFKYFDTTIDRKRYTSTKEVLDATLIHQSITGLYETRIDLSQLGGDGGAEAAAKEAAAKEAAAKEAAAKALEAEAAAKEAAAKEAAAKEAAAKAGGTVSLQDEHRLFDIPVTTSLPDVWLQDFPQAWAETGGLGRAKCQAPIIIDLKPTAVPVSIKQYPMSLEAHMGIRQHIIKFLELGVLRPCRSPWNTPLLPVKKPGTQDYRPVQDLREINKRTVDIHPTVPNPYNLLSTLKPDYSWYTVLDLKDAFFCLPLAPQSQELFAFEWKDPERGISGQLTWTRLPQGFKNSPTLFNEALHRDLTDFRTQHPEVTLLQYVDDLLLAAPTKKACTQGTRHLLQELGEKGYRASAKKAQICQTKVTYLGYILSEGKRWLTPGRIETVARIPPPRNPREVREFLGTAGFCRLWIPGFAELAAPLYALTKPSTPFTWQTEHQLAFEALKKALLSAPALGLPDTSKPFTLFLDERQGIAKGVLTQKLGPWKRPVAYLSKKLDPVAAGWPPCLRIMAATAMLVKDSAKLTLGQPLTVITPHTLEAIVRQPPDRWITNARLTHYQALLLDTDRVQFGPPVTLNPATLLPVPENQPSPHDCRQVLAETHGTREDLKDQELPDADHTWYTDGSSYLDSGTRRAGAAVVDGHNTIWAQSLPPGTSAQKAELIALTKALELSKGKKANIYTDSRYAFATAHTHGSIYERRGWLTSEGKEIKNKAEIIALLKALFLPQEVAIIHCPGHQKGQDPVAVGNRQADRVARQAAMAEVLTLATEPDNTSHITAGKRTADGSEFEKRTADGSEFESPKKKAKVE

SEQ ID NO: 1543 - protein, 2116 aa, synthetic construct
MPAAKRVKLDGGDKKYSIGLDIGTNSVGWAVITDEYKVPSKKFKVLGNTDRHSIKKNLIGALLFDSGETAEATRLKRTARRRYTRRKNRICYLQEIFSNEMAKVDDSFFHRLEESFLVEEDKKHERHPIFGNIVDEVAYHEKYPTIYHLRKKLVDSTDKADLRLIYLALAHMIKFRGHFLIEGDLNPDNSDVDKLFIQLVQTYNQLFEENPINASGVDAKAILSARLSKSRRLENLIAQLPGEKKNGLFGNLIALSLGLTPNFKSNFDLAEDAKLQLSKDTYDDDLDNLLAQIGDQYADLFLAAKNLSDAILLSDILRVNTEITKAPLSASMIKRYDEHHQDLTLLKALVRQQLPEKYKEIFFDQSKNGYAGYIDGGASQEEFYKFIKPILEKMDGTEELLVKLNREDLLRKQRTFDNGSIPHQIHLGELHAILRRQEDFYPFLKDNREKIEKILTFRIPYYVGPLARGNSRFAWMTRKSEETITPWNFEEVVDKGASAQSFIERMTNFDKNLPNEKVLPKHSLLYEYFTVYNELTKVKYVTEGMRKPAFLSGEQKKAIVDLLFKTNRKVTVKQLKEDYFKKIECFDSVEISGVEDRFNASLGTYHDLLKIIKDKDFLDNEENEDILEDIVLTLTLFEDREMIEERLKTYAHLFDDKVMKQLKRRRYTGWGRLSRKLINGIRDKQSGKTILDFLKSDGFANRNFMQLIHDDSLTFKEDIQKAQVSGQGDSLHEHIANLAGSPAIKKGILQTVKVVDELVKVMGRHKPENIVIEMARENQTTQKGQKNSRERMKRIEEGIKELGSQILKEHPVENTQLQNEKLYLYYLQNGRDMYVDQELDINRLSDYDVDHIVPQSFLKDDSIDNKVLTRSDKARGKSDNVPSEEVVKKMKNYWRQLLNAKLITQRKFDNLTKAERGGLSELDKAGFIKRQLVETRQITKHVAQILDSRMNTKYDENDKLIREVKVITLKSKLVSDFRKDFQFYKVREINNYHHAHDAYLNAVVGTALIKKYPKLESEFVYGDYKVYDVRKMIAKSEQEIGKATAKYFFYSNIMNFFKTEITLANGEIRKRPLIETNGETGEIVWDKGRDFATVRKVLSMPQVNIVKKTEVQTGGFSKESILPKRNSDKLIARKKDWDPKKYGGFDSPTVAYSVLVVAKVEKGKSKKLKSVKELLGITIMERSSFEKNPIDFLEAKGYKEVKKDLIIKLPKYSLFELENGRKRMLASAGELQKGNELALPSKYVNFLYLASHYEKLKGSPEDNEQKQLFVEQHKHYLDEIIEQISEFSKRVILADANLDKVLSAYNKHRDKPIREQAENIIHLFTLTNLGAPAAFKYFDTTIDRKRYTSTKEVLDATLIHQSITGLYETRIDLSQLGGDGGGGGGSGGGGSGGGGSGGGGSGGGGSGGTVSLQDEHRLFDIPVTTSLPDVWLQDFPQAWAETGGLGRAKCQAPIIIDLKPTAVPVSIKQYPMSLEAHMGIRQHIIKFLELGVLRPCRSPWNTPLLPVKKPGTQDYRPVQDLREINKRTVDIHPTVPNPYNLLSTLKPDYSWYTVLDLKDAFFCLPLAPQSQELFAFEWKDPERGISGQLTWTRLPQGFKNSPTLFNEALHRDLTDFRTQHPEVTLLQYVDDLLLAAPTKKACTQGTRHLLQELGEKGYRASAKKAQICQTKVTYLGYILSEGKRWLTPGRIETVARIPPPRNPREVREFLGTAGFCRLWIPGFAELAAPLYALTKPSTPFTWQTEHQLAFEALKKALLSAPALGLPDTSKPFTLFLDERQGIAKGVLTQKLGPWKRPVAYLSKKLDPVAAGWPPCLRIMAATAMLVKDSAKLTLGQPLTVITPHTLEAIVRQPPDRWITNARLTHYQALLLDTDRVQFGPPVTLNPATLLPVPENQPSPHDCRQVLAETHGTREDLKDQELPDADHTWYTDGSSYLDSGTRRAGAAVVDGHNTIWAQSLPPGTSAQKAELIALTKALELSKGKKANIYTDSRYAFATAHTHGSIYERRGWLTSEGKEIKNKAEIIALLKALFLPQEVAIIHCPGHQKGQDPVAVGNRQADRVARQAAMAEVLTLATEPDNTSHITAGKRTADGSEFEKRTADGSEFESPKKKAKVE

SEQ ID NO: 1544 - protein, 2099 aa, synthetic construct
MPAAKRVKLDGGDKKYSIGLDIGTNSVGWAVITDEYKVPSKKFKVLGNTDRHSIKKNLIGALLFDSGETAEATRLKRTARRRYTRRKNRICYLQEIFSNEMAKVDDSFFHRLEESFLVEEDKKHERHPIFGNIVDEVAYHEKYPTIYHLRKKLVDSTDKADLRLIYLALAHMIKFRGHFLIEGDLNPDNSDVDKLFIQLVQTYNQLFEENPINASGVDAKAILSARLSKSRRLENLIAQLPGEKKNGLFGNLIALSLGLTPNFKSNFDLAEDAKLQLSKDTYDDDLDNLLAQIGDQYADLFLAAKNLSDAILLSDILRVNTEITKAPLSASMIKRYDEHHQDLTLLKALVRQQLPEKYKEIFFDQSKNGYAGYIDGGASQEEFYKFIKPILEKMDGTEELLVKLNREDLLRKQRTFDNGSIPHQIHLGELHAILRRQEDFYPFLKDNREKIEKILTFRIPYYVGPLARGNSRFAWMTRKSEETITPWNFEEVVDKGASAQSFIERMTNFDKNLPNEKVLPKHSLLYEYFTVYNELTKVKYVTEGMRKPAFLSGEQKKAIVDLLFKTNRKVTVKQLKEDYFKKIECFDSVEISGVEDRFNASLGTYHDLLKIIKDKDFLDNEENEDILEDIVLTLTLFEDREMIEERLKTYAHLFDDKVMKQLKRRRYTGWGRLSRKLINGIRDKQSGKTILDFLKSDGFANRNFMQLIHDDSLTFKEDIQKAQVSGQGDSLHEHIANLAGSPAIKKGILQTVKVVDELVKVMGRHKPENIVIEMARENQTTQKGQKNSRERMKRIEEGIKELGSQILKEHPVENTQLQNEKLYLYYLQNGRDMYVDQELDINRLSDYDVDHIVPQSFLKDDSIDNKVLTRSDKARGKSDNVPSEEVVKKMKNYWRQLLNAKLITQRKFDNLTKAERGGLSELDKAGFIKRQLVETRQITKHVAQILDSRMNTKYDENDKLIREVKVITLKSKLVSDFRKDFQFYKVREINNYHHAHDAYLNAVVGTALIKKYPKLESEFVYGDYKVYDVRKMIAKSEQEIGKATAKYFFYSNIMNFFKTEITLANGEIRKRPLIETNGETGEIVWDKGRDFATVRKVLSMPQVNIVKKTEVQTGGFSKESILPKRNSDKLIARKKDWDPKKYGGFDSPTVAYSVLVVAKVEKGKSKKLKSVKELLGITIMERSSFEKNPIDFLEAKGYKEVKKDLIIKLPKYSLFELENGRKRMLASAGELQKGNELALPSKYVNFLYLASHYEKLKGSPEDNEQKQLFVEQHKHYLDEIIEQISEFSKRVILADANLDKVLSAYNKHRDKPIREQAENIIHLFTLTNLGAPAAFKYFDTTIDRKRYTSTKEVLDATLIHQSITGLYETRIDLSQLGGDGGEAAAKPAPGGTVSLQDEHRLFDIPVTTSLPDVWLQDFPQAWAETGGLGRAKCQAPIIIDLKPTAVPVSIKQYPMSLEAHMGIRQHIIKFLELGVLRPCRSPWNTPLLPVKKPGTQDYRPVQDLREINKRTVDIHPTVPNPYNLLSTLKPDYSWYTVLDLKDAFFCLPLAPQSQELFAFEWKDPERGISGQLTWTRLPQGFKNSPTLFNEALHRDLTDFRTQHPEVTLLQYVDDLLLAAPTKKACTQGTRHLLQELGEKGYRASAKKAQICQTKVTYLGYILSEGKRWLTPGRIETVARIPPPRNPREVREFLGTAGFCRLWIPGFAELAAPLYALTKPSTPFTWQTEHQLAFEALKKALLSAPALGLPDTSKPFTLFLDERQGIAKGVLTQKLGPWKRPVAYLSKKLDPVAAGWPPCLRIMAATAMLVKDSAKLTLGQPLTVITPHTLEAIVRQPPDRWITNARLTHYQALLLDTDRVQFGPPVTLNPATLLPVPENQPSPHDCRQVLAETHGTREDLKDQELPDADHTWYTDGSSYLDSGTRRAGAAVVDGHNTIWAQSLPPGTSAQKAELIALTKALELSKGKKANIYTDSRYAFATAHTHGSIYERRGWLTSEGKEIKNKAEIIALLKALFLPQEVAIIHCPGHQKGQDPVAVGNRQADRVARQAAMAEVLTLATEPDNTSHITAGKRTADGSEFEKRTADGSEFESPKKKAKVE

SEQ ID NO: 1545 - protein, 2094 aa, synthetic construct
MPAAKRVKLDGGDKKYSIGLDIGTNSVGWAVITDEYKVPSKKFKVLGNTDRHSIKKNLIGALLFDSGETAEATRLKRTARRRYTRRKNRICYLQEIFSNEMAKVDDSFFHRLEESFLVEEDKKHERHPIFGNIVDEVAYHEKYPTIYHLRKKLVDSTDKADLRLIYLALAHMIKFRGHFLIEGDLNPDNSDVDKLFIQLVQTYNQLFEENPINASGVDAKAILSARLSKSRRLENLIAQLPGEKKNGLFGNLIALSLGLTPNFKSNFDLAEDAKLQLSKDTYDDDLDNLLAQIGDQYADLFLAAKNLSDAILLSDILRVNTEITKAPLSASMIKRYDEHHQDLTLLKALVRQQLPEKYKEIFFDQSKNGYAGYIDGGASQEEFYKFIKPILEKMDGTEELLVKLNREDLLRKQRTFDNGSIPHQIHLGELHAILRRQEDFYPFLKDNREKIEKILTFRIPYYVGPLARGNSRFAWMTRKSEETITPWNFEEVVDKGASAQSFIERMTNFDKNLPNEKVLPKHSLLYEYFTVYNELTKVKYVTEGMRKPAFLSGEQKKAIVDLLFKTNRKVTVKQLKEDYFKKIECFDSVEISGVEDRFNASLGTYHDLLKIIKDKDFLDNEENEDILEDIVLTLTLFEDREMIEERLKTYAHLFDDKVMKQLKRRRYTGWGRLSRKLINGIRDKQSGKTILDFLKSDGFANRNFMQLIHDDSLTFKEDIQKAQVSGQGDSLHEHIANLAGSPAIKKGILQTVKVVDELVKVMGRHKPENIVIEMARENQTTQKGQKNSRERMKRIEEGIKELGSQILKEHPVENTQLQNEKLYLYYLQNGRDMYVDQELDINRLSDYDVDHIVPQSFLKDDSIDNKVLTRSDKARGKSDNVPSEEVVKKMKNYWRQLLNAKLITQRKFDNLTKAERGGLSELDKAGFIKRQLVETRQITKHVAQILDSRMNTKYDENDKLIREVKVITLKSKLVSDFRKDFQFYKVREINNYHHAHDAYLNAVVGTALIKKYPKLESEFVYGDYKVYDVRKMIAKSEQEIGKATAKYFFYSNIMNFFKTEITLANGEIRKRPLIETNGETGEIVWDKGRDFATVRKVLSMPQVNIVKKTEVQTGGFSKESILPKRNSDKLIARKKDWDPKKYGGFDSPTVAYSVLVVAKVEKGKSKKLKSVKELLGITIMERSSFEKNPIDFLEAKGYKEVKKDLIIKLPKYSLFELENGRKRMLASAGELQKGNELALPSKYVNFLYLASHYEKLKGSPEDNEQKQLFVEQHKHYLDEIIEQISEFSKRVILADANLDKVLSAYNKHRDKPIREQAENIIHLFTLTNLGAPAAFKYFDTTIDRKRYTSTKEVLDATLIHQSITGLYETRIDLSQLGGDGGGSSGGTVSLQDEHRLFDIPVTTSLPDVWLQDFPQAWAETGGLGRAKCQAPIIIDLKPTAVPVSIKQYPMSLEAHMGIRQHIIKFLELGVLRPCRSPWNTPLLPVKKPGTQDYRPVQDLREINKRTVDIHPTVPNPYNLLSTLKPDYSWYTVLDLKDAFFCLPLAPQSQELFAFEWKDPERGISGQLTWTRLPQGFKNSPTLFNEALHRDLTDFRTQHPEVTLLQYVDDLLLAAPTKKACTQGTRHLLQELGEKGYRASAKKAQICQTKVTYLGYILSEGKRWLTPGRIETVARIPPPRNPREVREFLGTAGFCRLWIPGFAELAAPLYALTKPSTPFTWQTEHQLAFEALKKALLSAPALGLPDTSKPFTLFLDERQGIAKGVLTQKLGPWKRPVAYLSKKLDPVAAGWPPCLRIMAATAMLVKDSAKLTLGQPLTVITPHTLEAIVRQPPDRWITNARLTHYQALLLDTDRVQFGPPVTLNPATLLPVPENQPSPHDCRQVLAETHGTREDLKDQELPDADHTWYTDGSSYLDSGTRRAGAAVVDGHNTIWAQSLPPGTSAQKAELIALTKALELSKGKKANIYTDSRYAFATAHTHGSIYERRGWLTSEGKEIKNKAEIIALLKALFLPQEVAIIHCPGHQKGQDPVAVGNRQADRVARQAAMAEVLTLATEPDNTSHITAGKRTADGSEFEKRTADGSEFESPKKKAKVE

SEQ ID NO: 1546 - protein, 2116 aa, synthetic construct
MPAAKRVKLDGGDKKYSIGLDIGTNSVGWAVITDEYKVPSKKFKVLGNTDRHSIKKNLIGALLFDSGETAEATRLKRTARRRYTRRKNRICYLQEIFSNEMAKVDDSFFHRLEESFLVEEDKKHERHPIFGNIVDEVAYHEKYPTIYHLRKKLVDSTDKADLRLIYLALAHMIKFRGHFLIEGDLNPDNSDVDKLFIQLVQTYNQLFEENPINASGVDAKAILSARLSKSRRLENLIAQLPGEKKNGLFGNLIALSLGLTPNFKSNFDLAEDAKLQLSKDTYDDDLDNLLAQIGDQYADLFLAAKNLSDAILLSDILRVNTEITKAPLSASMIKRYDEHHQDLTLLKALVRQQLPEKYKEIFFDQSKNGYAGYIDGGASQEEFYKFIKPILEKMDGTEELLVKLNREDLLRKQRTFDNGSIPHQIHLGELHAILRRQEDFYPFLKDNREKIEKILTFRIPYYVGPLARGNSRFAWMTRKSEETITPWNFEEVVDKGASAQSFIERMTNFDKNLPNEKVLPKHSLLYEYFTVYNELTKVKYVTEGMRKPAFLSGEQKKAIVDLLFKTNRKVTVKQLKEDYFKKIECFDSVEISGVEDRFNASLGTYHDLLKIIKDKDFLDNEENEDILEDIVLTLTLFEDREMIEERLKTYAHLFDDKVMKQLKRRRYTGWGRLSRKLINGIRDKQSGKTILDFLKSDGFANRNFMQLIHDDSLTFKEDIQKAQVSGQGDSLHEHIANLAGSPAIKKGILQTVKVVDELVKVMGRHKPENIVIEMARENQTTQKGQKNSRERMKRIEEGIKELGSQILKEHPVENTQLQNEKLYLYYLQNGRDMYVDQELDINRLSDYDVDHIVPQSFLKDDSIDNKVLTRSDKARGKSDNVPSEEVVKKMKNYWRQLLNAKLITQRKFDNLTKAERGGLSELDKAGFIKRQLVETRQITKHVAQILDSRMNTKYDENDKLIREVKVITLKSKLVSDFRKDFQFYKVREINNYHHAHDAYLNAVVGTALIKKYPKLESEFVYGDYKVYDVRKMIAKSEQEIGKATAKYFFYSNIMNFFKTEITLANGEIRKRPLIETNGETGEIVWDKGRDFATVRKVLSMPQVNIVKKTEVQTGGFSKESILPKRNSDKLIARKKDWDPKKYGGFDSPTVAYSVLVVAKVEKGKSKKLKSVKELLGITIMERSSFEKNPIDFLEAKGYKEVKKDLIIKLPKYSLFELENGRKRMLASAGELQKGNELALPSKYVNFLYLASHYEKLKGSPEDNEQKQLFVEQHKHYLDEIIEQISEFSKRVILADANLDKVLSAYNKHRDKPIREQAENIIHLFTLTNLGAPAAFKYFDTTIDRKRYTSTKEVLDATLIHQSITGLYETRIDLSQLGGDGGEAAAKEAAAKEAAAKEAAAKEAAAKGGTVSLQDEHRLFDIPVTTSLPDVWLQDFPQAWAETGGLGRAKCQAPIIIDLKPTAVPVSIKQYPMSLEAHMGIRQHIIKFLELGVLRPCRSPWNTPLLPVKKPGTQDYRPVQDLREINKRTVDIHPTVPNPYNLLSTLKPDYSWYTVLDLKDAFFCLPLAPQSQELFAFEWKDPERGISGQLTWTRLPQGFKNSPTLFNEALHRDLTDFRTQHPEVTLLQYVDDLLLAAPTKKACTQGTRHLLQELGEKGYRASAKKAQICQTKVTYLGYILSEGKRWLTPGRIETVARIPPPRNPREVREFLGTAGFCRLWIPGFAELAAPLYALTKPSTPFTWQTEHQLAFEALKKALLSAPALGLPDTSKPFTLFLDERQGIAKGVLTQKLGPWKRPVAYLSKKLDPVAAGWPPCLRIMAATAMLVKDSAKLTLGQPLTVITPHTLEAIVRQPPDRWITNARLTHYQALLLDTDRVQFGPPVTLNPATLLPVPENQPSPHDCRQVLAETHGTREDLKDQELPDADHTWYTDGSSYLDSGTRRAGAAVVDGHNTIWAQSLPPGTSAQKAELIALTKALELSKGKKANIYTDSRYAFATAHTHGSIYERRGWLTSEGKEIKNKAEIIALLKALFLPQEVAIIHCPGHQKGQDPVAVGNRQADRVARQAAMAEVLTLATEPDNTSHITAGKRTADGSEFEKRTADGSEFESPKKKAKVE

SEQ ID NO: 1547 - protein, 2099 aa, synthetic construct
MPAAKRVKLDGGDKKYSIGLDIGTNSVGWAVITDEYKVPSKKFKVLGNTDRHSIKKNLIGALLFDSGETAEATRLKRTARRRYTRRKNRICYLQEIFSNEMAKVDDSFFHRLEESFLVEEDKKHERHPIFGNIVDEVAYHEKYPTIYHLRKKLVDSTDKADLRLIYLALAHMIKFRGHFLIEGDLNPDNSDVDKLFIQLVQTYNQLFEENPINASGVDAKAILSARLSKSRRLENLIAQLPGEKKNGLFGNLIALSLGLTPNFKSNFDLAEDAKLQLSKDTYDDDLDNLLAQIGDQYADLFLAAKNLSDAILLSDILRVNTEITKAPLSASMIKRYDEHHQDLTLLKALVRQQLPEKYKEIFFDQSKNGYAGYIDGGASQEEFYKFIKPILEKMDGTEELLVKLNREDLLRKQRTFDNGSIPHQIHLGELHAILRRQEDFYPFLKDNREKIEKILTFRIPYYVGPLARGNSRFAWMTRKSEETITPWNFEEVVDKGASAQSFIERMTNFDKNLPNEKVLPKHSLLYEYFTVYNELTKVKYVTEGMRKPAFLSGEQKKAIVDLLFKTNRKVTVKQLKEDYFKKIECFDSVEISGVEDRFNASLGTYHDLLKIIKDKDFLDNEENEDILEDIVLTLTLFEDREMIEERLKTYAHLFDDKVMKQLKRRRYTGWGRLSRKLINGIRDKQSGKTILDFLKSDGFANRNFMQLIHDDSLTFKEDIQKAQVSGQGDSLHEHIANLAGSPAIKKGILQTVKVVDELVKVMGRHKPENIVIEMARENQTTQKGQKNSRERMKRIEEGIKELGSQILKEHPVENTQLQNEKLYLYYLQNGRDMYVDQELDINRLSDYDVDHIVPQSFLKDDSIDNKVLTRSDKARGKSDNVPSEEVVKKMKNYWRQLLNAKLITQRKFDNLTKAERGGLSELDKAGFIKRQLVETRQITKHVAQILDSRMNTKYDENDKLIREVKVITLKSKLVSDFRKDFQFYKVREINNYHHAHDAYLNAVVGTALIKKYPKLESEFVYGDYKVYDVRKMIAKSEQEIGKATAKYFFYSNIMNFFKTEITLANGEIRKRPLIETNGETGEIVWDKGRDFATVRKVLSMPQVNIVKKTEVQTGGFSKESILPKRNSDKLIARKKDWDPKKYGGFDSPTVAYSVLVVAKVEKGKSKKLKSVKELLGITIMERSSFEKNPIDFLEAKGYKEVKKDLIIKLPKYSLFELENGRKRMLASAGELQKGNELALPSKYVNFLYLASHYEKLKGSPEDNEQKQLFVEQHKHYLDEIIEQISEFSKRVILADANLDKVLSAYNKHRDKPIREQAENIIHLFTLTNLGAPAAFKYFDTTIDRKRYTSTKEVLDATLIHQSITGLYETRIDLSQLGGDGGEAAAKGGGGGTVSLQDEHRLFDIPVTTSLPDVWLQDFPQAWAETGGLGRAKCQAPIIIDLKPTAVPVSIKQYPMSLEAHMGIRQHIIKFLELGVLRPCRSPWNTPLLPVKKPGTQDYRPVQDLREINKRTVDIHPTVPNPYNLLSTLKPDYSWYTVLDLKDAFFCLPLAPQSQELFAFEWKDPERGISGQLTWTRLPQGFKNSPTLFNEALHRDLTDFRTQHPEVTLLQYVDDLLLAAPTKKACTQGTRHLLQELGEKGYRASAKKAQICQTKVTYLGYILSEGKRWLTPGRIETVARIPPPRNPREVREFLGTAGFCRLWIPGFAELAAPLYALTKPSTPFTWQTEHQLAFEALKKALLSAPALGLPDTSKPFTLFLDERQGIAKGVLTQKLGPWKRPVAYLSKKLDPVAAGWPPCLRIMAATAMLVKDSAKLTLGQPLTVITPHTLEAIVRQPPDRWITNARLTHYQALLLDTDRVQFGPPVTLNPATLLPVPENQPSPHDCRQVLAETHGTREDLKDQELPDADHTWYTDGSSYLDSGTRRAGAAVVDGHNTIWAQSLPPGTSAQKAELIALTKALELSKGKKANIYTDSRYAFATAHTHGSIYERRGWLTSEGKEIKNKAEIIALLKALFLPQEVAIIHCPGHQKGQDPVAVGNRQADRVARQAAMAEVLTLATEPDNTSHITAGKRTADGSEFEKRTADGSEFESPKKKAKVE

SEQ ID NO: 1548 - protein, 2097 aa, synthetic construct
MPAAKRVKLDGGDKKYSIGLDIGTNSVGWAVITDEYKVPSKKFKVLGNTDRHSIKKNLIGALLFDSGETAEATRLKRTARRRYTRRKNRICYLQEIFSNEMAKVDDSFFHRLEESFLVEEDKKHERHPIFGNIVDEVAYHEKYPTIYHLRKKLVDSTDKADLRLIYLALAHMIKFRGHFLIEGDLNPDNSDVDKLFIQLVQTYNQLFEENPINASGVDAKAILSARLSKSRRLENLIAQLPGEKKNGLFGNLIALSLGLTPNFKSNFDLAEDAKLQLSKDTYDDDLDNLLAQIGDQYADLFLAAKNLSDAILLSDILRVNTEITKAPLSASMIKRYDEHHQDLTLLKALVRQQLPEKYKEIFFDQSKNGYAGYIDGGASQEEFYKFIKPILEKMDGTEELLVKLNREDLLRKQRTFDNGSIPHQIHLGELHAILRRQEDFYPFLKDNREKIEKILTFRIPYYVGPLARGNSRFAWMTRKSEETITPWNFEEVVDKGASAQSFIERMTNFDKNLPNEKVLPKHSLLYEYFTVYNELTKVKYVTEGMRKPAFLSGEQKKAIVDLLFKTNRKVTVKQLKEDYFKKIECFDSVEISGVEDRFNASLGTYHDLLKIIKDKDFLDNEENEDILEDIVLTLTLFEDREMIEERLKTYAHLFDDKVMKQLKRRRYTGWGRLSRKLINGIRDKQSGKTILDFLKSDGFANRNFMQLIHDDSLTFKEDIQKAQVSGQGDSLHEHIANLAGSPAIKKGILQTVKVVDELVKVMGRHKPENIVIEMARENQTTQKGQKNSRERMKRIEEGIKELGSQILKEHPVENTQLQNEKLYLYYLQNGRDMYVDQELDINRLSDYDVDHIVPQSFLKDDSIDNKVLTRSDKARGKSDNVPSEEVVKKMKNYWRQLLNAKLITQRKFDNLTKAERGGLSELDKAGFIKRQLVETRQITKHVAQILDSRMNTKYDENDKLIREVKVITLKSKLVSDFRKDFQFYKVREINNYHHAHDAYLNAVVGTALIKKYPKLESEFVYGDYKVYDVRKMIAKSEQEIGKATAKYFFYSNIMNFFKTEITLANGEIRKRPLIETNGETGEIVWDKGRDFATVRKVLSMPQVNIVKKTEVQTGGFSKESILPKRNSDKLIARKKDWDPKKYGGFDSPTVAYSVLVVAKVEKGKSKKLKSVKELLGITIMERSSFEKNPIDFLEAKGYKEVKKDLIIKLPKYSLFELENGRKRMLASAGELQKGNELALPSKYVNFLYLASHYEKLKGSPEDNEQKQLFVEQHKHYLDEIIEQISEFSKRVILADANLDKVLSAYNKHRDKPIREQAENIIHLFTLTNLGAPAAFKYFDTTIDRKRYTSTKEVLDATLIHQSITGLYETRIDLSQLGGDGGGSSGGGGGTVSLQDEHRLFDIPVTTSLPDVWLQDFPQAWAETGGLGRAKCQAPIIIDLKPTAVPVSIKQYPMSLEAHMGIRQHIIKFLELGVLRPCRSPWNTPLLPVKKPGTQDYRPVQDLREINKRTVDIHPTVPNPYNLLSTLKPDYSWYTVLDLKDAFFCLPLAPQSQELFAFEWKDPERGISGQLTWTRLPQGFKNSPTLFNEALHRDLTDFRTQHPEVTLLQYVDDLLLAAPTKKACTQGTRHLLQELGEKGYRASAKKAQICQTKVTYLGYILSEGKRWLTPGRIETVARIPPPRNPREVREFLGTAGFCRLWIPGFAELAAPLYALTKPSTPFTWQTEHQLAFEALKKALLSAPALGLPDTSKPFTLFLDERQGIAKGVLTQKLGPWKRPVAYLSKKLDPVAAGWPPCLRIMAATAMLVKDSAKLTLGQPLTVITPHTLEAIVRQPPDRWITNARLTHYQALLLDTDRVQFGPPVTLNPATLLPVPENQPSPHDCRQVLAETHGTREDLKDQELPDADHTWYTDGSSYLDSGTRRAGAAVVDGHNTIWAQSLPPGTSAQKAELIALTKALELSKGKKANIYTDSRYAFATAHTHGSIYERRGWLTSEGKEIKNKAEIIALLKALFLPQEVAIIHCPGHQKGQDPVAVGNRQADRVARQAAMAEVLTLATEPDNTSHITAGKRTADGSEFEKRTADGSEFESPKKKAKVE

SEQ ID NO: 1549 - protein, 2102 aa, synthetic construct
MPAAKRVKLDGGDKKYSIGLDIGTNSVGWAVITDEYKVPSKKFKVLGNTDRHSIKKNLIGALLFDSGETAEATRLKRTARRRYTRRKNRICYLQEIFSNEMAKVDDSFFHRLEESFLVEEDKKHERHPIFGNIVDEVAYHEKYPTIYHLRKKLVDSTDKADLRLIYLALAHMIKFRGHFLIEGDLNPDNSDVDKLFIQLVQTYNQLFEENPINASGVDAKAILSARLSKSRRLENLIAQLPGEKKNGLFGNLIALSLGLTPNFKSNFDLAEDAKLQLSKDTYDDDLDNLLAQIGDQYADLFLAAKNLSDAILLSDILRVNTEITKAPLSASMIKRYDEHHQDLTLLKALVRQQLPEKYKEIFFDQSKNGYAGYIDGGASQEEFYKFIKPILEKMDGTEELLVKLNREDLLRKQRTFDNGSIPHQIHLGELHAILRRQEDFYPFLKDNREKIEKILTFRIPYYVGPLARGNSRFAWMTRKSEETITPWNFEEVVDKGASAQSFIERMTNFDKNLPNEKVLPKHSLLYEYFTVYNELTKVKYVTEGMRKPAFLSGEQKKAIVDLLFKTNRKVTVKQLKEDYFKKIECFDSVEISGVEDRFNASLGTYHDLLKIIKDKDFLDNEENEDILEDIVLTLTLFEDREMIEERLKTYAHLFDDKVMKQLKRRRYTGWGRLSRKLINGIRDKQSGKTILDFLKSDGFANRNFMQLIHDDSLTFKEDIQKAQVSGQGDSLHEHIANLAGSPAIKKGILQTVKVVDELVKVMGRHKPENIVIEMARENQTTQKGQKNSRERMKRIEEGIKELGSQILKEHPVENTQLQNEKLYLYYLQNGRDMYVDQELDINRLSDYDVDHIVPQSFLKDDSIDNKVLTRSDKARGKSDNVPSEEVVKKMKNYWRQLLNAKLITQRKFDNLTKAERGGLSELDKAGFIKRQLVETRQITKHVAQILDSRMNTKYDENDKLIREVKVITLKSKLVSDFRKDFQFYKVREINNYHHAHDAYLNAVVGTALIKKYPKLESEFVYGDYKVYDVRKMIAKSEQEIGKATAKYFFYSNIMNFFKTEITLANGEIRKRPLIETNGETGEIVWDKGRDFATVRKVLSMPQVNIVKKTEVQTGGFSKESILPKRNSDKLIARKKDWDPKKYGGFDSPTVAYSVLVVAKVEKGKSKKLKSVKELLGITIMERSSFEKNPIDFLEAKGYKEVKKDLIIKLPKYSLFELENGRKRMLASAGELQKGNELALPSKYVNFLYLASHYEKLKGSPEDNEQKQLFVEQHKHYLDEIIEQISEFSKRVILADANLDKVLSAYNKHRDKPIREQAENIIHLFTLTNLGAPAAFKYFDTTIDRKRYTSTKEVLDATLIHQSITGLYETRIDLSQLGGDGGGGSGSSEAAAKGGTVSLQDEHRLFDIPVTTSLPDVWLQDFPQAWAETGGLGRAKCQAPIIIDLKPTAVPVSIKQYPMSLEAHMGIRQHIIKFLELGVLRPCRSPWNTPLLPVKKPGTQDYRPVQDLREINKRTVDIHPTVPNPYNLLSTLKPDYSWYTVLDLKDAFFCLPLAPQSQELFAFEWKDPERGISGQLTWTRLPQGFKNSPTLFNEALHRDLTDFRTQHPEVTLLQYVDDLLLAAPTKKACTQGTRHLLQELGEKGYRASAKKAQICQTKVTYLGYILSEGKRWLTPGRIETVARIPPPRNPREVREFLGTAGFCRLWIPGFAELAAPLYALTKPSTPFTWQTEHQLAFEALKKALLSAPALGLPDTSKPFTLFLDERQGIAKGVLTQKLGPWKRPVAYLSKKLDPVAAGWPPCLRIMAATAMLVKDSAKLTLGQPLTVITPHTLEAIVRQPPDRWITNARLTHYQALLLDTDRVQFGPPVTLNPATLLPVPENQPSPHDCRQVLAETHGTREDLKDQELPDADHTWYTDGSSYLDSGTRRAGAAVVDGHNTIWAQSLPPGTSAQKAELIALTKALELSKGKKANIYTDSRYAFATAHTHGSIYERRGWLTSEGKEIKNKAEIIALLKALFLPQEVAIIHCPGHQKGQDPVAVGNRQADRVARQAAMAEVLTLATEPDNTSHITAGKRTADGSEFEKRTADGSEFESPKKKAKVE

SEQ ID NO: 1550 - protein, 2100 aa, synthetic construct
MPAAKRVKLDGGDKKYSIGLDIGTNSVGWAVITDEYKVPSKKFKVLGNTDRHSIKKNLIGALLFDSGETAEATRLKRTARRRYTRRKNRICYLQEIFSNEMAKVDDSFFHRLEESFLVEEDKKHERHPIFGNIVDEVAYHEKYPTIYHLRKKLVDSTDKADLRLIYLALAHMIKFRGHFLIEGDLNPDNSDVDKLFIQLVQTYNQLFEENPINASGVDAKAILSARLSKSRRLENLIAQLPGEKKNGLFGNLIALSLGLTPNFKSNFDLAEDAKLQLSKDTYDDDLDNLLAQIGDQYADLFLAAKNLSDAILLSDILRVNTEITKAPLSASMIKRYDEHHQDLTLLKALVRQQLPEKYKEIFFDQSKNGYAGYIDGGASQEEFYKFIKPILEKMDGTEELLVKLNREDLLRKQRTFDNGSIPHQIHLGELHAILRRQEDFYPFLKDNREKIEKILTFRIPYYVGPLARGNSRFAWMTRKSEETITPWNFEEVVDKGASAQSFIERMTNFDKNLPNEKVLPKHSLLYEYFTVYNELTKVKYVTEGMRKPAFLSGEQKKAIVDLLFKTNRKVTVKQLKEDYFKKIECFDSVEISGVEDRFNASLGTYHDLLKIIKDKDFLDNEENEDILEDIVLTLTLFEDREMIEERLKTYAHLFDDKVMKQLKRRRYTGWGRLSRKLINGIRDKQSGKTILDFLKSDGFANRNFMQLIHDDSLTFKEDIQKAQVSGQGDSLHEHIANLAGSPAIKKGILQTVKVVDELVKVMGRHKPENIVIEMARENQTTQKGQKNSRERMKRIEEGIKELGSQILKEHPVENTQLQNEKLYLYYLQNGRDMYVDQELDINRLSDYDVDHIVPQSFLKDDSIDNKVLTRSDKARGKSDNVPSEEVVKKMKNYWRQLLNAKLITQRKFDNLTKAERGGLSELDKAGFIKRQLVETRQITKHVAQILDSRMNTKYDENDKLIREVKVITLKSKLVSDFRKDFQFYKVREINNYHHAHDAYLNAVVGTALIKKYPKLESEFVYGDYKVYDVRKMIAKSEQEIGKATAKYFFYSNIMNFFKTEITLANGEIRKRPLIETNGETGEIVWDKGRDFATVRKVLSMPQVNIVKKTEVQTGGFSKESILPKRNSDKLIARKKDWDPKKYGGFDSPTVAYSVLVVAKVEKGKSKKLKSVKELLGITIMERSSFEKNPIDFLEAKGYKEVKKDLIIKLPKYSLFELENGRKRMLASAGELQKGNELALPSKYVNFLYLASHYEKLKGSPEDNEQKQLFVEQHKHYLDEIIEQISEFSKRVILADANLDKVLSAYNKHRDKPIREQAENIIHLFTLTNLGAPAAFKYFDTTIDRKRYTSTKEVLDATLIHQSITGLYETRIDLSQLGGDGGGGSGSSGGGGGTVSLQDEHRLFDIPVTTSLPDVWLQDFPQAWAETGGLGRAKCQAPIIIDLKPTAVPVSIKQYPMSLEAHMGIRQHIIKFLELGVLRPCRSPWNTPLLPVKKPGTQDYRPVQDLREINKRTVDIHPTVPNPYNLLSTLKPDYSWYTVLDLKDAFFCLPLAPQSQELFAFEWKDPERGISGQLTWTRLPQGFKNSPTLFNEALHRDLTDFRTQHPEVTLLQYVDDLLLAAPTKKACTQGTRHLLQELGEKGYRASAKKAQICQTKVTYLGYILSEGKRWLTPGRIETVARIPPPRNPREVREFLGTAGFCRLWIPGFAELAAPLYALTKPSTPFTWQTEHQLAFEALKKALLSAPALGLPDTSKPFTLFLDERQGIAKGVLTQKLGPWKRPVAYLSKKLDPVAAGWPPCLRIMAATAMLVKDSAKLTLGQPLTVITPHTLEAIVRQPPDRWITNARLTHYQALLLDTDRVQFGPPVTLNPATLLPVPENQPSPHDCRQVLAETHGTREDLKDQELPDADHTWYTDGSSYLDSGTRRAGAAVVDGHNTIWAQSLPPGTSAQKAELIALTKALELSKGKKANIYTDSRYAFATAHTHGSIYERRGWLTSEGKEIKNKAEIIALLKALFLPQEVAIIHCPGHQKGQDPVAVGNRQADRVARQAAMAEVLTLATEPDNTSHITAGKRTADGSEFEKRTADGSEFESPKKKAKVE

SEQ ID NO: 1551 - protein, 2100 aa, synthetic construct
MPAAKRVKLDGGDKKYSIGLDIGTNSVGWAVITDEYKVPSKKFKVLGNTDRHSIKKNLIGALLFDSGETAEATRLKRTARRRYTRRKNRICYLQEIFSNEMAKVDDSFFHRLEESFLVEEDKKHERHPIFGNIVDEVAYHEKYPTIYHLRKKLVDSTDKADLRLIYLALAHMIKFRGHFLIEGDLNPDNSDVDKLFIQLVQTYNQLFEENPINASGVDAKAILSARLSKSRRLENLIAQLPGEKKNGLFGNLIALSLGLTPNFKSNFDLAEDAKLQLSKDTYDDDLDNLLAQIGDQYADLFLAAKNLSDAILLSDILRVNTEITKAPLSASMIKRYDEHHQDLTLLKALVRQQLPEKYKEIFFDQSKNGYAGYIDGGASQEEFYKFIKPILEKMDGTEELLVKLNREDLLRKQRTFDNGSIPHQIHLGELHAILRRQEDFYPFLKDNREKIEKILTFRIPYYVGPLARGNSRFAWMTRKSEETITPWNFEEVVDKGASAQSFIERMTNFDKNLPNEKVLPKHSLLYEYFTVYNELTKVKYVTEGMRKPAFLSGEQKKAIVDLLFKTNRKVTVKQLKEDYFKKIECFDSVEISGVEDRFNASLGTYHDLLKIIKDKDFLDNEENEDILEDIVLTLTLFEDREMIEERLKTYAHLFDDKVMKQLKRRRYTGWGRLSRKLINGIRDKQSGKTILDFLKSDGFANRNFMQLIHDDSLTFKEDIQKAQVSGQGDSLHEHIANLAGSPAIKKGILQTVKVVDELVKVMGRHKPENIVIEMARENQTTQKGQKNSRERMKRIEEGIKELGSQILKEHPVENTQLQNEKLYLYYLQNGRDMYVDQELDINRLSDYDVDHIVPQSFLKDDSIDNKVLTRSDKARGKSDNVPSEEVVKKMKNYWRQLLNAKLITQRKFDNLTKAERGGLSELDKAGFIKRQLVETRQITKHVAQILDSRMNTKYDENDKLIREVKVITLKSKLVSDFRKDFQFYKVREINNYHHAHDAYLNAVVGTALIKKYPKLESEFVYGDYKVYDVRKMIAKSEQEIGKATAKYFFYSNIMNFFKTEITLANGEIRKRPLIETNGETGEIVWDKGRDFATVRKVLSMPQVNIVKKTEVQTGGFSKESILPKRNSDKLIARKKDWDPKKYGGFDSPTVAYSVLVVAKVEKGKSKKLKSVKELLGITIMERSSFEKNPIDFLEAKGYKEVKKDLIIKLPKYSLFELENGRKRMLASAGELQKGNELALPSKYVNFLYLASHYEKLKGSPEDNEQKQLFVEQHKHYLDEIIEQISEFSKRVILADANLDKVLSAYNKHRDKPIREQAENIIHLFTLTNLGAPAAFKYFDTTIDRKRYTSTKEVLDATLIHQSITGLYETRIDLSQLGGDGGGGSGSSPAPGGTVSLQDEHRLFDIPVTTSLPDVWLQDFPQAWAETGGLGRAKCQAPIIIDLKPTAVPVSIKQYPMSLEAHMGIRQHIIKFLELGVLRPCRSPWNTPLLPVKKPGTQDYRPVQDLREINKRTVDIHPTVPNPYNLLSTLKPDYSWYTVLDLKDAFFCLPLAPQSQELFAFEWKDPERGISGQLTWTRLPQGFKNSPTLFNEALHRDLTDFRTQHPEVTLLQYVDDLLLAAPTKKACTQGTRHLLQELGEKGYRASAKKAQICQTKVTYLGYILSEGKRWLTPGRIETVARIPPPRNPREVREFLGTAGFCRLWIPGFAELAAPLYALTKPSTPFTWQTEHQLAFEALKKALLSAPALGLPDTSKPFTLFLDERQGIAKGVLTQKLGPWKRPVAYLSKKLDPVAAGWPPCLRIMAATAMLVKDSAKLTLGQPLTVITPHTLEAIVRQPPDRWITNARLTHYQALLLDTDRVQFGPPVTLNPATLLPVPENQPSPHDCRQVLAETHGTREDLKDQELPDADHTWYTDGSSYLDSGTRRAGAAVVDGHNTIWAQSLPPGTSAQKAELIALTKALELSKGKKANIYTDSRYAFATAHTHGSIYERRGWLTSEGKEIKNKAEIIALLKALFLPQEVAIIHCPGHQKGQDPVAVGNRQADRVARQAAMAEVLTLATEPDNTSHITAGKRTADGSEFEKRTADGSEFESPKKKAKVE

SEQ ID NO: 1552 - protein, 2111 aa, synthetic construct
MPAAKRVKLDGGDKKYSIGLDIGTNSVGWAVITDEYKVPSKKFKVLGNTDRHSIKKNLIGALLFDSGETAEATRLKRTARRRYTRRKNRICYLQEIFSNEMAKVDDSFFHRLEESFLVEEDKKHERHPIFGNIVDEVAYHEKYPTIYHLRKKLVDSTDKADLRLIYLALAHMIKFRGHFLIEGDLNPDNSDVDKLFIQLVQTYNQLFEENPINASGVDAKAILSARLSKSRRLENLIAQLPGEKKNGLFGNLIALSLGLTPNFKSNFDLAEDAKLQLSKDTYDDDLDNLLAQIGDQYADLFLAAKNLSDAILLSDILRVNTEITKAPLSASMIKRYDEHHQDLTLLKALVRQQLPEKYKEIFFDQSKNGYAGYIDGGASQEEFYKFIKPILEKMDGTEELLVKLNREDLLRKQRTFDNGSIPHQIHLGELHAILRRQEDFYPFLKDNREKIEKILTFRIPYYVGPLARGNSRFAWMTRKSEETITPWNFEEVVDKGASAQSFIERMTNFDKNLPNEKVLPKHSLLYEYFTVYNELTKVKYVTEGMRKPAFLSGEQKKAIVDLLFKTNRKVTVKQLKEDYFKKIECFDSVEISGVEDRFNASLGTYHDLLKIIKDKDFLDNEENEDILEDIVLTLTLFEDREMIEERLKTYAHLFDDKVMKQLKRRRYTGWGRLSRKLINGIRDKQSGKTILDFLKSDGFANRNFMQLIHDDSLTFKEDIQKAQVSGQGDSLHEHIANLAGSPAIKKGILQTVKVVDELVKVMGRHKPENIVIEMARENQTTQKGQKNSRERMKRIEEGIKELGSQILKEHPVENTQLQNEKLYLYYLQNGRDMYVDQELDINRLSDYDVDHIVPQSFLKDDSIDNKVLTRSDKARGKSDNVPSEEVVKKMKNYWRQLLNAKLITQRKFDNLTKAERGGLSELDKAGFIKRQLVETRQITKHVAQILDSRMNTKYDENDKLIREVKVITLKSKLVSDFRKDFQFYKVREINNYHHAHDAYLNAVVGTALIKKYPKLESEFVYGDYKVYDVRKMIAKSEQEIGKATAKYFFYSNIMNFFKTEITLANGEIRKRPLIETNGETGEIVWDKGRDFATVRKVLSMPQVNIVKKTEVQTGGFSKESILPKRNSDKLIARKKDWDPKKYGGFDSPTVAYSVLVVAKVEKGKSKKLKSVKELLGITIMERSSFEKNPIDFLEAKGYKEVKKDLIIKLPKYSLFELENGRKRMLASAGELQKGNELALPSKYVNFLYLASHYEKLKGSPEDNEQKQLFVEQHKHYLDEIIEQISEFSKRVILADANLDKVLSAYNKHRDKPIREQAENIIHLFTLTNLGAPAAFKYFDTTIDRKRYTSTKEVLDATLIHQSITGLYETRIDLSQLGGDGGGGGGSGGGGSGGGGSGGGGSGGTVSLQDEHRLFDIPVTTSLPDVWLQDFPQAWAETGGLGRAKCQAPIIIDLKPTAVPVSIKQYPMSLEAHMGIRQHIIKFLELGVLRPCRSPWNTPLLPVKKPGTQDYRPVQDLREINKRTVDIHPTVPNPYNLLSTLKPDYSWYTVLDLKDAFFCLPLAPQSQELFAFEWKDPERGISGQLTWTRLPQGFKNSPTLFNEALHRDLTDFRTQHPEVTLLQYVDDLLLAAPTKKACTQGTRHLLQELGEKGYRASAKKAQICQTKVTYLGYILSEGKRWLTPGRIETVARIPPPRNPREVREFLGTAGFCRLWIPGFAELAAPLYALTKPSTPFTWQTEHQLAFEALKKALLSAPALGLPDTSKPFTLFLDERQGIAKGVLTQKLGPWKRPVAYLSKKLDPVAAGWPPCLRIMAATAMLVKDSAKLTLGQPLTVITPHTLEAIVRQPPDRWITNARLTHYQALLLDTDRVQFGPPVTLNPATLLPVPENQPSPHDCRQVLAETHGTREDLKDQELPDADHTWYTDGSSYLDSGTRRAGAAVVDGHNTIWAQSLPPGTSAQKAELIALTKALELSKGKKANIYTDSRYAFATAHTHGSIYERRGWLTSEGKEIKNKAEIIALLKALFLPQEVAIIHCPGHQKGQDPVAVGNRQADRVARQAAMAEVLTLATEPDNTSHITAGKRTADGSEFEKRTADGSEFESPKKKAKVE

SEQ ID NO: 1553 - protein, 2106 aa, synthetic construct
MPAAKRVKLDGGDKKYSIGLDIGTNSVGWAVITDEYKVPSKKFKVLGNTDRHSIKKNLIGALLFDSGETAEATRLKRTARRRYTRRKNRICYLQEIFSNEMAKVDDSFFHRLEESFLVEEDKKHERHPIFGNIVDEVAYHEKYPTIYHLRKKLVDSTDKADLRLIYLALAHMIKFRGHFLIEGDLNPDNSDVDKLFIQLVQTYNQLFEENPINASGVDAKAILSARLSKSRRLENLIAQLPGEKKNGLFGNLIALSLGLTPNFKSNFDLAEDAKLQLSKDTYDDDLDNLLAQIGDQYADLFLAAKNLSDAILLSDILRVNTEITKAPLSASMIKRYDEHHQDLTLLKALVRQQLPEKYKEIFFDQSKNGYAGYIDGGASQEEFYKFIKPILEKMDGTEELLVKLNREDLLRKQRTFDNGSIPHQIHLGELHAILRRQEDFYPFLKDNREKIEKILTFRIPYYVGPLARGNSRFAWMTRKSEETITPWNFEEVVDKGASAQSFIERMTNFDKNLPNEKVLPKHSLLYEYFTVYNELTKVKYVTEGMRKPAFLSGEQKKAIVDLLFKTNRKVTVKQLKEDYFKKIECFDSVEISGVEDRFNASLGTYHDLLKIIKDKDFLDNEENEDILEDIVLTLTLFEDREMIEERLKTYAHLFDDKVMKQLKRRRYTGWGRLSRKLINGIRDKQSGKTILDFLKSDGFANRNFMQLIHDDSLTFKEDIQKAQVSGQGDSLHEHIANLAGSPAIKKGILQTVKVVDELVKVMGRHKPENIVIEMARENQTTQKGQKNSRERMKRIEEGIKELGSQILKEHPVENTQLQNEKLYLYYLQNGRDMYVDQELDINRLSDYDVDHIVPQSFLKDDSIDNKVLTRSDKARGKSDNVPSEEVVKKMKNYWRQLLNAKLITQRKFDNLTKAERGGLSELDKAGFIKRQLVETRQITKHVAQILDSRMNTKYDENDKLIREVKVITLKSKLVSDFRKDFQFYKVREINNYHHAHDAYLNAVVGTALIKKYPKLESEFVYGDYKVYDVRKMIAKSEQEIGKATAKYFFYSNIMNFFKTEITLANGEIRKRPLIETNGETGEIVWDKGRDFATVRKVLSMPQVNIVKKTEVQTGGFSKESILPKRNSDKLIARKKDWDPKKYGGFDSPTVAYSVLVVAKVEKGKSKKLKSVKELLGITIMERSSFEKNPIDFLEAKGYKEVKKDLIIKLPKYSLFELENGRKRMLASAGELQKGNELALPSKYVNFLYLASHYEKLKGSPEDNEQKQLFVEQHKHYLDEIIEQISEFSKRVILADANLDKVLSAYNKHRDKPIREQAENIIHLFTLTNLGAPAAFKYFDTTIDRKRYTSTKEVLDATLIHQSITGLYETRIDLSQLGGDGGGSSGSSGSSGSSGSSGGTVSLQDEHRLFDIPVTTSLPDVWLQDFPQAWAETGGLGRAKCQAPIIIDLKPTAVPVSIKQYPMSLEAHMGIRQHIIKFLELGVLRPCRSPWNTPLLPVKKPGTQDYRPVQDLREINKRTVDIHPTVPNPYNLLSTLKPDYSWYTVLDLKDAFFCLPLAPQSQELFAFEWKDPERGISGQLTWTRLPQGFKNSPTLFNEALHRDLTDFRTQHPEVTLLQYVDDLLLAAPTKKACTQGTRHLLQELGEKGYRASAKKAQICQTKVTYLGYILSEGKRWLTPGRIETVARIPPPRNPREVREFLGTAGFCRLWIPGFAELAAPLYALTKPSTPFTWQTEHQLAFEALKKALLSAPALGLPDTSKPFTLFLDERQGIAKGVLTQKLGPWKRPVAYLSKKLDPVAAGWPPCLRIMAATAMLVKDSAKLTLGQPLTVITPHTLEAIVRQPPDRWITNARLTHYQALLLDTDRVQFGPPVTLNPATLLPVPENQPSPHDCRQVLAETHGTREDLKDQELPDADHTWYTDGSSYLDSGTRRAGAAVVDGHNTIWAQSLPPGTSAQKAELIALTKALELSKGKKANIYTDSRYAFATAHTHGSIYERRGWLTSEGKEIKNKAEIIALLKALFLPQEVAIIHCPGHQKGQDPVAVGNRQADRVARQAAMAEVLTLATEPDNTSHITAGKRTADGSEFEKRTADGSEFESPKKKAKVE

SEQ ID NO: 1554 - protein, 2097 aa, synthetic construct
MPAAKRVKLDGGDKKYSIGLDIGTNSVGWAVITDEYKVPSKKFKVLGNTDRHSIKKNLIGALLFDSGETAEATRLKRTARRRYTRRKNRICYLQEIFSNEMAKVDDSFFHRLEESFLVEEDKKHERHPIFGNIVDEVAYHEKYPTIYHLRKKLVDSTDKADLRLIYLALAHMIKFRGHFLIEGDLNPDNSDVDKLFIQLVQTYNQLFEENPINASGVDAKAILSARLSKSRRLENLIAQLPGEKKNGLFGNLIALSLGLTPNFKSNFDLAEDAKLQLSKDTYDDDLDNLLAQIGDQYADLFLAAKNLSDAILLSDILRVNTEITKAPLSASMIKRYDEHHQDLTLLKALVRQQLPEKYKEIFFDQSKNGYAGYIDGGASQEEFYKFIKPILEKMDGTEELLVKLNREDLLRKQRTFDNGSIPHQIHLGELHAILRRQEDFYPFLKDNREKIEKILTFRIPYYVGPLARGNSRFAWMTRKSEETITPWNFEEVVDKGASAQSFIERMTNFDKNLPNEKVLPKHSLLYEYFTVYNELTKVKYVTEGMRKPAFLSGEQKKAIVDLLFKTNRKVTVKQLKEDYFKKIECFDSVEISGVEDRFNASLGTYHDLLKIIKDKDFLDNEENEDILEDIVLTLTLFEDREMIEERLKTYAHLFDDKVMKQLKRRRYTGWGRLSRKLINGIRDKQSGKTILDFLKSDGFANRNFMQLIHDDSLTFKEDIQKAQVSGQGDSLHEHIANLAGSPAIKKGILQTVKVVDELVKVMGRHKPENIVIEMARENQTTQKGQKNSRERMKRIEEGIKELGSQILKEHPVENTQLQNEKLYLYYLQNGRDMYVDQELDINRLSDYDVDHIVPQSFLKDDSIDNKVLTRSDKARGKSDNVPSEEVVKKMKNYWRQLLNAKLITQRKFDNLTKAERGGLSELDKAGFIKRQLVETRQITKHVAQILDSRMNTKYDENDKLIREVKVITLKSKLVSDFRKDFQFYKVREINNYHHAHDAYLNAVVGTALIKKYPKLESEFVYGDYKVYDVRKMIAKSEQEIGKATAKYFFYSNIMNFFKTEITLANGEIRKRPLIETNGETGEIVWDKGRDFATVRKVLSMPQVNIVKKTEVQTGGFSKESILPKRNSDKLIARKKDWDPKKYGGFDSPTVAYSVLVVAKVEKGKSKKLKSVKELLGITIMERSSFEKNPIDFLEAKGYKEVKKDLIIKLPKYSLFELENGRKRMLASAGELQKGNELALPSKYVNFLYLASHYEKLKGSPEDNEQKQLFVEQHKHYLDEIIEQISEFSKRVILADANLDKVLSAYNKHRDKPIREQAENIIHLFTLTNLGAPAAFKYFDTTIDRKRYTSTKEVLDATLIHQSITGLYETRIDLSQLGGDGGPAPGGSGGTVSLQDEHRLFDIPVTTSLPDVWLQDFPQAWAETGGLGRAKCQAPIIIDLKPTAVPVSIKQYPMSLEAHMGIRQHIIKFLELGVLRPCRSPWNTPLLPVKKPGTQDYRPVQDLREINKRTVDIHPTVPNPYNLLSTLKPDYSWYTVLDLKDAFFCLPLAPQSQELFAFEWKDPERGISGQLTWTRLPQGFKNSPTLFNEALHRDLTDFRTQHPEVTLLQYVDDLLLAAPTKKACTQGTRHLLQELGEKGYRASAKKAQICQTKVTYLGYILSEGKRWLTPGRIETVARIPPPRNPREVREFLGTAGFCRLWIPGFAELAAPLYALTKPSTPFTWQTEHQLAFEALKKALLSAPALGLPDTSKPFTLFLDERQGIAKGVLTQKLGPWKRPVAYLSKKLDPVAAGWPPCLRIMAATAMLVKDSAKLTLGQPLTVITPHTLEAIVRQPPDRWITNARLTHYQALLLDTDRVQFGPPVTLNPATLLPVPENQPSPHDCRQVLAETHGTREDLKDQELPDADHTWYTDGSSYLDSGTRRAGAAVVDGHNTIWAQSLPPGTSAQKAELIALTKALELSKGKKANIYTDSRYAFATAHTHGSIYERRGWLTSEGKEIKNKAEIIALLKALFLPQEVAIIHCPGHQKGQDPVAVGNRQADRVARQAAMAEVLTLATEPDNTSHITAGKRTADGSEFEKRTADGSEFESPKKKAKVE

SEQ ID NO: 1555 - protein, 2102 aa, synthetic construct
MPAAKRVKLDGGDKKYSIGLDIGTNSVGWAVITDEYKVPSKKFKVLGNTDRHSIKKNLIGALLFDSGETAEATRLKRTARRRYTRRKNRICYLQEIFSNEMAKVDDSFFHRLEESFLVEEDKKHERHPIFGNIVDEVAYHEKYPTIYHLRKKLVDSTDKADLRLIYLALAHMIKFRGHFLIEGDLNPDNSDVDKLFIQLVQTYNQLFEENPINASGVDAKAILSARLSKSRRLENLIAQLPGEKKNGLFGNLIALSLGLTPNFKSNFDLAEDAKLQLSKDTYDDDLDNLLAQIGDQYADLFLAAKNLSDAILLSDILRVNTEITKAPLSASMIKRYDEHHQDLTLLKALVRQQLPEKYKEIFFDQSKNGYAGYIDGGASQEEFYKFIKPILEKMDGTEELLVKLNREDLLRKQRTFDNGSIPHQIHLGELHAILRRQEDFYPFLKDNREKIEKILTFRIPYYVGPLARGNSRFAWMTRKSEETITPWNFEEVVDKGASAQSFIERMTNFDKNLPNEKVLPKHSLLYEYFTVYNELTKVKYVTEGMRKPAFLSGEQKKAIVDLLFKTNRKVTVKQLKEDYFKKIECFDSVEISGVEDRFNASLGTYHDLLKIIKDKDFLDNEENEDILEDIVLTLTLFEDREMIEERLKTYAHLFDDKVMKQLKRRRYTGWGRLSRKLINGIRDKQSGKTILDFLKSDGFANRNFMQLIHDDSLTFKEDIQKAQVSGQGDSLHEHIANLAGSPAIKKGILQTVKVVDELVKVMGRHKPENIVIEMARENQTTQKGQKNSRERMKRIEEGIKELGSQILKEHPVENTQLQNEKLYLYYLQNGRDMYVDQELDINRLSDYDVDHIVPQSFLKDDSIDNKVLTRSDKARGKSDNVPSEEVVKKMKNYWRQLLNAKLITQRKFDNLTKAERGGLSELDKAGFIKRQLVETRQITKHVAQILDSRMNTKYDENDKLIREVKVITLKSKLVSDFRKDFQFYKVREINNYHHAHDAYLNAVVGTALIKKYPKLESEFVYGDYKVYDVRKMIAKSEQEIGKATAKYFFYSNIMNFFKTEITLANGEIRKRPLIETNGETGEIVWDKGRDFATVRKVLSMPQVNIVKKTEVQTGGFSKESILPKRNSDKLIARKKDWDPKKYGGFDSPTVAYSVLVVAKVEKGKSKKLKSVKELLGITIMERSSFEKNPIDFLEAKGYKEVKKDLIIKLPKYSLFELENGRKRMLASAGELQKGNELALPSKYVNFLYLASHYEKLKGSPEDNEQKQLFVEQHKHYLDEIIEQISEFSKRVILADANLDKVLSAYNKHRDKPIREQAENIIHLFTLTNLGAPAAFKYFDTTIDRKRYTSTKEVLDATLIHQSITGLYETRIDLSQLGGDGGPAPGGSEAAAKGGTVSLQDEHRLFDIPVTTSLPDVWLQDFPQAWAETGGLGRAKCQAPIIIDLKPTAVPVSIKQYPMSLEAHMGIRQHIIKFLELGVLRPCRSPWNTPLLPVKKPGTQDYRPVQDLREINKRTVDIHPTVPNPYNLLSTLKPDYSWYTVLDLKDAFFCLPLAPQSQELFAFEWKDPERGISGQLTWTRLPQGFKNSPTLFNEALHRDLTDFRTQHPEVTLLQYVDDLLLAAPTKKACTQGTRHLLQELGEKGYRASAKKAQICQTKVTYLGYILSEGKRWLTPGRIETVARIPPPRNPREVREFLGTAGFCRLWIPGFAELAAPLYALTKPSTPFTWQTEHQLAFEALKKALLSAPALGLPDTSKPFTLFLDERQGIAKGVLTQKLGPWKRPVAYLSKKLDPVAAGWPPCLRIMAATAMLVKDSAKLTLGQPLTVITPHTLEAIVRQPPDRWITNARLTHYQALLLDTDRVQFGPPVTLNPATLLPVPENQPSPHDCRQVLAETHGTREDLKDQELPDADHTWYTDGSSYLDSGTRRAGAAVVDGHNTIWAQSLPPGTSAQKAELIALTKALELSKGKKANIYTDSRYAFATAHTHGSIYERRGWLTSEGKEIKNKAEIIALLKALFLPQEVAIIHCPGHQKGQDPVAVGNRQADRVARQAAMAEVLTLATEPDNTSHITAGKRTADGSEFEKRTADGSEFESPKKKAKVE

SEQ ID NO: 1556 - protein, 2097 aa, synthetic construct
MPAAKRVKLDGGDKKYSIGLDIGTNSVGWAVITDEYKVPSKKFKVLGNTDRHSIKKNLIGALLFDSGETAEATRLKRTARRRYTRRKNRICYLQEIFSNEMAKVDDSFFHRLEESFLVEEDKKHERHPIFGNIVDEVAYHEKYPTIYHLRKKLVDSTDKADLRLIYLALAHMIKFRGHFLIEGDLNPDNSDVDKLFIQLVQTYNQLFEENPINASGVDAKAILSARLSKSRRLENLIAQLPGEKKNGLFGNLIALSLGLTPNFKSNFDLAEDAKLQLSKDTYDDDLDNLLAQIGDQYADLFLAAKNLSDAILLSDILRVNTEITKAPLSASMIKRYDEHHQDLTLLKALVRQQLPEKYKEIFFDQSKNGYAGYIDGGASQEEFYKFIKPILEKMDGTEELLVKLNREDLLRKQRTFDNGSIPHQIHLGELHAILRRQEDFYPFLKDNREKIEKILTFRIPYYVGPLARGNSRFAWMTRKSEETITPWNFEEVVDKGASAQSFIERMTNFDKNLPNEKVLPKHSLLYEYFTVYNELTKVKYVTEGMRKPAFLSGEQKKAIVDLLFKTNRKVTVKQLKEDYFKKIECFDSVEISGVEDRFNASLGTYHDLLKIIKDKDFLDNEENEDILEDIVLTLTLFEDREMIEERLKTYAHLFDDKVMKQLKRRRYTGWGRLSRKLINGIRDKQSGKTILDFLKSDGFANRNFMQLIHDDSLTFKEDIQKAQVSGQGDSLHEHIANLAGSPAIKKGILQTVKVVDELVKVMGRHKPENIVIEMARENQTTQKGQKNSRERMKRIEEGIKELGSQILKEHPVENTQLQNEKLYLYYLQNGRDMYVDQELDINRLSDYDVDHIVPQSFLKDDSIDNKVLTRSDKARGKSDNVPSEEVVKKMKNYWRQLLNAKLITQRKFDNLTKAERGGLSELDKAGFIKRQLVETRQITKHVAQILDSRMNTKYDENDKLIREVKVITLKSKLVSDFRKDFQFYKVREINNYHHAHDAYLNAVVGTALIKKYPKLESEFVYGDYKVYDVRKMIAKSEQEIGKATAKYFFYSNIMNFFKTEITLANGEIRKRPLIETNGETGEIVWDKGRDFATVRKVLSMPQVNIVKKTEVQTGGFSKESILPKRNSDKLIARKKDWDPKKYGGFDSPTVAYSVLVVAKVEKGKSKKLKSVKELLGITIMERSSFEKNPIDFLEAKGYKEVKKDLIIKLPKYSLFELENGRKRMLASAGELQKGNELALPSKYVNFLYLASHYEKLKGSPEDNEQKQLFVEQHKHYLDEIIEQISEFSKRVILADANLDKVLSAYNKHRDKPIREQAENIIHLFTLTNLGAPAAFKYFDTTIDRKRYTSTKEVLDATLIHQSITGLYETRIDLSQLGGDGGGGSGGSGGTVSLQDEHRLFDIPVTTSLPDVWLQDFPQAWAETGGLGRAKCQAPIIIDLKPTAVPVSIKQYPMSLEAHMGIRQHIIKFLELGVLRPCRSPWNTPLLPVKKPGTQDYRPVQDLREINKRTVDIHPTVPNPYNLLSTLKPDYSWYTVLDLKDAFFCLPLAPQSQELFAFEWKDPERGISGQLTWTRLPQGFKNSPTLFNEALHRDLTDFRTQHPEVTLLQYVDDLLLAAPTKKACTQGTRHLLQELGEKGYRASAKKAQICQTKVTYLGYILSEGKRWLTPGRIETVARIPPPRNPREVREFLGTAGFCRLWIPGFAELAAPLYALTKPSTPFTWQTEHQLAFEALKKALLSAPALGLPDTSKPFTLFLDERQGIAKGVLTQKLGPWKRPVAYLSKKLDPVAAGWPPCLRIMAATAMLVKDSAKLTLGQPLTVITPHTLEAIVRQPPDRWITNARLTHYQALLLDTDRVQFGPPVTLNPATLLPVPENQPSPHDCRQVLAETHGTREDLKDQELPDADHTWYTDGSSYLDSGTRRAGAAVVDGHNTIWAQSLPPGTSAQKAELIALTKALELSKGKKANIYTDSRYAFATAHTHGSIYERRGWLTSEGKEIKNKAEIIALLKALFLPQEVAIIHCPGHQKGQDPVAVGNRQADRVARQAAMAEVLTLATEPDNTSHITAGKRTADGSEFEKRTADGSEFESPKKKAKVE

SEQ ID NO: 1557 - protein, 2099 aa, synthetic construct
MPAAKRVKLDGGDKKYSIGLDIGTNSVGWAVITDEYKVPSKKFKVLGNTDRHSIKKNLIGALLFDSGETAEATRLKRTARRRYTRRKNRICYLQEIFSNEMAKVDDSFFHRLEESFLVEEDKKHERHPIFGNIVDEVAYHEKYPTIYHLRKKLVDSTDKADLRLIYLALAHMIKFRGHFLIEGDLNPDNSDVDKLFIQLVQTYNQLFEENPINASGVDAKAILSARLSKSRRLENLIAQLPGEKKNGLFGNLIALSLGLTPNFKSNFDLAEDAKLQLSKDTYDDDLDNLLAQIGDQYADLFLAAKNLSDAILLSDILRVNTEITKAPLSASMIKRYDEHHQDLTLLKALVRQQLPEKYKEIFFDQSKNGYAGYIDGGASQEEFYKFIKPILEKMDGTEELLVKLNREDLLRKQRTFDNGSIPHQIHLGELHAILRRQEDFYPFLKDNREKIEKILTFRIPYYVGPLARGNSRFAWMTRKSEETITPWNFEEVVDKGASAQSFIERMTNFDKNLPNEKVLPKHSLLYEYFTVYNELTKVKYVTEGMRKPAFLSGEQKKAIVDLLFKTNRKVTVKQLKEDYFKKIECFDSVEISGVEDRFNASLGTYHDLLKIIKDKDFLDNEENEDILEDIVLTLTLFEDREMIEERLKTYAHLFDDKVMKQLKRRRYTGWGRLSRKLINGIRDKQSGKTILDFLKSDGFANRNFMQLIHDDSLTFKEDIQKAQVSGQGDSLHEHIANLAGSPAIKKGILQTVKVVDELVKVMGRHKPENIVIEMARENQTTQKGQKNSRERMKRIEEGIKELGSQILKEHPVENTQLQNEKLYLYYLQNGRDMYVDQELDINRLSDYDVDHIVPQSFLKDDSIDNKVLTRSDKARGKSDNVPSEEVVKKMKNYWRQLLNAKLITQRKFDNLTKAERGGLSELDKAGFIKRQLVETRQITKHVAQILDSRMNTKYDENDKLIREVKVITLKSKLVSDFRKDFQFYKVREINNYHHAHDAYLNAVVGTALIKKYPKLESEFVYGDYKVYDVRKMIAKSEQEIGKATAKYFFYSNIMNFFKTEITLANGEIRKRPLIETNGETGEIVWDKGRDFATVRKVLSMPQVNIVKKTEVQTGGFSKESILPKRNSDKLIARKKDWDPKKYGGFDSPTVAYSVLVVAKVEKGKSKKLKSVKELLGITIMERSSFEKNPIDFLEAKGYKEVKKDLIIKLPKYSLFELENGRKRMLASAGELQKGNELALPSKYVNFLYLASHYEKLKGSPEDNEQKQLFVEQHKHYLDEIIEQISEFSKRVILADANLDKVLSAYNKHRDKPIREQAENIIHLFTLTNLGAPAAFKYFDTTIDRKRYTSTKEVLDATLIHQSITGLYETRIDLSQLGGDGGEAAAKGGSGGTVSLQDEHRLFDIPVTTSLPDVWLQDFPQAWAETGGLGRAKCQAPIIIDLKPTAVPVSIKQYPMSLEAHMGIRQHIIKFLELGVLRPCRSPWNTPLLPVKKPGTQDYRPVQDLREINKRTVDIHPTVPNPYNLLSTLKPDYSWYTVLDLKDAFFCLPLAPQSQELFAFEWKDPERGISGQLTWTRLPQGFKNSPTLFNEALHRDLTDFRTQHPEVTLLQYVDDLLLAAPTKKACTQGTRHLLQELGEKGYRASAKKAQICQTKVTYLGYILSEGKRWLTPGRIETVARIPPPRNPREVREFLGTAGFCRLWIPGFAELAAPLYALTKPSTPFTWQTEHQLAFEALKKALLSAPALGLPDTSKPFTLFLDERQGIAKGVLTQKLGPWKRPVAYLSKKLDPVAAGWPPCLRIMAATAMLVKDSAKLTLGQPLTVITPHTLEAIVRQPPDRWITNARLTHYQALLLDTDRVQFGPPVTLNPATLLPVPENQPSPHDCRQVLAETHGTREDLKDQELPDADHTWYTDGSSYLDSGTRRAGAAVVDGHNTIWAQSLPPGTSAQKAELIALTKALELSKGKKANIYTDSRYAFATAHTHGSIYERRGWLTSEGKEIKNKAEIIALLKALFLPQEVAIIHCPGHQKGQDPVAVGNRQADRVARQAAMAEVLTLATEPDNTSHITAGKRTADGSEFEKRTADGSEFESPKKKAKVE

SEQ ID NO: 1558 - protein, 2097 aa, synthetic construct
MPAAKRVKLDGGDKKYSIGLDIGTNSVGWAVITDEYKVPSKKFKVLGNTDRHSIKKNLIGALLFDSGETAEATRLKRTARRRYTRRKNRICYLQEIFSNEMAKVDDSFFHRLEESFLVEEDKKHERHPIFGNIVDEVAYHEKYPTIYHLRKKLVDSTDKADLRLIYLALAHMIKFRGHFLIEGDLNPDNSDVDKLFIQLVQTYNQLFEENPINASGVDAKAILSARLSKSRRLENLIAQLPGEKKNGLFGNLIALSLGLTPNFKSNFDLAEDAKLQLSKDTYDDDLDNLLAQIGDQYADLFLAAKNLSDAILLSDILRVNTEITKAPLSASMIKRYDEHHQDLTLLKALVRQQLPEKYKEIFFDQSKNGYAGYIDGGASQEEFYKFIKPILEKMDGTEELLVKLNREDLLRKQRTFDNGSIPHQIHLGELHAILRRQEDFYPFLKDNREKIEKILTFRIPYYVGPLARGNSRFAWMTRKSEETITPWNFEEVVDKGASAQSFIERMTNFDKNLPNEKVLPKHSLLYEYFTVYNELTKVKYVTEGMRKPAFLSGEQKKAIVDLLFKTNRKVTVKQLKEDYFKKIECFDSVEISGVEDRFNASLGTYHDLLKIIKDKDFLDNEENEDILEDIVLTLTLFEDREMIEERLKTYAHLFDDKVMKQLKRRRYTGWGRLSRKLINGIRDKQSGKTILDFLKSDGFANRNFMQLIHDDSLTFKEDIQKAQVSGQGDSLHEHIANLAGSPAIKKGILQTVKVVDELVKVMGRHKPENIVIEMARENQTTQKGQKNSRERMKRIEEGIKELGSQILKEHPVENTQLQNEKLYLYYLQNGRDMYVDQELDINRLSDYDVDHIVPQSFLKDDSIDNKVLTRSDKARGKSDNVPSEEVVKKMKNYWRQLLNAKLITQRKFDNLTKAERGGLSELDKAGFIKRQLVETRQITKHVAQILDSRMNTKYDENDKLIREVKVITLKSKLVSDFRKDFQFYKVREINNYHHAHDAYLNAVVGTALIKKYPKLESEFVYGDYKVYDVRKMIAKSEQEIGKATAKYFFYSNIMNFFKTEITLANGEIRKRPLIETNGETGEIVWDKGRDFATVRKVLSMPQVNIVKKTEVQTGGFSKESILPKRNSDKLIARKKDWDPKKYGGFDSPTVAYSVLVVAKVEKGKSKKLKSVKELLGITIMERSSFEKNPIDFLEAKGYKEVKKDLIIKLPKYSLFELENGRKRMLASAGELQKGNELALPSKYVNFLYLASHYEKLKGSPEDNEQKQLFVEQHKHYLDEIIEQISEFSKRVILADANLDKVLSAYNKHRDKPIREQAENIIHLFTLTNLGAPAAFKYFDTTIDRKRYTSTKEVLDATLIHQSITGLYETRIDLSQLGGDGGPAPGSSGGTVSLQDEHRLFDIPVTTSLPDVWLQDFPQAWAETGGLGRAKCQAPIIIDLKPTAVPVSIKQYPMSLEAHMGIRQHIIKFLELGVLRPCRSPWNTPLLPVKKPGTQDYRPVQDLREINKRTVDIHPTVPNPYNLLSTLKPDYSWYTVLDLKDAFFCLPLAPQSQELFAFEWKDPERGISGQLTWTRLPQGFKNSPTLFNEALHRDLTDFRTQHPEVTLLQYVDDLLLAAPTKKACTQGTRHLLQELGEKGYRASAKKAQICQTKVTYLGYILSEGKRWLTPGRIETVARIPPPRNPREVREFLGTAGFCRLWIPGFAELAAPLYALTKPSTPFTWQTEHQLAFEALKKALLSAPALGLPDTSKPFTLFLDERQGIAKGVLTQKLGPWKRPVAYLSKKLDPVAAGWPPCLRIMAATAMLVKDSAKLTLGQPLTVITPHTLEAIVRQPPDRWITNARLTHYQALLLDTDRVQFGPPVTLNPATLLPVPENQPSPHDCRQVLAETHGTREDLKDQELPDADHTWYTDGSSYLDSGTRRAGAAVVDGHNTIWAQSLPPGTSAQKAELIALTKALELSKGKKANIYTDSRYAFATAHTHGSIYERRGWLTSEGKEIKNKAEIIALLKALFLPQEVAIIHCPGHQKGQDPVAVGNRQADRVARQAAMAEVLTLATEPDNTSHITAGKRTADGSEFEKRTADGSEFESPKKKAKVE

SEQ ID NO: 1559 - protein, 2096 aa, synthetic construct
MPAAKRVKLDGGDKKYSIGLDIGTNSVGWAVITDEYKVPSKKFKVLGNTDRHSIKKNLIGALLFDSGETAEATRLKRTARRRYTRRKNRICYLQEIFSNEMAKVDDSFFHRLEESFLVEEDKKHERHPIFGNIVDEVAYHEKYPTIYHLRKKLVDSTDKADLRLIYLALAHMIKFRGHFLIEGDLNPDNSDVDKLFIQLVQTYNQLFEENPINASGVDAKAILSARLSKSRRLENLIAQLPGEKKNGLFGNLIALSLGLTPNFKSNFDLAEDAKLQLSKDTYDDDLDNLLAQIGDQYADLFLAAKNLSDAILLSDILRVNTEITKAPLSASMIKRYDEHHQDLTLLKALVRQQLPEKYKEIFFDQSKNGYAGYIDGGASQEEFYKFIKPILEKMDGTEELLVKLNREDLLRKQRTFDNGSIPHQIHLGELHAILRRQEDFYPFLKDNREKIEKILTFRIPYYVGPLARGNSRFAWMTRKSEETITPWNFEEVVDKGASAQSFIERMTNFDKNLPNEKVLPKHSLLYEYFTVYNELTKVKYVTEGMRKPAFLSGEQKKAIVDLLFKTNRKVTVKQLKEDYFKKIECFDSVEISGVEDRFNASLGTYHDLLKIIKDKDFLDNEENEDILEDIVLTLTLFEDREMIEERLKTYAHLFDDKVMKQLKRRRYTGWGRLSRKLINGIRDKQSGKTILDFLKSDGFANRNFMQLIHDDSLTFKEDIQKAQVSGQGDSLHEHIANLAGSPAIKKGILQTVKVVDELVKVMGRHKPENIVIEMARENQTTQKGQKNSRERMKRIEEGIKELGSQILKEHPVENTQLQNEKLYLYYLQNGRDMYVDQELDINRLSDYDVDHIVPQSFLKDDSIDNKVLTRSDKARGKSDNVPSEEVVKKMKNYWRQLLNAKLITQRKFDNLTKAERGGLSELDKAGFIKRQLVETRQITKHVAQILDSRMNTKYDENDKLIREVKVITLKSKLVSDFRKDFQFYKVREINNYHHAHDAYLNAVVGTALIKKYPKLESEFVYGDYKVYDVRKMIAKSEQEIGKATAKYFFYSNIMNFFKTEITLANGEIRKRPLIETNGETGEIVWDKGRDFATVRKVLSMPQVNIVKKTEVQTGGFSKESILPKRNSDKLIARKKDWDPKKYGGFDSPTVAYSVLVVAKVEKGKSKKLKSVKELLGITIMERSSFEKNPIDFLEAKGYKEVKKDLIIKLPKYSLFELENGRKRMLASAGELQKGNELALPSKYVNFLYLASHYEKLKGSPEDNEQKQLFVEQHKHYLDEIIEQISEFSKRVILADANLDKVLSAYNKHRDKPIREQAENIIHLFTLTNLGAPAAFKYFDTTIDRKRYTSTKEVLDATLIHQSITGLYETRIDLSQLGGDGGGGGGSGGTVSLQDEHRLFDIPVTTSLPDVWLQDFPQAWAETGGLGRAKCQAPIIIDLKPTAVPVSIKQYPMSLEAHMGIRQHIIKFLELGVLRPCRSPWNTPLLPVKKPGTQDYRPVQDLREINKRTVDIHPTVPNPYNLLSTLKPDYSWYTVLDLKDAFFCLPLAPQSQELFAFEWKDPERGISGQLTWTRLPQGFKNSPTLFNEALHRDLTDFRTQHPEVTLLQYVDDLLLAAPTKKACTQGTRHLLQELGEKGYRASAKKAQICQTKVTYLGYILSEGKRWLTPGRIETVARIPPPRNPREVREFLGTAGFCRLWIPGFAELAAPLYALTKPSTPFTWQTEHQLAFEALKKALLSAPALGLPDTSKPFTLFLDERQGIAKGVLTQKLGPWKRPVAYLSKKLDPVAAGWPPCLRIMAATAMLVKDSAKLTLGQPLTVITPHTLEAIVRQPPDRWITNARLTHYQALLLDTDRVQFGPPVTLNPATLLPVPENQPSPHDCRQVLAETHGTREDLKDQELPDADHTWYTDGSSYLDSGTRRAGAAVVDGHNTIWAQSLPPGTSAQKAELIALTKALELSKGKKANIYTDSRYAFATAHTHGSIYERRGWLTSEGKEIKNKAEIIALLKALFLPQEVAIIHCPGHQKGQDPVAVGNRQADRVARQAAMAEVLTLATEPDNTSHITAGKRTADGSEFEKRTADGSEFESPKKKAKVE

SEQ ID NO: 1560 - protein, 2098 aa, synthetic construct
MPAAKRVKLDGGDKKYSIGLDIGTNSVGWAVITDEYKVPSKKFKVLGNTDRHSIKKNLIGALLFDSGETAEATRLKRTARRRYTRRKNRICYLQEIFSNEMAKVDDSFFHRLEESFLVEEDKKHERHPIFGNIVDEVAYHEKYPTIYHLRKKLVDSTDKADLRLIYLALAHMIKFRGHFLIEGDLNPDNSDVDKLFIQLVQTYNQLFEENPINASGVDAKAILSARLSKSRRLENLIAQLPGEKKNGLFGNLIALSLGLTPNFKSNFDLAEDAKLQLSKDTYDDDLDNLLAQIGDQYADLFLAAKNLSDAILLSDILRVNTEITKAPLSASMIKRYDEHHQDLTLLKALVRQQLPEKYKEIFFDQSKNGYAGYIDGGASQEEFYKFIKPILEKMDGTEELLVKLNREDLLRKQRTFDNGSIPHQIHLGELHAILRRQEDFYPFLKDNREKIEKILTFRIPYYVGPLARGNSRFAWMTRKSEETITPWNFEEVVDKGASAQSFIERMTNFDKNLPNEKVLPKHSLLYEYFTVYNELTKVKYVTEGMRKPAFLSGEQKKAIVDLLFKTNRKVTVKQLKEDYFKKIECFDSVEISGVEDRFNASLGTYHDLLKIIKDKDFLDNEENEDILEDIVLTLTLFEDREMIEERLKTYAHLFDDKVMKQLKRRRYTGWGRLSRKLINGIRDKQSGKTILDFLKSDGFANRNFMQLIHDDSLTFKEDIQKAQVSGQGDSLHEHIANLAGSPAIKKGILQTVKVVDELVKVMGRHKPENIVIEMARENQTTQKGQKNSRERMKRIEEGIKELGSQILKEHPVENTQLQNEKLYLYYLQNGRDMYVDQELDINRLSDYDVDHIVPQSFLKDDSIDNKVLTRSDKARGKSDNVPSEEVVKKMKNYWRQLLNAKLITQRKFDNLTKAERGGLSELDKAGFIKRQLVETRQITKHVAQILDSRMNTKYDENDKLIREVKVITLKSKLVSDFRKDFQFYKVREINNYHHAHDAYLNAVVGTALIKKYPKLESEFVYGDYKVYDVRKMIAKSEQEIGKATAKYFFYSNIMNFFKTEITLANGEIRKRPLIETNGETGEIVWDKGRDFATVRKVLSMPQVNIVKKTEVQTGGFSKESILPKRNSDKLIARKKDWDPKKYGGFDSPTVAYSVLVVAKVEKGKSKKLKSVKELLGITIMERSSFEKNPIDFLEAKGYKEVKKDLIIKLPKYSLFELENGRKRMLASAGELQKGNELALPSKYVNFLYLASHYEKLKGSPEDNEQKQLFVEQHKHYLDEIIEQISEFSKRVILADANLDKVLSAYNKHRDKPIREQAENIIHLFTLTNLGAPAAFKYFDTTIDRKRYTSTKEVLDATLIHQSITGLYETRIDLSQLGGDGGGGGGGGGGGTVSLQDEHRLFDIPVTTSLPDVWLQDFPQAWAETGGLGRAKCQAPIIIDLKPTAVPVSIKQYPMSLEAHMGIRQHIIKFLELGVLRPCRSPWNTPLLPVKKPGTQDYRPVQDLREINKRTVDIHPTVPNPYNLLSTLKPDYSWYTVLDLKDAFFCLPLAPQSQELFAFEWKDPERGISGQLTWTRLPQGFKNSPTLFNEALHRDLTDFRTQHPEVTLLQYVDDLLLAAPTKKACTQGTRHLLQELGEKGYRASAKKAQICQTKVTYLGYILSEGKRWLTPGRIETVARIPPPRNPREVREFLGTAGFCRLWIPGFAELAAPLYALTKPSTPFTWQTEHQLAFEALKKALLSAPALGLPDTSKPFTLFLDERQGIAKGVLTQKLGPWKRPVAYLSKKLDPVAAGWPPCLRIMAATAMLVKDSAKLTLGQPLTVITPHTLEAIVRQPPDRWITNARLTHYQALLLDTDRVQFGPPVTLNPATLLPVPENQPSPHDCRQVLAETHGTREDLKDQELPDADHTWYTDGSSYLDSGTRRAGAAVVDGHNTIWAQSLPPGTSAQKAELIALTKALELSKGKKANIYTDSRYAFATAHTHGSIYERRGWLTSEGKEIKNKAEIIALLKALFLPQEVAIIHCPGHQKGQDPVAVGNRQADRVARQAAMAEVLTLATEPDNTSHITAGKRTADGSEFEKRTADGSEFESPKKKAKVE

SEQ ID NO: 1561 - protein, 2106 aa, synthetic construct
MPAAKRVKLDGGDKKYSIGLDIGTNSVGWAVITDEYKVPSKKFKVLGNTDRHSIKKNLIGALLFDSGETAEATRLKRTARRRYTRRKNRICYLQEIFSNEMAKVDDSFFHRLEESFLVEEDKKHERHPIFGNIVDEVAYHEKYPTIYHLRKKLVDSTDKADLRLIYLALAHMIKFRGHFLIEGDLNPDNSDVDKLFIQLVQTYNQLFEENPINASGVDAKAILSARLSKSRRLENLIAQLPGEKKNGLFGNLIALSLGLTPNFKSNFDLAEDAKLQLSKDTYDDDLDNLLAQIGDQYADLFLAAKNLSDAILLSDILRVNTEITKAPLSASMIKRYDEHHQDLTLLKALVRQQLPEKYKEIFFDQSKNGYAGYIDGGASQEEFYKFIKPILEKMDGTEELLVKLNREDLLRKQRTFDNGSIPHQIHLGELHAILRRQEDFYPFLKDNREKIEKILTFRIPYYVGPLARGNSRFAWMTRKSEETITPWNFEEVVDKGASAQSFIERMTNFDKNLPNEKVLPKHSLLYEYFTVYNELTKVKYVTEGMRKPAFLSGEQKKAIVDLLFKTNRKVTVKQLKEDYFKKIECFDSVEISGVEDRFNASLGTYHDLLKIIKDKDFLDNEENEDILEDIVLTLTLFEDREMIEERLKTYAHLFDDKVMKQLKRRRYTGWGRLSRKLINGIRDKQSGKTILDFLKSDGFANRNFMQLIHDDSLTFKEDIQKAQVSGQGDSLHEHIANLAGSPAIKKGILQTVKVVDELVKVMGRHKPENIVIEMARENQTTQKGQKNSRERMKRIEEGIKELGSQILKEHPVENTQLQNEKLYLYYLQNGRDMYVDQELDINRLSDYDVDHIVPQSFLKDDSIDNKVLTRSDKARGKSDNVPSEEVVKKMKNYWRQLLNAKLITQRKFDNLTKAERGGLSELDKAGFIKRQLVETRQITKHVAQILDSRMNTKYDENDKLIREVKVITLKSKLVSDFRKDFQFYKVREINNYHHAHDAYLNAVVGTALIKKYPKLESEFVYGDYKVYDVRKMIAKSEQEIGKATAKYFFYSNIMNFFKTEITLANGEIRKRPLIETNGETGEIVWDKGRDFATVRKVLSMPQVNIVKKTEVQTGGFSKESILPKRNSDKLIARKKDWDPKKYGGFDSPTVAYSVLVVAKVEKGKSKKLKSVKELLGITIMERSSFEKNPIDFLEAKGYKEVKKDLIIKLPKYSLFELENGRKRMLASAGELQKGNELALPSKYVNFLYLASHYEKLKGSPEDNEQKQLFVEQHKHYLDEIIEQISEFSKRVILADANLDKVLSAYNKHRDKPIREQAENIIHLFTLTNLGAPAAFKYFDTTIDRKRYTSTKEVLDATLIHQSITGLYETRIDLSQLGGDGGGGGGSEAAAKGGGGSGGTVSLQDEHRLFDIPVTTSLPDVWLQDFPQAWAETGGLGRAKCQAPIIIDLKPTAVPVSIKQYPMSLEAHMGIRQHIIKFLELGVLRPCRSPWNTPLLPVKKPGTQDYRPVQDLREINKRTVDIHPTVPNPYNLLSTLKPDYSWYTVLDLKDAFFCLPLAPQSQELFAFEWKDPERGISGQLTWTRLPQGFKNSPTLFNEALHRDLTDFRTQHPEVTLLQYVDDLLLAAPTKKACTQGTRHLLQELGEKGYRASAKKAQICQTKVTYLGYILSEGKRWLTPGRIETVARIPPPRNPREVREFLGTAGFCRLWIPGFAELAAPLYALTKPSTPFTWQTEHQLAFEALKKALLSAPALGLPDTSKPFTLFLDERQGIAKGVLTQKLGPWKRPVAYLSKKLDPVAAGWPPCLRIMAATAMLVKDSAKLTLGQPLTVITPHTLEAIVRQPPDRWITNARLTHYQALLLDTDRVQFGPPVTLNPATLLPVPENQPSPHDCRQVLAETHGTREDLKDQELPDADHTWYTDGSSYLDSGTRRAGAAVVDGHNTIWAQSLPPGTSAQKAELIALTKALELSKGKKANIYTDSRYAFATAHTHGSIYERRGWLTSEGKEIKNKAEIIALLKALFLPQEVAIIHCPGHQKGQDPVAVGNRQADRVARQAAMAEVLTLATEPDNTSHITAGKRTADGSEFEKRTADGSEFESPKKKAKVE

SEQ ID NO: 1562 - protein, 2111 aa, synthetic construct
MPAAKRVKLDGGDKKYSIGLDIGTNSVGWAVITDEYKVPSKKFKVLGNTDRHSIKKNLIGALLFDSGETAEATRLKRTARRRYTRRKNRICYLQEIFSNEMAKVDDSFFHRLEESFLVEEDKKHERHPIFGNIVDEVAYHEKYPTIYHLRKKLVDSTDKADLRLIYLALAHMIKFRGHFLIEGDLNPDNSDVDKLFIQLVQTYNQLFEENPINASGVDAKAILSARLSKSRRLENLIAQLPGEKKNGLFGNLIALSLGLTPNFKSNFDLAEDAKLQLSKDTYDDDLDNLLAQIGDQYADLFLAAKNLSDAILLSDILRVNTEITKAPLSASMIKRYDEHHQDLTLLKALVRQQLPEKYKEIFFDQSKNGYAGYIDGGASQEEFYKFIKPILEKMDGTEELLVKLNREDLLRKQRTFDNGSIPHQIHLGELHAILRRQEDFYPFLKDNREKIEKILTFRIPYYVGPLARGNSRFAWMTRKSEETITPWNFEEVVDKGASAQSFIERMTNFDKNLPNEKVLPKHSLLYEYFTVYNELTKVKYVTEGMRKPAFLSGEQKKAIVDLLFKTNRKVTVKQLKEDYFKKIECFDSVEISGVEDRFNASLGTYHDLLKIIKDKDFLDNEENEDILEDIVLTLTLFEDREMIEERLKTYAHLFDDKVMKQLKRRRYTGWGRLSRKLINGIRDKQSGKTILDFLKSDGFANRNFMQLIHDDSLTFKEDIQKAQVSGQGDSLHEHIANLAGSPAIKKGILQTVKVVDELVKVMGRHKPENIVIEMARENQTTQKGQKNSRERMKRIEEGIKELGSQILKEHPVENTQLQNEKLYLYYLQNGRDMYVDQELDINRLSDYDVDHIVPQSFLKDDSIDNKVLTRSDKARGKSDNVPSEEVVKKMKNYWRQLLNAKLITQRKFDNLTKAERGGLSELDKAGFIKRQLVETRQITKHVAQILDSRMNTKYDENDKLIREVKVITLKSKLVSDFRKDFQFYKVREINNYHHAHDAYLNAVVGTALIKKYPKLESEFVYGDYKVYDVRKMIAKSEQEIGKATAKYFFYSNIMNFFKTEITLANGEIRKRPLIETNGETGEIVWDKGRDFATVRKVLSMPQVNIVKKTEVQTGGFSKESILPKRNSDKLIARKKDWDPKKYGGFDSPTVAYSVLVVAKVEKGKSKKLKSVKELLGITIMERSSFEKNPIDFLEAKGYKEVKKDLIIKLPKYSLFELENGRKRMLASAGELQKGNELALPSKYVNFLYLASHYEKLKGSPEDNEQKQLFVEQHKHYLDEIIEQISEFSKRVILADANLDKVLSAYNKHRDKPIREQAENIIHLFTLTNLGAPAAFKYFDTTIDRKRYTSTKEVLDATLIHQSITGLYETRIDLSQLGGDGGEAAAKEAAAKEAAAKEAAAKGGTVSLQDEHRLFDIPVTTSLPDVWLQDFPQAWAETGGLGRAKCQAPIIIDLKPTAVPVSIKQYPMSLEAHMGIRQHIIKFLELGVLRPCRSPWNTPLLPVKKPGTQDYRPVQDLREINKRTVDIHPTVPNPYNLLSTLKPDYSWYTVLDLKDAFFCLPLAPQSQELFAFEWKDPERGISGQLTWTRLPQGFKNSPTLFNEALHRDLTDFRTQHPEVTLLQYVDDLLLAAPTKKACTQGTRHLLQELGEKGYRASAKKAQICQTKVTYLGYILSEGKRWLTPGRIETVARIPPPRNPREVREFLGTAGFCRLWIPGFAELAAPLYALTKPSTPFTWQTEHQLAFEALKKALLSAPALGLPDTSKPFTLFLDERQGIAKGVLTQKLGPWKRPVAYLSKKLDPVAAGWPPCLRIMAATAMLVKDSAKLTLGQPLTVITPHTLEAIVRQPPDRWITNARLTHYQALLLDTDRVQFGPPVTLNPATLLPVPENQPSPHDCRQVLAETHGTREDLKDQELPDADHTWYTDGSSYLDSGTRRAGAAVVDGHNTIWAQSLPPGTSAQKAELIALTKALELSKGKKANIYTDSRYAFATAHTHGSIYERRGWLTSEGKEIKNKAEIIALLKALFLPQEVAIIHCPGHQKGQDPVAVGNRQADRVARQAAMAEVLTLATEPDNTSHITAGKRTADGSEFEKRTADGSEFESPKKKAKVE

SEQ ID NO: 1563 - protein, 2102 aa, synthetic construct
MPAAKRVKLDGGDKKYSIGLDIGTNSVGWAVITDEYKVPSKKFKVLGNTDRHSIKKNLIGALLFDSGETAEATRLKRTARRRYTRRKNRICYLQEIFSNEMAKVDDSFFHRLEESFLVEEDKKHERHPIFGNIVDEVAYHEKYPTIYHLRKKLVDSTDKADLRLIYLALAHMIKFRGHFLIEGDLNPDNSDVDKLFIQLVQTYNQLFEENPINASGVDAKAILSARLSKSRRLENLIAQLPGEKKNGLFGNLIALSLGLTPNFKSNFDLAEDAKLQLSKDTYDDDLDNLLAQIGDQYADLFLAAKNLSDAILLSDILRVNTEITKAPLSASMIKRYDEHHQDLTLLKALVRQQLPEKYKEIFFDQSKNGYAGYIDGGASQEEFYKFIKPILEKMDGTEELLVKLNREDLLRKQRTFDNGSIPHQIHLGELHAILRRQEDFYPFLKDNREKIEKILTFRIPYYVGPLARGNSRFAWMTRKSEETITPWNFEEVVDKGASAQSFIERMTNFDKNLPNEKVLPKHSLLYEYFTVYNELTKVKYVTEGMRKPAFLSGEQKKAIVDLLFKTNRKVTVKQLKEDYFKKIECFDSVEISGVEDRFNASLGTYHDLLKIIKDKDFLDNEENEDILEDIVLTLTLFEDREMIEERLKTYAHLFDDKVMKQLKRRRYTGWGRLSRKLINGIRDKQSGKTILDFLKSDGFANRNFMQLIHDDSLTFKEDIQKAQVSGQGDSLHEHIANLAGSPAIKKGILQTVKVVDELVKVMGRHKPENIVIEMARENQTTQKGQKNSRERMKRIEEGIKELGSQILKEHPVENTQLQNEKLYLYYLQNGRDMYVDQELDINRLSDYDVDHIVPQSFLKDDSIDNKVLTRSDKARGKSDNVPSEEVVKKMKNYWRQLLNAKLITQRKFDNLTKAERGGLSELDKAGFIKRQLVETRQITKHVAQILDSRMNTKYDENDKLIREVKVITLKSKLVSDFRKDFQFYKVREINNYHHAHDAYLNAVVGTALIKKYPKLESEFVYGDYKVYDVRKMIAKSEQEIGKATAKYFFYSNIMNFFKTEITLANGEIRKRPLIETNGETGEIVWDKGRDFATVRKVLSMPQVNIVKKTEVQTGGFSKESILPKRNSDKLIARKKDWDPKKYGGFDSPTVAYSVLVVAKVEKGKSKKLKSVKELLGITIMERSSFEKNPIDFLEAKGYKEVKKDLIIKLPKYSLFELENGRKRMLASAGELQKGNELALPSKYVNFLYLASHYEKLKGSPEDNEQKQLFVEQHKHYLDEIIEQISEFSKRVILADANLDKVLSAYNKHRDKPIREQAENIIHLFTLTNLGAPAAFKYFDTTIDRKRYTSTKEVLDATLIHQSITGLYETRIDLSQLGGDGGGGSEAAAKPAPGGTVSLQDEHRLFDIPVTTSLPDVWLQDFPQAWAETGGLGRAKCQAPIIIDLKPTAVPVSIKQYPMSLEAHMGIRQHIIKFLELGVLRPCRSPWNTPLLPVKKPGTQDYRPVQDLREINKRTVDIHPTVPNPYNLLSTLKPDYSWYTVLDLKDAFFCLPLAPQSQELFAFEWKDPERGISGQLTWTRLPQGFKNSPTLFNEALHRDLTDFRTQHPEVTLLQYVDDLLLAAPTKKACTQGTRHLLQELGEKGYRASAKKAQICQTKVTYLGYILSEGKRWLTPGRIETVARIPPPRNPREVREFLGTAGFCRLWIPGFAELAAPLYALTKPSTPFTWQTEHQLAFEALKKALLSAPALGLPDTSKPFTLFLDERQGIAKGVLTQKLGPWKRPVAYLSKKLDPVAAGWPPCLRIMAATAMLVKDSAKLTLGQPLTVITPHTLEAIVRQPPDRWITNARLTHYQALLLDTDRVQFGPPVTLNPATLLPVPENQPSPHDCRQVLAETHGTREDLKDQELPDADHTWYTDGSSYLDSGTRRAGAAVVDGHNTIWAQSLPPGTSAQKAELIALTKALELSKGKKANIYTDSRYAFATAHTHGSIYERRGWLTSEGKEIKNKAEIIALLKALFLPQEVAIIHCPGHQKGQDPVAVGNRQADRVARQAAMAEVLTLATEPDNTSHITAGKRTADGSEFEKRTADGSEFESPKKKAKVE

SEQ ID NO: 1564 - protein, 2096 aa, synthetic construct
MPAAKRVKLDGGDKKYSIGLDIGTNSVGWAVITDEYKVPSKKFKVLGNTDRHSIKKNLIGALLFDSGETAEATRLKRTARRRYTRRKNRICYLQEIFSNEMAKVDDSFFHRLEESFLVEEDKKHERHPIFGNIVDEVAYHEKYPTIYHLRKKLVDSTDKADLRLIYLALAHMIKFRGHFLIEGDLNPDNSDVDKLFIQLVQTYNQLFEENPINASGVDAKAILSARLSKSRRLENLIAQLPGEKKNGLFGNLIALSLGLTPNFKSNFDLAEDAKLQLSKDTYDDDLDNLLAQIGDQYADLFLAAKNLSDAILLSDILRVNTEITKAPLSASMIKRYDEHHQDLTLLKALVRQQLPEKYKEIFFDQSKNGYAGYIDGGASQEEFYKFIKPILEKMDGTEELLVKLNREDLLRKQRTFDNGSIPHQIHLGELHAILRRQEDFYPFLKDNREKIEKILTFRIPYYVGPLARGNSRFAWMTRKSEETITPWNFEEVVDKGASAQSFIERMTNFDKNLPNEKVLPKHSLLYEYFTVYNELTKVKYVTEGMRKPAFLSGEQKKAIVDLLFKTNRKVTVKQLKEDYFKKIECFDSVEISGVEDRFNASLGTYHDLLKIIKDKDFLDNEENEDILEDIVLTLTLFEDREMIEERLKTYAHLFDDKVMKQLKRRRYTGWGRLSRKLINGIRDKQSGKTILDFLKSDGFANRNFMQLIHDDSLTFKEDIQKAQVSGQGDSLHEHIANLAGSPAIKKGILQTVKVVDELVKVMGRHKPENIVIEMARENQTTQKGQKNSRERMKRIEEGIKELGSQILKEHPVENTQLQNEKLYLYYLQNGRDMYVDQELDINRLSDYDVDHIVPQSFLKDDSIDNKVLTRSDKARGKSDNVPSEEVVKKMKNYWRQLLNAKLITQRKFDNLTKAERGGLSELDKAGFIKRQLVETRQITKHVAQILDSRMNTKYDENDKLIREVKVITLKSKLVSDFRKDFQFYKVREINNYHHAHDAYLNAVVGTALIKKYPKLESEFVYGDYKVYDVRKMIAKSEQEIGKATAKYFFYSNIMNFFKTEITLANGEIRKRPLIETNGETGEIVWDKGRDFATVRKVLSMPQVNIVKKTEVQTGGFSKESILPKRNSDKLIARKKDWDPKKYGGFDSPTVAYSVLVVAKVEKGKSKKLKSVKELLGITIMERSSFEKNPIDFLEAKGYKEVKKDLIIKLPKYSLFELENGRKRMLASAGELQKGNELALPSKYVNFLYLASHYEKLKGSPEDNEQKQLFVEQHKHYLDEIIEQISEFSKRVILADANLDKVLSAYNKHRDKPIREQAENIIHLFTLTNLGAPAAFKYFDTTIDRKRYTSTKEVLDATLIHQSITGLYETRIDLSQLGGDGGPAPAPGGTVSLQDEHRLFDIPVTTSLPDVWLQDFPQAWAETGGLGRAKCQAPIIIDLKPTAVPVSIKQYPMSLEAHMGIRQHIIKFLELGVLRPCRSPWNTPLLPVKKPGTQDYRPVQDLREINKRTVDIHPTVPNPYNLLSTLKPDYSWYTVLDLKDAFFCLPLAPQSQELFAFEWKDPERGISGQLTWTRLPQGFKNSPTLFNEALHRDLTDFRTQHPEVTLLQYVDDLLLAAPTKKACTQGTRHLLQELGEKGYRASAKKAQICQTKVTYLGYILSEGKRWLTPGRIETVARIPPPRNPREVREFLGTAGFCRLWIPGFAELAAPLYALTKPSTPFTWQTEHQLAFEALKKALLSAPALGLPDTSKPFTLFLDERQGIAKGVLTQKLGPWKRPVAYLSKKLDPVAAGWPPCLRIMAATAMLVKDSAKLTLGQPLTVITPHTLEAIVRQPPDRWITNARLTHYQALLLDTDRVQFGPPVTLNPATLLPVPENQPSPHDCRQVLAETHGTREDLKDQELPDADHTWYTDGSSYLDSGTRRAGAAVVDGHNTIWAQSLPPGTSAQKAELIALTKALELSKGKKANIYTDSRYAFATAHTHGSIYERRGWLTSEGKEIKNKAEIIALLKALFLPQEVAIIHCPGHQKGQDPVAVGNRQADRVARQAAMAEVLTLATEPDNTSHITAGKRTADGSEFEKRTADGSEFESPKKKAKVE

SEQ ID NO: 1565 - protein, 2097 aa, synthetic construct
MPAAKRVKLDGGDKKYSIGLDIGTNSVGWAVITDEYKVPSKKFKVLGNTDRHSIKKNLIGALLFDSGETAEATRLKRTARRRYTRRKNRICYLQEIFSNEMAKVDDSFFHRLEESFLVEEDKKHERHPIFGNIVDEVAYHEKYPTIYHLRKKLVDSTDKADLRLIYLALAHMIKFRGHFLIEGDLNPDNSDVDKLFIQLVQTYNQLFEENPINASGVDAKAILSARLSKSRRLENLIAQLPGEKKNGLFGNLIALSLGLTPNFKSNFDLAEDAKLQLSKDTYDDDLDNLLAQIGDQYADLFLAAKNLSDAILLSDILRVNTEITKAPLSASMIKRYDEHHQDLTLLKALVRQQLPEKYKEIFFDQSKNGYAGYIDGGASQEEFYKFIKPILEKMDGTEELLVKLNREDLLRKQRTFDNGSIPHQIHLGELHAILRRQEDFYPFLKDNREKIEKILTFRIPYYVGPLARGNSRFAWMTRKSEETITPWNFEEVVDKGASAQSFIERMTNFDKNLPNEKVLPKHSLLYEYFTVYNELTKVKYVTEGMRKPAFLSGEQKKAIVDLLFKTNRKVTVKQLKEDYFKKIECFDSVEISGVEDRFNASLGTYHDLLKIIKDKDFLDNEENEDILEDIVLTLTLFEDREMIEERLKTYAHLFDDKVMKQLKRRRYTGWGRLSRKLINGIRDKQSGKTILDFLKSDGFANRNFMQLIHDDSLTFKEDIQKAQVSGQGDSLHEHIANLAGSPAIKKGILQTVKVVDELVKVMGRHKPENIVIEMARENQTTQKGQKNSRERMKRIEEGIKELGSQILKEHPVENTQLQNEKLYLYYLQNGRDMYVDQELDINRLSDYDVDHIVPQSFLKDDSIDNKVLTRSDKARGKSDNVPSEEVVKKMKNYWRQLLNAKLITQRKFDNLTKAERGGLSELDKAGFIKRQLVETRQITKHVAQILDSRMNTKYDENDKLIREVKVITLKSKLVSDFRKDFQFYKVREINNYHHAHDAYLNAVVGTALIKKYPKLESEFVYGDYKVYDVRKMIAKSEQEIGKATAKYFFYSNIMNFFKTEITLANGEIRKRPLIETNGETGEIVWDKGRDFATVRKVLSMPQVNIVKKTEVQTGGFSKESILPKRNSDKLIARKKDWDPKKYGGFDSPTVAYSVLVVAKVEKGKSKKLKSVKELLGITIMERSSFEKNPIDFLEAKGYKEVKKDLIIKLPKYSLFELENGRKRMLASAGELQKGNELALPSKYVNFLYLASHYEKLKGSPEDNEQKQLFVEQHKHYLDEIIEQISEFSKRVILADANLDKVLSAYNKHRDKPIREQAENIIHLFTLTNLGAPAAFKYFDTTIDRKRYTSTKEVLDATLIHQSITGLYETRIDLSQLGGDGGGGGGSSGGTVSLQDEHRLFDIPVTTSLPDVWLQDFPQAWAETGGLGRAKCQAPIIIDLKPTAVPVSIKQYPMSLEAHMGIRQHIIKFLELGVLRPCRSPWNTPLLPVKKPGTQDYRPVQDLREINKRTVDIHPTVPNPYNLLSTLKPDYSWYTVLDLKDAFFCLPLAPQSQELFAFEWKDPERGISGQLTWTRLPQGFKNSPTLFNEALHRDLTDFRTQHPEVTLLQYVDDLLLAAPTKKACTQGTRHLLQELGEKGYRASAKKAQICQTKVTYLGYILSEGKRWLTPGRIETVARIPPPRNPREVREFLGTAGFCRLWIPGFAELAAPLYALTKPSTPFTWQTEHQLAFEALKKALLSAPALGLPDTSKPFTLFLDERQGIAKGVLTQKLGPWKRPVAYLSKKLDPVAAGWPPCLRIMAATAMLVKDSAKLTLGQPLTVITPHTLEAIVRQPPDRWITNARLTHYQALLLDTDRVQFGPPVTLNPATLLPVPENQPSPHDCRQVLAETHGTREDLKDQELPDADHTWYTDGSSYLDSGTRRAGAAVVDGHNTIWAQSLPPGTSAQKAELIALTKALELSKGKKANIYTDSRYAFATAHTHGSIYERRGWLTSEGKEIKNKAEIIALLKALFLPQEVAIIHCPGHQKGQDPVAVGNRQADRVARQAAMAEVLTLATEPDNTSHITAGKRTADGSEFEKRTADGSEFESPKKKAKVE

SEQ ID NO: 1566 - protein, 2099 aa, synthetic construct
MPAAKRVKLDGGDKKYSIGLDIGTNSVGWAVITDEYKVPSKKFKVLGNTDRHSIKKNLIGALLFDSGETAEATRLKRTARRRYTRRKNRICYLQEIFSNEMAKVDDSFFHRLEESFLVEEDKKHERHPIFGNIVDEVAYHEKYPTIYHLRKKLVDSTDKADLRLIYLALAHMIKFRGHFLIEGDLNPDNSDVDKLFIQLVQTYNQLFEENPINASGVDAKAILSARLSKSRRLENLIAQLPGEKKNGLFGNLIALSLGLTPNFKSNFDLAEDAKLQLSKDTYDDDLDNLLAQIGDQYADLFLAAKNLSDAILLSDILRVNTEITKAPLSASMIKRYDEHHQDLTLLKALVRQQLPEKYKEIFFDQSKNGYAGYIDGGASQEEFYKFIKPILEKMDGTEELLVKLNREDLLRKQRTFDNGSIPHQIHLGELHAILRRQEDFYPFLKDNREKIEKILTFRIPYYVGPLARGNSRFAWMTRKSEETITPWNFEEVVDKGASAQSFIERMTNFDKNLPNEKVLPKHSLLYEYFTVYNELTKVKYVTEGMRKPAFLSGEQKKAIVDLLFKTNRKVTVKQLKEDYFKKIECFDSVEISGVEDRFNASLGTYHDLLKIIKDKDFLDNEENEDILEDIVLTLTLFEDREMIEERLKTYAHLFDDKVMKQLKRRRYTGWGRLSRKLINGIRDKQSGKTILDFLKSDGFANRNFMQLIHDDSLTFKEDIQKAQVSGQGDSLHEHIANLAGSPAIKKGILQTVKVVDELVKVMGRHKPENIVIEMARENQTTQKGQKNSRERMKRIEEGIKELGSQILKEHPVENTQLQNEKLYLYYLQNGRDMYVDQELDINRLSDYDVDHIVPQSFLKDDSIDNKVLTRSDKARGKSDNVPSEEVVKKMKNYWRQLLNAKLITQRKFDNLTKAERGGLSELDKAGFIKRQLVETRQITKHVAQILDSRMNTKYDENDKLIREVKVITLKSKLVSDFRKDFQFYKVREINNYHHAHDAYLNAVVGTALIKKYPKLESEFVYGDYKVYDVRKMIAKSEQEIGKATAKYFFYSNIMNFFKTEITLANGEIRKRPLIETNGETGEIVWDKGRDFATVRKVLSMPQVNIVKKTEVQTGGFSKESILPKRNSDKLIARKKDWDPKKYGGFDSPTVAYSVLVVAKVEKGKSKKLKSVKELLGITIMERSSFEKNPIDFLEAKGYKEVKKDLIIKLPKYSLFELENGRKRMLASAGELQKGNELALPSKYVNFLYLASHYEKLKGSPEDNEQKQLFVEQHKHYLDEIIEQISEFSKRVILADANLDKVLSAYNKHRDKPIREQAENIIHLFTLTNLGAPAAFKYFDTTIDRKRYTSTKEVLDATLIHQSITGLYETRIDLSQLGGDGGGGGEAAAKGGTVSLQDEHRLFDIPVTTSLPDVWLQDFPQAWAETGGLGRAKCQAPIIIDLKPTAVPVSIKQYPMSLEAHMGIRQHIIKFLELGVLRPCRSPWNTPLLPVKKPGTQDYRPVQDLREINKRTVDIHPTVPNPYNLLSTLKPDYSWYTVLDLKDAFFCLPLAPQSQELFAFEWKDPERGISGQLTWTRLPQGFKNSPTLFNEALHRDLTDFRTQHPEVTLLQYVDDLLLAAPTKKACTQGTRHLLQELGEKGYRASAKKAQICQTKVTYLGYILSEGKRWLTPGRIETVARIPPPRNPREVREFLGTAGFCRLWIPGFAELAAPLYALTKPSTPFTWQTEHQLAFEALKKALLSAPALGLPDTSKPFTLFLDERQGIAKGVLTQKLGPWKRPVAYLSKKLDPVAAGWPPCLRIMAATAMLVKDSAKLTLGQPLTVITPHTLEAIVRQPPDRWITNARLTHYQALLLDTDRVQFGPPVTLNPATLLPVPENQPSPHDCRQVLAETHGTREDLKDQELPDADHTWYTDGSSYLDSGTRRAGAAVVDGHNTIWAQSLPPGTSAQKAELIALTKALELSKGKKANIYTDSRYAFATAHTHGSIYERRGWLTSEGKEIKNKAEIIALLKALFLPQEVAIIHCPGHQKGQDPVAVGNRQADRVARQAAMAEVLTLATEPDNTSHITAGKRTADGSEFEKRTADGSEFESPKKKAKVE

SEQ ID NO: 1567 - protein, 2102 aa, synthetic construct
MPAAKRVKLDGGDKKYSIGLDIGTNSVGWAVITDEYKVPSKKFKVLGNTDRHSIKKNLIGALLFDSGETAEATRLKRTARRRYTRRKNRICYLQEIFSNEMAKVDDSFFHRLEESFLVEEDKKHERHPIFGNIVDEVAYHEKYPTIYHLRKKLVDSTDKADLRLIYLALAHMIKFRGHFLIEGDLNPDNSDVDKLFIQLVQTYNQLFEENPINASGVDAKAILSARLSKSRRLENLIAQLPGEKKNGLFGNLIALSLGLTPNFKSNFDLAEDAKLQLSKDTYDDDLDNLLAQIGDQYADLFLAAKNLSDAILLSDILRVNTEITKAPLSASMIKRYDEHHQDLTLLKALVRQQLPEKYKEIFFDQSKNGYAGYIDGGASQEEFYKFIKPILEKMDGTEELLVKLNREDLLRKQRTFDNGSIPHQIHLGELHAILRRQEDFYPFLKDNREKIEKILTFRIPYYVGPLARGNSRFAWMTRKSEETITPWNFEEVVDKGASAQSFIERMTNFDKNLPNEKVLPKHSLLYEYFTVYNELTKVKYVTEGMRKPAFLSGEQKKAIVDLLFKTNRKVTVKQLKEDYFKKIECFDSVEISGVEDRFNASLGTYHDLLKIIKDKDFLDNEENEDILEDIVLTLTLFEDREMIEERLKTYAHLFDDKVMKQLKRRRYTGWGRLSRKLINGIRDKQSGKTILDFLKSDGFANRNFMQLIHDDSLTFKEDIQKAQVSGQGDSLHEHIANLAGSPAIKKGILQTVKVVDELVKVMGRHKPENIVIEMARENQTTQKGQKNSRERMKRIEEGIKELGSQILKEHPVENTQLQNEKLYLYYLQNGRDMYVDQELDINRLSDYDVDHIVPQSFLKDDSIDNKVLTRSDKARGKSDNVPSEEVVKKMKNYWRQLLNAKLITQRKFDNLTKAERGGLSELDKAGFIKRQLVETRQITKHVAQILDSRMNTKYDENDKLIREVKVITLKSKLVSDFRKDFQFYKVREINNYHHAHDAYLNAVVGTALIKKYPKLESEFVYGDYKVYDVRKMIAKSEQEIGKATAKYFFYSNIMNFFKTEITLANGEIRKRPLIETNGETGEIVWDKGRDFATVRKVLSMPQVNIVKKTEVQTGGFSKESILPKRNSDKLIARKKDWDPKKYGGFDSPTVAYSVLVVAKVEKGKSKKLKSVKELLGITIMERSSFEKNPIDFLEAKGYKEVKKDLIIKLPKYSLFELENGRKRMLASAGELQKGNELALPSKYVNFLYLASHYEKLKGSPEDNEQKQLFVEQHKHYLDEIIEQISEFSKRVILADANLDKVLSAYNKHRDKPIREQAENIIHLFTLTNLGAPAAFKYFDTTIDRKRYTSTKEVLDATLIHQSITGLYETRIDLSQLGGDGGGSSGGSEAAAKGGTVSLQDEHRLFDIPVTTSLPDVWLQDFPQAWAETGGLGRAKCQAPIIIDLKPTAVPVSIKQYPMSLEAHMGIRQHIIKFLELGVLRPCRSPWNTPLLPVKKPGTQDYRPVQDLREINKRTVDIHPTVPNPYNLLSTLKPDYSWYTVLDLKDAFFCLPLAPQSQELFAFEWKDPERGISGQLTWTRLPQGFKNSPTLFNEALHRDLTDFRTQHPEVTLLQYVDDLLLAAPTKKACTQGTRHLLQELGEKGYRASAKKAQICQTKVTYLGYILSEGKRWLTPGRIETVARIPPPRNPREVREFLGTAGFCRLWIPGFAELAAPLYALTKPSTPFTWQTEHQLAFEALKKALLSAPALGLPDTSKPFTLFLDERQGIAKGVLTQKLGPWKRPVAYLSKKLDPVAAGWPPCLRIMAATAMLVKDSAKLTLGQPLTVITPHTLEAIVRQPPDRWITNARLTHYQALLLDTDRVQFGPPVTLNPATLLPVPENQPSPHDCRQVLAETHGTREDLKDQELPDADHTWYTDGSSYLDSGTRRAGAAVVDGHNTIWAQSLPPGTSAQKAELIALTKALELSKGKKANIYTDSRYAFATAHTHGSIYERRGWLTSEGKEIKNKAEIIALLKALFLPQEVAIIHCPGHQKGQDPVAVGNRQADRVARQAAMAEVLTLATEPDNTSHITAGKRTADGSEFEKRTADGSEFESPKKKAKVE

SEQ ID NO: 1568 - protein, 2100 aa, synthetic construct
MPAAKRVKLDGGDKKYSIGLDIGTNSVGWAVITDEYKVPSKKFKVLGNTDRHSIKKNLIGALLFDSGETAEATRLKRTARRRYTRRKNRICYLQEIFSNEMAKVDDSFFHRLEESFLVEEDKKHERHPIFGNIVDEVAYHEKYPTIYHLRKKLVDSTDKADLRLIYLALAHMIKFRGHFLIEGDLNPDNSDVDKLFIQLVQTYNQLFEENPINASGVDAKAILSARLSKSRRLENLIAQLPGEKKNGLFGNLIALSLGLTPNFKSNFDLAEDAKLQLSKDTYDDDLDNLLAQIGDQYADLFLAAKNLSDAILLSDILRVNTEITKAPLSASMIKRYDEHHQDLTLLKALVRQQLPEKYKEIFFDQSKNGYAGYIDGGASQEEFYKFIKPILEKMDGTEELLVKLNREDLLRKQRTFDNGSIPHQIHLGELHAILRRQEDFYPFLKDNREKIEKILTFRIPYYVGPLARGNSRFAWMTRKSEETITPWNFEEVVDKGASAQSFIERMTNFDKNLPNEKVLPKHSLLYEYFTVYNELTKVKYVTEGMRKPAFLSGEQKKAIVDLLFKTNRKVTVKQLKEDYFKKIECFDSVEISGVEDRFNASLGTYHDLLKIIKDKDFLDNEENEDILEDIVLTLTLFEDREMIEERLKTYAHLFDDKVMKQLKRRRYTGWGRLSRKLINGIRDKQSGKTILDFLKSDGFANRNFMQLIHDDSLTFKEDIQKAQVSGQGDSLHEHIANLAGSPAIKKGILQTVKVVDELVKVMGRHKPENIVIEMARENQTTQKGQKNSRERMKRIEEGIKELGSQILKEHPVENTQLQNEKLYLYYLQNGRDMYVDQELDINRLSDYDVDHIVPQSFLKDDSIDNKVLTRSDKARGKSDNVPSEEVVKKMKNYWRQLLNAKLITQRKFDNLTKAERGGLSELDKAGFIKRQLVETRQITKHVAQILDSRMNTKYDENDKLIREVKVITLKSKLVSDFRKDFQFYKVREINNYHHAHDAYLNAVVGTALIKKYPKLESEFVYGDYKVYDVRKMIAKSEQEIGKATAKYFFYSNIMNFFKTEITLANGEIRKRPLIETNGETGEIVWDKGRDFATVRKVLSMPQVNIVKKTEVQTGGFSKESILPKRNSDKLIARKKDWDPKKYGGFDSPTVAYSVLVVAKVEKGKSKKLKSVKELLGITIMERSSFEKNPIDFLEAKGYKEVKKDLIIKLPKYSLFELENGRKRMLASAGELQKGNELALPSKYVNFLYLASHYEKLKGSPEDNEQKQLFVEQHKHYLDEIIEQISEFSKRVILADANLDKVLSAYNKHRDKPIREQAENIIHLFTLTNLGAPAAFKYFDTTIDRKRYTSTKEVLDATLIHQSITGLYETRIDLSQLGGDGGPAPGSSGGGGGTVSLQDEHRLFDIPVTTSLPDVWLQDFPQAWAETGGLGRAKCQAPIIIDLKPTAVPVSIKQYPMSLEAHMGIRQHIIKFLELGVLRPCRSPWNTPLLPVKKPGTQDYRPVQDLREINKRTVDIHPTVPNPYNLLSTLKPDYSWYTVLDLKDAFFCLPLAPQSQELFAFEWKDPERGISGQLTWTRLPQGFKNSPTLFNEALHRDLTDFRTQHPEVTLLQYVDDLLLAAPTKKACTQGTRHLLQELGEKGYRASAKKAQICQTKVTYLGYILSEGKRWLTPGRIETVARIPPPRNPREVREFLGTAGFCRLWIPGFAELAAPLYALTKPSTPFTWQTEHQLAFEALKKALLSAPALGLPDTSKPFTLFLDERQGIAKGVLTQKLGPWKRPVAYLSKKLDPVAAGWPPCLRIMAATAMLVKDSAKLTLGQPLTVITPHTLEAIVRQPPDRWITNARLTHYQALLLDTDRVQFGPPVTLNPATLLPVPENQPSPHDCRQVLAETHGTREDLKDQELPDADHTWYTDGSSYLDSGTRRAGAAVVDGHNTIWAQSLPPGTSAQKAELIALTKALELSKGKKANIYTDSRYAFATAHTHGSIYERRGWLTSEGKEIKNKAEIIALLKALFLPQEVAIIHCPGHQKGQDPVAVGNRQADRVARQAAMAEVLTLATEPDNTSHITAGKRTADGSEFEKRTADGSEFESPKKKAKVE

SEQ ID NO: 1569 - protein, 2099 aa, synthetic construct
MPAAKRVKLDGGDKKYSIGLDIGTNSVGWAVITDEYKVPSKKFKVLGNTDRHSIKKNLIGALLFDSGETAEATRLKRTARRRYTRRKNRICYLQEIFSNEMAKVDDSFFHRLEESFLVEEDKKHERHPIFGNIVDEVAYHEKYPTIYHLRKKLVDSTDKADLRLIYLALAHMIKFRGHFLIEGDLNPDNSDVDKLFIQLVQTYNQLFEENPINASGVDAKAILSARLSKSRRLENLIAQLPGEKKNGLFGNLIALSLGLTPNFKSNFDLAEDAKLQLSKDTYDDDLDNLLAQIGDQYADLFLAAKNLSDAILLSDILRVNTEITKAPLSASMIKRYDEHHQDLTLLKALVRQQLPEKYKEIFFDQSKNGYAGYIDGGASQEEFYKFIKPILEKMDGTEELLVKLNREDLLRKQRTFDNGSIPHQIHLGELHAILRRQEDFYPFLKDNREKIEKILTFRIPYYVGPLARGNSRFAWMTRKSEETITPWNFEEVVDKGASAQSFIERMTNFDKNLPNEKVLPKHSLLYEYFTVYNELTKVKYVTEGMRKPAFLSGEQKKAIVDLLFKTNRKVTVKQLKEDYFKKIECFDSVEISGVEDRFNASLGTYHDLLKIIKDKDFLDNEENEDILEDIVLTLTLFEDREMIEERLKTYAHLFDDKVMKQLKRRRYTGWGRLSRKLINGIRDKQSGKTILDFLKSDGFANRNFMQLIHDDSLTFKEDIQKAQVSGQGDSLHEHIANLAGSPAIKKGILQTVKVVDELVKVMGRHKPENIVIEMARENQTTQKGQKNSRERMKRIEEGIKELGSQILKEHPVENTQLQNEKLYLYYLQNGRDMYVDQELDINRLSDYDVDHIVPQSFLKDDSIDNKVLTRSDKARGKSDNVPSEEVVKKMKNYWRQLLNAKLITQRKFDNLTKAERGGLSELDKAGFIKRQLVETRQITKHVAQILDSRMNTKYDENDKLIREVKVITLKSKLVSDFRKDFQFYKVREINNYHHAHDAYLNAVVGTALIKKYPKLESEFVYGDYKVYDVRKMIAKSEQEIGKATAKYFFYSNIMNFFKTEITLANGEIRKRPLIETNGETGEIVWDKGRDFATVRKVLSMPQVNIVKKTEVQTGGFSKESILPKRNSDKLIARKKDWDPKKYGGFDSPTVAYSVLVVAKVEKGKSKKLKSVKELLGITIMERSSFEKNPIDFLEAKGYKEVKKDLIIKLPKYSLFELENGRKRMLASAGELQKGNELALPSKYVNFLYLASHYEKLKGSPEDNEQKQLFVEQHKHYLDEIIEQISEFSKRVILADANLDKVLSAYNKHRDKPIREQAENIIHLFTLTNLGAPAAFKYFDTTIDRKRYTSTKEVLDATLIHQSITGLYETRIDLSQLGGDGGPAPEAAAKGGTVSLQDEHRLFDIPVTTSLPDVWLQDFPQAWAETGGLGRAKCQAPIIIDLKPTAVPVSIKQYPMSLEAHMGIRQHIIKFLELGVLRPCRSPWNTPLLPVKKPGTQDYRPVQDLREINKRTVDIHPTVPNPYNLLSTLKPDYSWYTVLDLKDAFFCLPLAPQSQELFAFEWKDPERGISGQLTWTRLPQGFKNSPTLFNEALHRDLTDFRTQHPEVTLLQYVDDLLLAAPTKKACTQGTRHLLQELGEKGYRASAKKAQICQTKVTYLGYILSEGKRWLTPGRIETVARIPPPRNPREVREFLGTAGFCRLWIPGFAELAAPLYALTKPSTPFTWQTEHQLAFEALKKALLSAPALGLPDTSKPFTLFLDERQGIAKGVLTQKLGPWKRPVAYLSKKLDPVAAGWPPCLRIMAATAMLVKDSAKLTLGQPLTVITPHTLEAIVRQPPDRWITNARLTHYQALLLDTDRVQFGPPVTLNPATLLPVPENQPSPHDCRQVLAETHGTREDLKDQELPDADHTWYTDGSSYLDSGTRRAGAAVVDGHNTIWAQSLPPGTSAQKAELIALTKALELSKGKKANIYTDSRYAFATAHTHGSIYERRGWLTSEGKEIKNKAEIIALLKALFLPQEVAIIHCPGHQKGQDPVAVGNRQADRVARQAAMAEVLTLATEPDNTSHITAGKRTADGSEFEKRTADGSEFESPKKKAKVE

SEQ ID NO: 1570 - protein, 2107 aa, synthetic construct
MPAAKRVKLDGGDKKYSIGLDIGTNSVGWAVITDEYKVPSKKFKVLGNTDRHSIKKNLIGALLFDSGETAEATRLKRTARRRYTRRKNRICYLQEIFSNEMAKVDDSFFHRLEESFLVEEDKKHERHPIFGNIVDEVAYHEKYPTIYHLRKKLVDSTDKADLRLIYLALAHMIKFRGHFLIEGDLNPDNSDVDKLFIQLVQTYNQLFEENPINASGVDAKAILSARLSKSRRLENLIAQLPGEKKNGLFGNLIALSLGLTPNFKSNFDLAEDAKLQLSKDTYDDDLDNLLAQIGDQYADLFLAAKNLSDAILLSDILRVNTEITKAPLSASMIKRYDEHHQDLTLLKALVRQQLPEKYKEIFFDQSKNGYAGYIDGGASQEEFYKFIKPILEKMDGTEELLVKLNREDLLRKQRTFDNGSIPHQIHLGELHAILRRQEDFYPFLKDNREKIEKILTFRIPYYVGPLARGNSRFAWMTRKSEETITPWNFEEVVDKGASAQSFIERMTNFDKNLPNEKVLPKHSLLYEYFTVYNELTKVKYVTEGMRKPAFLSGEQKKAIVDLLFKTNRKVTVKQLKEDYFKKIECFDSVEISGVEDRFNASLGTYHDLLKIIKDKDFLDNEENEDILEDIVLTLTLFEDREMIEERLKTYAHLFDDKVMKQLKRRRYTGWGRLSRKLINGIRDKQSGKTILDFLKSDGFANRNFMQLIHDDSLTFKEDIQKAQVSGQGDSLHEHIANLAGSPAIKKGILQTVKVVDELVKVMGRHKPENIVIEMARENQTTQKGQKNSRERMKRIEEGIKELGSQILKEHPVENTQLQNEKLYLYYLQNGRDMYVDQELDINRLSDYDVDHIVPQSFLKDDSIDNKVLTRSDKARGKSDNVPSEEVVKKMKNYWRQLLNAKLITQRKFDNLTKAERGGLSELDKAGFIKRQLVETRQITKHVAQILDSRMNTKYDENDKLIREVKVITLKSKLVSDFRKDFQFYKVREINNYHHAHDAYLNAVVGTALIKKYPKLESEFVYGDYKVYDVRKMIAKSEQEIGKATAKYFFYSNIMNFFKTEITLANGEIRKRPLIETNGETGEIVWDKGRDFATVRKVLSMPQVNIVKKTEVQTGGFSKESILPKRNSDKLIARKKDWDPKKYGGFDSPTVAYSVLVVAKVEKGKSKKLKSVKELLGITIMERSSFEKNPIDFLEAKGYKEVKKDLIIKLPKYSLFELENGRKRMLASAGELQKGNELALPSKYVNFLYLASHYEKLKGSPEDNEQKQLFVEQHKHYLDEIIEQISEFSKRVILADANLDKVLSAYNKHRDKPIREQAENIIHLFTLTNLGAPAAFKYFDTTIDRKRYTSTKEVLDATLIHQSITGLYETRIDLSQLGGDGGSGSETPGTSESATPESGGTVSLQDEHRLFDIPVTTSLPDVWLQDFPQAWAETGGLGRAKCQAPIIIDLKPTAVPVSIKQYPMSLEAHMGIRQHIIKFLELGVLRPCRSPWNTPLLPVKKPGTQDYRPVQDLREINKRTVDIHPTVPNPYNLLSTLKPDYSWYTVLDLKDAFFCLPLAPQSQELFAFEWKDPERGISGQLTWTRLPQGFKNSPTLFNEALHRDLTDFRTQHPEVTLLQYVDDLLLAAPTKKACTQGTRHLLQELGEKGYRASAKKAQICQTKVTYLGYILSEGKRWLTPGRIETVARIPPPRNPREVREFLGTAGFCRLWIPGFAELAAPLYALTKPSTPFTWQTEHQLAFEALKKALLSAPALGLPDTSKPFTLFLDERQGIAKGVLTQKLGPWKRPVAYLSKKLDPVAAGWPPCLRIMAATAMLVKDSAKLTLGQPLTVITPHTLEAIVRQPPDRWITNARLTHYQALLLDTDRVQFGPPVTLNPATLLPVPENQPSPHDCRQVLAETHGTREDLKDQELPDADHTWYTDGSSYLDSGTRRAGAAVVDGHNTIWAQSLPPGTSAQKAELIALTKALELSKGKKANIYTDSRYAFATAHTHGSIYERRGWLTSEGKEIKNKAEIIALLKALFLPQEVAIIHCPGHQKGQDPVAVGNRQADRVARQAAMAEVLTLATEPDNTSHITAGKRTADGSEFEKRTADGSEFESPKKKAKVE

SEQ ID NO: 1571 - protein, 2102 aa, synthetic construct
MPAAKRVKLDGGDKKYSIGLDIGTNSVGWAVITDEYKVPSKKFKVLGNTDRHSIKKNLIGALLFDSGETAEATRLKRTARRRYTRRKNRICYLQEIFSNEMAKVDDSFFHRLEESFLVEEDKKHERHPIFGNIVDEVAYHEKYPTIYHLRKKLVDSTDKADLRLIYLALAHMIKFRGHFLIEGDLNPDNSDVDKLFIQLVQTYNQLFEENPINASGVDAKAILSARLSKSRRLENLIAQLPGEKKNGLFGNLIALSLGLTPNFKSNFDLAEDAKLQLSKDTYDDDLDNLLAQIGDQYADLFLAAKNLSDAILLSDILRVNTEITKAPLSASMIKRYDEHHQDLTLLKALVRQQLPEKYKEIFFDQSKNGYAGYIDGGASQEEFYKFIKPILEKMDGTEELLVKLNREDLLRKQRTFDNGSIPHQIHLGELHAILRRQEDFYPFLKDNREKIEKILTFRIPYYVGPLARGNSRFAWMTRKSEETITPWNFEEVVDKGASAQSFIERMTNFDKNLPNEKVLPKHSLLYEYFTVYNELTKVKYVTEGMRKPAFLSGEQKKAIVDLLFKTNRKVTVKQLKEDYFKKIECFDSVEISGVEDRFNASLGTYHDLLKIIKDKDFLDNEENEDILEDIVLTLTLFEDREMIEERLKTYAHLFDDKVMKQLKRRRYTGWGRLSRKLINGIRDKQSGKTILDFLKSDGFANRNFMQLIHDDSLTFKEDIQKAQVSGQGDSLHEHIANLAGSPAIKKGILQTVKVVDELVKVMGRHKPENIVIEMARENQTTQKGQKNSRERMKRIEEGIKELGSQILKEHPVENTQLQNEKLYLYYLQNGRDMYVDQELDINRLSDYDVDHIVPQSFLKDDSIDNKVLTRSDKARGKSDNVPSEEVVKKMKNYWRQLLNAKLITQRKFDNLTKAERGGLSELDKAGFIKRQLVETRQITKHVAQILDSRMNTKYDENDKLIREVKVITLKSKLVSDFRKDFQFYKVREINNYHHAHDAYLNAVVGTALIKKYPKLESEFVYGDYKVYDVRKMIAKSEQEIGKATAKYFFYSNIMNFFKTEITLANGEIRKRPLIETNGETGEIVWDKGRDFATVRKVLSMPQVNIVKKTEVQTGGFSKESILPKRNSDKLIARKKDWDPKKYGGFDSPTVAYSVLVVAKVEKGKSKKLKSVKELLGITIMERSSFEKNPIDFLEAKGYKEVKKDLIIKLPKYSLFELENGRKRMLASAGELQKGNELALPSKYVNFLYLASHYEKLKGSPEDNEQKQLFVEQHKHYLDEIIEQISEFSKRVILADANLDKVLSAYNKHRDKPIREQAENIIHLFTLTNLGAPAAFKYFDTTIDRKRYTSTKEVLDATLIHQSITGLYETRIDLSQLGGDGGEAAAKGSSPAPGGTVSLQDEHRLFDIPVTTSLPDVWLQDFPQAWAETGGLGRAKCQAPIIIDLKPTAVPVSIKQYPMSLEAHMGIRQHIIKFLELGVLRPCRSPWNTPLLPVKKPGTQDYRPVQDLREINKRTVDIHPTVPNPYNLLSTLKPDYSWYTVLDLKDAFFCLPLAPQSQELFAFEWKDPERGISGQLTWTRLPQGFKNSPTLFNEALHRDLTDFRTQHPEVTLLQYVDDLLLAAPTKKACTQGTRHLLQELGEKGYRASAKKAQICQTKVTYLGYILSEGKRWLTPGRIETVARIPPPRNPREVREFLGTAGFCRLWIPGFAELAAPLYALTKPSTPFTWQTEHQLAFEALKKALLSAPALGLPDTSKPFTLFLDERQGIAKGVLTQKLGPWKRPVAYLSKKLDPVAAGWPPCLRIMAATAMLVKDSAKLTLGQPLTVITPHTLEAIVRQPPDRWITNARLTHYQALLLDTDRVQFGPPVTLNPATLLPVPENQPSPHDCRQVLAETHGTREDLKDQELPDADHTWYTDGSSYLDSGTRRAGAAVVDGHNTIWAQSLPPGTSAQKAELIALTKALELSKGKKANIYTDSRYAFATAHTHGSIYERRGWLTSEGKEIKNKAEIIALLKALFLPQEVAIIHCPGHQKGQDPVAVGNRQADRVARQAAMAEVLTLATEPDNTSHITAGKRTADGSEFEKRTADGSEFESPKKKAKVE

SEQ ID NO: 1572 - protein, 2097 aa, synthetic construct
MPAAKRVKLDGGDKKYSIGLDIGTNSVGWAVITDEYKVPSKKFKVLGNTDRHSIKKNLIGALLFDSGETAEATRLKRTARRRYTRRKNRICYLQEIFSNEMAKVDDSFFHRLEESFLVEEDKKHERHPIFGNIVDEVAYHEKYPTIYHLRKKLVDSTDKADLRLIYLALAHMIKFRGHFLIEGDLNPDNSDVDKLFIQLVQTYNQLFEENPINASGVDAKAILSARLSKSRRLENLIAQLPGEKKNGLFGNLIALSLGLTPNFKSNFDLAEDAKLQLSKDTYDDDLDNLLAQIGDQYADLFLAAKNLSDAILLSDILRVNTEITKAPLSASMIKRYDEHHQDLTLLKALVRQQLPEKYKEIFFDQSKNGYAGYIDGGASQEEFYKFIKPILEKMDGTEELLVKLNREDLLRKQRTFDNGSIPHQIHLGELHAILRRQEDFYPFLKDNREKIEKILTFRIPYYVGPLARGNSRFAWMTRKSEETITPWNFEEVVDKGASAQSFIERMTNFDKNLPNEKVLPKHSLLYEYFTVYNELTKVKYVTEGMRKPAFLSGEQKKAIVDLLFKTNRKVTVKQLKEDYFKKIECFDSVEISGVEDRFNASLGTYHDLLKIIKDKDFLDNEENEDILEDIVLTLTLFEDREMIEERLKTYAHLFDDKVMKQLKRRRYTGWGRLSRKLINGIRDKQSGKTILDFLKSDGFANRNFMQLIHDDSLTFKEDIQKAQVSGQGDSLHEHIANLAGSPAIKKGILQTVKVVDELVKVMGRHKPENIVIEMARENQTTQKGQKNSRERMKRIEEGIKELGSQILKEHPVENTQLQNEKLYLYYLQNGRDMYVDQELDINRLSDYDVDHIVPQSFLKDDSIDNKVLTRSDKARGKSDNVPSEEVVKKMKNYWRQLLNAKLITQRKFDNLTKAERGGLSELDKAGFIKRQLVETRQITKHVAQILDSRMNTKYDENDKLIREVKVITLKSKLVSDFRKDFQFYKVREINNYHHAHDAYLNAVVGTALIKKYPKLESEFVYGDYKVYDVRKMIAKSEQEIGKATAKYFFYSNIMNFFKTEITLANGEIRKRPLIETNGETGEIVWDKGRDFATVRKVLSMPQVNIVKKTEVQTGGFSKESILPKRNSDKLIARKKDWDPKKYGGFDSPTVAYSVLVVAKVEKGKSKKLKSVKELLGITIMERSSFEKNPIDFLEAKGYKEVKKDLIIKLPKYSLFELENGRKRMLASAGELQKGNELALPSKYVNFLYLASHYEKLKGSPEDNEQKQLFVEQHKHYLDEIIEQISEFSKRVILADANLDKVLSAYNKHRDKPIREQAENIIHLFTLTNLGAPAAFKYFDTTIDRKRYTSTKEVLDATLIHQSITGLYETRIDLSQLGGDGGGGGGGGGGTVSLQDEHRLFDIPVTTSLPDVWLQDFPQAWAETGGLGRAKCQAPIIIDLKPTAVPVSIKQYPMSLEAHMGIRQHIIKFLELGVLRPCRSPWNTPLLPVKKPGTQDYRPVQDLREINKRTVDIHPTVPNPYNLLSTLKPDYSWYTVLDLKDAFFCLPLAPQSQELFAFEWKDPERGISGQLTWTRLPQGFKNSPTLFNEALHRDLTDFRTQHPEVTLLQYVDDLLLAAPTKKACTQGTRHLLQELGEKGYRASAKKAQICQTKVTYLGYILSEGKRWLTPGRIETVARIPPPRNPREVREFLGTAGFCRLWIPGFAELAAPLYALTKPSTPFTWQTEHQLAFEALKKALLSAPALGLPDTSKPFTLFLDERQGIAKGVLTQKLGPWKRPVAYLSKKLDPVAAGWPPCLRIMAATAMLVKDSAKLTLGQPLTVITPHTLEAIVRQPPDRWITNARLTHYQALLLDTDRVQFGPPVTLNPATLLPVPENQPSPHDCRQVLAETHGTREDLKDQELPDADHTWYTDGSSYLDSGTRRAGAAVVDGHNTIWAQSLPPGTSAQKAELIALTKALELSKGKKANIYTDSRYAFATAHTHGSIYERRGWLTSEGKEIKNKAEIIALLKALFLPQEVAIIHCPGHQKGQDPVAVGNRQADRVARQAAMAEVLTLATEPDNTSHITAGKRTADGSEFEKRTADGSEFESPKKKAKVE

SEQ ID NO: 1573 - protein, 2100 aa, synthetic construct
MPAAKRVKLDGGDKKYSIGLDIGTNSVGWAVITDEYKVPSKKFKVLGNTDRHSIKKNLIGALLFDSGETAEATRLKRTARRRYTRRKNRICYLQEIFSNEMAKVDDSFFHRLEESFLVEEDKKHERHPIFGNIVDEVAYHEKYPTIYHLRKKLVDSTDKADLRLIYLALAHMIKFRGHFLIEGDLNPDNSDVDKLFIQLVQTYNQLFEENPINASGVDAKAILSARLSKSRRLENLIAQLPGEKKNGLFGNLIALSLGLTPNFKSNFDLAEDAKLQLSKDTYDDDLDNLLAQIGDQYADLFLAAKNLSDAILLSDILRVNTEITKAPLSASMIKRYDEHHQDLTLLKALVRQQLPEKYKEIFFDQSKNGYAGYIDGGASQEEFYKFIKPILEKMDGTEELLVKLNREDLLRKQRTFDNGSIPHQIHLGELHAILRRQEDFYPFLKDNREKIEKILTFRIPYYVGPLARGNSRFAWMTRKSEETITPWNFEEVVDKGASAQSFIERMTNFDKNLPNEKVLPKHSLLYEYFTVYNELTKVKYVTEGMRKPAFLSGEQKKAIVDLLFKTNRKVTVKQLKEDYFKKIECFDSVEISGVEDRFNASLGTYHDLLKIIKDKDFLDNEENEDILEDIVLTLTLFEDREMIEERLKTYAHLFDDKVMKQLKRRRYTGWGRLSRKLINGIRDKQSGKTILDFLKSDGFANRNFMQLIHDDSLTFKEDIQKAQVSGQGDSLHEHIANLAGSPAIKKGILQTVKVVDELVKVMGRHKPENIVIEMARENQTTQKGQKNSRERMKRIEEGIKELGSQILKEHPVENTQLQNEKLYLYYLQNGRDMYVDQELDINRLSDYDVDHIVPQSFLKDDSIDNKVLTRSDKARGKSDNVPSEEVVKKMKNYWRQLLNAKLITQRKFDNLTKAERGGLSELDKAGFIKRQLVETRQITKHVAQILDSRMNTKYDENDKLIREVKVITLKSKLVSDFRKDFQFYKVREINNYHHAHDAYLNAVVGTALIKKYPKLESEFVYGDYKVYDVRKMIAKSEQEIGKATAKYFFYSNIMNFFKTEITLANGEIRKRPLIETNGETGEIVWDKGRDFATVRKVLSMPQVNIVKKTEVQTGGFSKESILPKRNSDKLIARKKDWDPKKYGGFDSPTVAYSVLVVAKVEKGKSKKLKSVKELLGITIMERSSFEKNPIDFLEAKGYKEVKKDLIIKLPKYSLFELENGRKRMLASAGELQKGNELALPSKYVNFLYLASHYEKLKGSPEDNEQKQLFVEQHKHYLDEIIEQISEFSKRVILADANLDKVLSAYNKHRDKPIREQAENIIHLFTLTNLGAPAAFKYFDTTIDRKRYTSTKEVLDATLIHQSITGLYETRIDLSQLGGDGGGGSGGSGGSGGTVSLQDEHRLFDIPVTTSLPDVWLQDFPQAWAETGGLGRAKCQAPIIIDLKPTAVPVSIKQYPMSLEAHMGIRQHIIKFLELGVLRPCRSPWNTPLLPVKKPGTQDYRPVQDLREINKRTVDIHPTVPNPYNLLSTLKPDYSWYTVLDLKDAFFCLPLAPQSQELFAFEWKDPERGISGQLTWTRLPQGFKNSPTLFNEALHRDLTDFRTQHPEVTLLQYVDDLLLAAPTKKACTQGTRHLLQELGEKGYRASAKKAQICQTKVTYLGYILSEGKRWLTPGRIETVARIPPPRNPREVREFLGTAGFCRLWIPGFAELAAPLYALTKPSTPFTWQTEHQLAFEALKKALLSAPALGLPDTSKPFTLFLDERQGIAKGVLTQKLGPWKRPVAYLSKKLDPVAAGWPPCLRIMAATAMLVKDSAKLTLGQPLTVITPHTLEAIVRQPPDRWITNARLTHYQALLLDTDRVQFGPPVTLNPATLLPVPENQPSPHDCRQVLAETHGTREDLKDQELPDADHTWYTDGSSYLDSGTRRAGAAVVDGHNTIWAQSLPPGTSAQKAELIALTKALELSKGKKANIYTDSRYAFATAHTHGSIYERRGWLTSEGKEIKNKAEIIALLKALFLPQEVAIIHCPGHQKGQDPVAVGNRQADRVARQAAMAEVLTLATEPDNTSHITAGKRTADGSEFEKRTADGSEFESPKKKAKVE

SEQ ID NO: 1574 - protein, 2102 aa, synthetic construct
MPAAKRVKLDGGDKKYSIGLDIGTNSVGWAVITDEYKVPSKKFKVLGNTDRHSIKKNLIGALLFDSGETAEATRLKRTARRRYTRRKNRICYLQEIFSNEMAKVDDSFFHRLEESFLVEEDKKHERHPIFGNIVDEVAYHEKYPTIYHLRKKLVDSTDKADLRLIYLALAHMIKFRGHFLIEGDLNPDNSDVDKLFIQLVQTYNQLFEENPINASGVDAKAILSARLSKSRRLENLIAQLPGEKKNGLFGNLIALSLGLTPNFKSNFDLAEDAKLQLSKDTYDDDLDNLLAQIGDQYADLFLAAKNLSDAILLSDILRVNTEITKAPLSASMIKRYDEHHQDLTLLKALVRQQLPEKYKEIFFDQSKNGYAGYIDGGASQEEFYKFIKPILEKMDGTEELLVKLNREDLLRKQRTFDNGSIPHQIHLGELHAILRRQEDFYPFLKDNREKIEKILTFRIPYYVGPLARGNSRFAWMTRKSEETITPWNFEEVVDKGASAQSFIERMTNFDKNLPNEKVLPKHSLLYEYFTVYNELTKVKYVTEGMRKPAFLSGEQKKAIVDLLFKTNRKVTVKQLKEDYFKKIECFDSVEISGVEDRFNASLGTYHDLLKIIKDKDFLDNEENEDILEDIVLTLTLFEDREMIEERLKTYAHLFDDKVMKQLKRRRYTGWGRLSRKLINGIRDKQSGKTILDFLKSDGFANRNFMQLIHDDSLTFKEDIQKAQVSGQGDSLHEHIANLAGSPAIKKGILQTVKVVDELVKVMGRHKPENIVIEMARENQTTQKGQKNSRERMKRIEEGIKELGSQILKEHPVENTQLQNEKLYLYYLQNGRDMYVDQELDINRLSDYDVDHIVPQSFLKDDSIDNKVLTRSDKARGKSDNVPSEEVVKKMKNYWRQLLNAKLITQRKFDNLTKAERGGLSELDKAGFIKRQLVETRQITKHVAQILDSRMNTKYDENDKLIREVKVITLKSKLVSDFRKDFQFYKVREINNYHHAHDAYLNAVVGTALIKKYPKLESEFVYGDYKVYDVRKMIAKSEQEIGKATAKYFFYSNIMNFFKTEITLANGEIRKRPLIETNGETGEIVWDKGRDFATVRKVLSMPQVNIVKKTEVQTGGFSKESILPKRNSDKLIARKKDWDPKKYGGFDSPTVAYSVLVVAKVEKGKSKKLKSVKELLGITIMERSSFEKNPIDFLEAKGYKEVKKDLIIKLPKYSLFELENGRKRMLASAGELQKGNELALPSKYVNFLYLASHYEKLKGSPEDNEQKQLFVEQHKHYLDEIIEQISEFSKRVILADANLDKVLSAYNKHRDKPIREQAENIIHLFTLTNLGAPAAFKYFDTTIDRKRYTSTKEVLDATLIHQSITGLYETRIDLSQLGGDGGGGGEAAAKGSSGGTVSLQDEHRLFDIPVTTSLPDVWLQDFPQAWAETGGLGRAKCQAPIIIDLKPTAVPVSIKQYPMSLEAHMGIRQHIIKFLELGVLRPCRSPWNTPLLPVKKPGTQDYRPVQDLREINKRTVDIHPTVPNPYNLLSTLKPDYSWYTVLDLKDAFFCLPLAPQSQELFAFEWKDPERGISGQLTWTRLPQGFKNSPTLFNEALHRDLTDFRTQHPEVTLLQYVDDLLLAAPTKKACTQGTRHLLQELGEKGYRASAKKAQICQTKVTYLGYILSEGKRWLTPGRIETVARIPPPRNPREVREFLGTAGFCRLWIPGFAELAAPLYALTKPSTPFTWQTEHQLAFEALKKALLSAPALGLPDTSKPFTLFLDERQGIAKGVLTQKLGPWKRPVAYLSKKLDPVAAGWPPCLRIMAATAMLVKDSAKLTLGQPLTVITPHTLEAIVRQPPDRWITNARLTHYQALLLDTDRVQFGPPVTLNPATLLPVPENQPSPHDCRQVLAETHGTREDLKDQELPDADHTWYTDGSSYLDSGTRRAGAAVVDGHNTIWAQSLPPGTSAQKAELIALTKALELSKGKKANIYTDSRYAFATAHTHGSIYERRGWLTSEGKEIKNKAEIIALLKALFLPQEVAIIHCPGHQKGQDPVAVGNRQADRVARQAAMAEVLTLATEPDNTSHITAGKRTADGSEFEKRTADGSEFESPKKKAKVE

SEQ ID NO: 1575 - protein, 2102 aa, synthetic construct
MPAAKRVKLDGGDKKYSIGLDIGTNSVGWAVITDEYKVPSKKFKVLGNTDRHSIKKNLIGALLFDSGETAEATRLKRTARRRYTRRKNRICYLQEIFSNEMAKVDDSFFHRLEESFLVEEDKKHERHPIFGNIVDEVAYHEKYPTIYHLRKKLVDSTDKADLRLIYLALAHMIKFRGHFLIEGDLNPDNSDVDKLFIQLVQTYNQLFEENPINASGVDAKAILSARLSKSRRLENLIAQLPGEKKNGLFGNLIALSLGLTPNFKSNFDLAEDAKLQLSKDTYDDDLDNLLAQIGDQYADLFLAAKNLSDAILLSDILRVNTEITKAPLSASMIKRYDEHHQDLTLLKALVRQQLPEKYKEIFFDQSKNGYAGYIDGGASQEEFYKFIKPILEKMDGTEELLVKLNREDLLRKQRTFDNGSIPHQIHLGELHAILRRQEDFYPFLKDNREKIEKILTFRIPYYVGPLARGNSRFAWMTRKSEETITPWNFEEVVDKGASAQSFIERMTNFDKNLPNEKVLPKHSLLYEYFTVYNELTKVKYVTEGMRKPAFLSGEQKKAIVDLLFKTNRKVTVKQLKEDYFKKIECFDSVEISGVEDRFNASLGTYHDLLKIIKDKDFLDNEENEDILEDIVLTLTLFEDREMIEERLKTYAHLFDDKVMKQLKRRRYTGWGRLSRKLINGIRDKQSGKTILDFLKSDGFANRNFMQLIHDDSLTFKEDIQKAQVSGQGDSLHEHIANLAGSPAIKKGILQTVKVVDELVKVMGRHKPENIVIEMARENQTTQKGQKNSRERMKRIEEGIKELGSQILKEHPVENTQLQNEKLYLYYLQNGRDMYVDQELDINRLSDYDVDHIVPQSFLKDDSIDNKVLTRSDKARGKSDNVPSEEVVKKMKNYWRQLLNAKLITQRKFDNLTKAERGGLSELDKAGFIKRQLVETRQITKHVAQILDSRMNTKYDENDKLIREVKVITLKSKLVSDFRKDFQFYKVREINNYHHAHDAYLNAVVGTALIKKYPKLESEFVYGDYKVYDVRKMIAKSEQEIGKATAKYFFYSNIMNFFKTEITLANGEIRKRPLIETNGETGEIVWDKGRDFATVRKVLSMPQVNIVKKTEVQTGGFSKESILPKRNSDKLIARKKDWDPKKYGGFDSPTVAYSVLVVAKVEKGKSKKLKSVKELLGITIMERSSFEKNPIDFLEAKGYKEVKKDLIIKLPKYSLFELENGRKRMLASAGELQKGNELALPSKYVNFLYLASHYEKLKGSPEDNEQKQLFVEQHKHYLDEIIEQISEFSKRVILADANLDKVLSAYNKHRDKPIREQAENIIHLFTLTNLGAPAAFKYFDTTIDRKRYTSTKEVLDATLIHQSITGLYETRIDLSQLGGDGGPAPEAAAKGSSGGTVSLQDEHRLFDIPVTTSLPDVWLQDFPQAWAETGGLGRAKCQAPIIIDLKPTAVPVSIKQYPMSLEAHMGIRQHIIKFLELGVLRPCRSPWNTPLLPVKKPGTQDYRPVQDLREINKRTVDIHPTVPNPYNLLSTLKPDYSWYTVLDLKDAFFCLPLAPQSQELFAFEWKDPERGISGQLTWTRLPQGFKNSPTLFNEALHRDLTDFRTQHPEVTLLQYVDDLLLAAPTKKACTQGTRHLLQELGEKGYRASAKKAQICQTKVTYLGYILSEGKRWLTPGRIETVARIPPPRNPREVREFLGTAGFCRLWIPGFAELAAPLYALTKPSTPFTWQTEHQLAFEALKKALLSAPALGLPDTSKPFTLFLDERQGIAKGVLTQKLGPWKRPVAYLSKKLDPVAAGWPPCLRIMAATAMLVKDSAKLTLGQPLTVITPHTLEAIVRQPPDRWITNARLTHYQALLLDTDRVQFGPPVTLNPATLLPVPENQPSPHDCRQVLAETHGTREDLKDQELPDADHTWYTDGSSYLDSGTRRAGAAVVDGHNTIWAQSLPPGTSAQKAELIALTKALELSKGKKANIYTDSRYAFATAHTHGSIYERRGWLTSEGKEIKNKAEIIALLKALFLPQEVAIIHCPGHQKGQDPVAVGNRQADRVARQAAMAEVLTLATEPDNTSHITAGKRTADGSEFEKRTADGSEFESPKKKAKVE

SEQ ID NO: 1576 - protein, 2102 aa, synthetic construct
MPAAKRVKLDGGDKKYSIGLDIGTNSVGWAVITDEYKVPSKKFKVLGNTDRHSIKKNLIGALLFDSGETAEATRLKRTARRRYTRRKNRICYLQEIFSNEMAKVDDSFFHRLEESFLVEEDKKHERHPIFGNIVDEVAYHEKYPTIYHLRKKLVDSTDKADLRLIYLALAHMIKFRGHFLIEGDLNPDNSDVDKLFIQLVQTYNQLFEENPINASGVDAKAILSARLSKSRRLENLIAQLPGEKKNGLFGNLIALSLGLTPNFKSNFDLAEDAKLQLSKDTYDDDLDNLLAQIGDQYADLFLAAKNLSDAILLSDILRVNTEITKAPLSASMIKRYDEHHQDLTLLKALVRQQLPEKYKEIFFDQSKNGYAGYIDGGASQEEFYKFIKPILEKMDGTEELLVKLNREDLLRKQRTFDNGSIPHQIHLGELHAILRRQEDFYPFLKDNREKIEKILTFRIPYYVGPLARGNSRFAWMTRKSEETITPWNFEEVVDKGASAQSFIERMTNFDKNLPNEKVLPKHSLLYEYFTVYNELTKVKYVTEGMRKPAFLSGEQKKAIVDLLFKTNRKVTVKQLKEDYFKKIECFDSVEISGVEDRFNASLGTYHDLLKIIKDKDFLDNEENEDILEDIVLTLTLFEDREMIEERLKTYAHLFDDKVMKQLKRRRYTGWGRLSRKLINGIRDKQSGKTILDFLKSDGFANRNFMQLIHDDSLTFKEDIQKAQVSGQGDSLHEHIANLAGSPAIKKGILQTVKVVDELVKVMGRHKPENIVIEMARENQTTQKGQKNSRERMKRIEEGIKELGSQILKEHPVENTQLQNEKLYLYYLQNGRDMYVDQELDINRLSDYDVDHIVPQSFLKDDSIDNKVLTRSDKARGKSDNVPSEEVVKKMKNYWRQLLNAKLITQRKFDNLTKAERGGLSELDKAGFIKRQLVETRQITKHVAQILDSRMNTKYDENDKLIREVKVITLKSKLVSDFRKDFQFYKVREINNYHHAHDAYLNAVVGTALIKKYPKLESEFVYGDYKVYDVRKMIAKSEQEIGKATAKYFFYSNIMNFFKTEITLANGEIRKRPLIETNGETGEIVWDKGRDFATVRKVLSMPQVNIVKKTEVQTGGFSKESILPKRNSDKLIARKKDWDPKKYGGFDSPTVAYSVLVVAKVEKGKSKKLKSVKELLGITIMERSSFEKNPIDFLEAKGYKEVKKDLIIKLPKYSLFELENGRKRMLASAGELQKGNELALPSKYVNFLYLASHYEKLKGSPEDNEQKQLFVEQHKHYLDEIIEQISEFSKRVILADANLDKVLSAYNKHRDKPIREQAENIIHLFTLTNLGAPAAFKYFDTTIDRKRYTSTKEVLDATLIHQSITGLYETRIDLSQLGGDGGEAAAKGSSGGGGGTVSLQDEHRLFDIPVTTSLPDVWLQDFPQAWAETGGLGRAKCQAPIIIDLKPTAVPVSIKQYPMSLEAHMGIRQHIIKFLELGVLRPCRSPWNTPLLPVKKPGTQDYRPVQDLREINKRTVDIHPTVPNPYNLLSTLKPDYSWYTVLDLKDAFFCLPLAPQSQELFAFEWKDPERGISGQLTWTRLPQGFKNSPTLFNEALHRDLTDFRTQHPEVTLLQYVDDLLLAAPTKKACTQGTRHLLQELGEKGYRASAKKAQICQTKVTYLGYILSEGKRWLTPGRIETVARIPPPRNPREVREFLGTAGFCRLWIPGFAELAAPLYALTKPSTPFTWQTEHQLAFEALKKALLSAPALGLPDTSKPFTLFLDERQGIAKGVLTQKLGPWKRPVAYLSKKLDPVAAGWPPCLRIMAATAMLVKDSAKLTLGQPLTVITPHTLEAIVRQPPDRWITNARLTHYQALLLDTDRVQFGPPVTLNPATLLPVPENQPSPHDCRQVLAETHGTREDLKDQELPDADHTWYTDGSSYLDSGTRRAGAAVVDGHNTIWAQSLPPGTSAQKAELIALTKALELSKGKKANIYTDSRYAFATAHTHGSIYERRGWLTSEGKEIKNKAEIIALLKALFLPQEVAIIHCPGHQKGQDPVAVGNRQADRVARQAAMAEVLTLATEPDNTSHITAGKRTADGSEFEKRTADGSEFESPKKKAKVE

SEQ ID NO: 1577 - protein, 2102 aa, synthetic construct
MPAAKRVKLDGGDKKYSIGLDIGTNSVGWAVITDEYKVPSKKFKVLGNTDRHSIKKNLIGALLFDSGETAEATRLKRTARRRYTRRKNRICYLQEIFSNEMAKVDDSFFHRLEESFLVEEDKKHERHPIFGNIVDEVAYHEKYPTIYHLRKKLVDSTDKADLRLIYLALAHMIKFRGHFLIEGDLNPDNSDVDKLFIQLVQTYNQLFEENPINASGVDAKAILSARLSKSRRLENLIAQLPGEKKNGLFGNLIALSLGLTPNFKSNFDLAEDAKLQLSKDTYDDDLDNLLAQIGDQYADLFLAAKNLSDAILLSDILRVNTEITKAPLSASMIKRYDEHHQDLTLLKALVRQQLPEKYKEIFFDQSKNGYAGYIDGGASQEEFYKFIKPILEKMDGTEELLVKLNREDLLRKQRTFDNGSIPHQIHLGELHAILRRQEDFYPFLKDNREKIEKILTFRIPYYVGPLARGNSRFAWMTRKSEETITPWNFEEVVDKGASAQSFIERMTNFDKNLPNEKVLPKHSLLYEYFTVYNELTKVKYVTEGMRKPAFLSGEQKKAIVDLLFKTNRKVTVKQLKEDYFKKIECFDSVEISGVEDRFNASLGTYHDLLKIIKDKDFLDNEENEDILEDIVLTLTLFEDREMIEERLKTYAHLFDDKVMKQLKRRRYTGWGRLSRKLINGIRDKQSGKTILDFLKSDGFANRNFMQLIHDDSLTFKEDIQKAQVSGQGDSLHEHIANLAGSPAIKKGILQTVKVVDELVKVMGRHKPENIVIEMARENQTTQKGQKNSRERMKRIEEGIKELGSQILKEHPVENTQLQNEKLYLYYLQNGRDMYVDQELDINRLSDYDVDHIVPQSFLKDDSIDNKVLTRSDKARGKSDNVPSEEVVKKMKNYWRQLLNAKLITQRKFDNLTKAERGGLSELDKAGFIKRQLVETRQITKHVAQILDSRMNTKYDENDKLIREVKVITLKSKLVSDFRKDFQFYKVREINNYHHAHDAYLNAVVGTALIKKYPKLESEFVYGDYKVYDVRKMIAKSEQEIGKATAKYFFYSNIMNFFKTEITLANGEIRKRPLIETNGETGEIVWDKGRDFATVRKVLSMPQVNIVKKTEVQTGGFSKESILPKRNSDKLIARKKDWDPKKYGGFDSPTVAYSVLVVAKVEKGKSKKLKSVKELLGITIMERSSFEKNPIDFLEAKGYKEVKKDLIIKLPKYSLFELENGRKRMLASAGELQKGNELALPSKYVNFLYLASHYEKLKGSPEDNEQKQLFVEQHKHYLDEIIEQISEFSKRVILADANLDKVLSAYNKHRDKPIREQAENIIHLFTLTNLGAPAAFKYFDTTIDRKRYTSTKEVLDATLIHQSITGLYETRIDLSQLGGDGGEAAAKGGGGGSGGTVSLQDEHRLFDIPVTTSLPDVWLQDFPQAWAETGGLGRAKCQAPIIIDLKPTAVPVSIKQYPMSLEAHMGIRQHIIKFLELGVLRPCRSPWNTPLLPVKKPGTQDYRPVQDLREINKRTVDIHPTVPNPYNLLSTLKPDYSWYTVLDLKDAFFCLPLAPQSQELFAFEWKDPERGISGQLTWTRLPQGFKNSPTLFNEALHRDLTDFRTQHPEVTLLQYVDDLLLAAPTKKACTQGTRHLLQELGEKGYRASAKKAQICQTKVTYLGYILSEGKRWLTPGRIETVARIPPPRNPREVREFLGTAGFCRLWIPGFAELAAPLYALTKPSTPFTWQTEHQLAFEALKKALLSAPALGLPDTSKPFTLFLDERQGIAKGVLTQKLGPWKRPVAYLSKKLDPVAAGWPPCLRIMAATAMLVKDSAKLTLGQPLTVITPHTLEAIVRQPPDRWITNARLTHYQALLLDTDRVQFGPPVTLNPATLLPVPENQPSPHDCRQVLAETHGTREDLKDQELPDADHTWYTDGSSYLDSGTRRAGAAVVDGHNTIWAQSLPPGTSAQKAELIALTKALELSKGKKANIYTDSRYAFATAHTHGSIYERRGWLTSEGKEIKNKAEIIALLKALFLPQEVAIIHCPGHQKGQDPVAVGNRQADRVARQAAMAEVLTLATEPDNTSHITAGKRTADGSEFEKRTADGSEFESPKKKAKVE

SEQ ID NO: 1578 - protein, 2100 aa, synthetic construct
MPAAKRVKLDGGDKKYSIGLDIGTNSVGWAVITDEYKVPSKKFKVLGNTDRHSIKKNLIGALLFDSGETAEATRLKRTARRRYTRRKNRICYLQEIFSNEMAKVDDSFFHRLEESFLVEEDKKHERHPIFGNIVDEVAYHEKYPTIYHLRKKLVDSTDKADLRLIYLALAHMIKFRGHFLIEGDLNPDNSDVDKLFIQLVQTYNQLFEENPINASGVDAKAILSARLSKSRRLENLIAQLPGEKKNGLFGNLIALSLGLTPNFKSNFDLAEDAKLQLSKDTYDDDLDNLLAQIGDQYADLFLAAKNLSDAILLSDILRVNTEITKAPLSASMIKRYDEHHQDLTLLKALVRQQLPEKYKEIFFDQSKNGYAGYIDGGASQEEFYKFIKPILEKMDGTEELLVKLNREDLLRKQRTFDNGSIPHQIHLGELHAILRRQEDFYPFLKDNREKIEKILTFRIPYYVGPLARGNSRFAWMTRKSEETITPWNFEEVVDKGASAQSFIERMTNFDKNLPNEKVLPKHSLLYEYFTVYNELTKVKYVTEGMRKPAFLSGEQKKAIVDLLFKTNRKVTVKQLKEDYFKKIECFDSVEISGVEDRFNASLGTYHDLLKIIKDKDFLDNEENEDILEDIVLTLTLFEDREMIEERLKTYAHLFDDKVMKQLKRRRYTGWGRLSRKLINGIRDKQSGKTILDFLKSDGFANRNFMQLIHDDSLTFKEDIQKAQVSGQGDSLHEHIANLAGSPAIKKGILQTVKVVDELVKVMGRHKPENIVIEMARENQTTQKGQKNSRERMKRIEEGIKELGSQILKEHPVENTQLQNEKLYLYYLQNGRDMYVDQELDINRLSDYDVDHIVPQSFLKDDSIDNKVLTRSDKARGKSDNVPSEEVVKKMKNYWRQLLNAKLITQRKFDNLTKAERGGLSELDKAGFIKRQLVETRQITKHVAQILDSRMNTKYDENDKLIREVKVITLKSKLVSDFRKDFQFYKVREINNYHHAHDAYLNAVVGTALIKKYPKLESEFVYGDYKVYDVRKMIAKSEQEIGKATAKYFFYSNIMNFFKTEITLANGEIRKRPLIETNGETGEIVWDKGRDFATVRKVLSMPQVNIVKKTEVQTGGFSKESILPKRNSDKLIARKKDWDPKKYGGFDSPTVAYSVLVVAKVEKGKSKKLKSVKELLGITIMERSSFEKNPIDFLEAKGYKEVKKDLIIKLPKYSLFELENGRKRMLASAGELQKGNELALPSKYVNFLYLASHYEKLKGSPEDNEQKQLFVEQHKHYLDEIIEQISEFSKRVILADANLDKVLSAYNKHRDKPIREQAENIIHLFTLTNLGAPAAFKYFDTTIDRKRYTSTKEVLDATLIHQSITGLYETRIDLSQLGGDGGGGGGSSPAPGGTVSLQDEHRLFDIPVTTSLPDVWLQDFPQAWAETGGLGRAKCQAPIIIDLKPTAVPVSIKQYPMSLEAHMGIRQHIIKFLELGVLRPCRSPWNTPLLPVKKPGTQDYRPVQDLREINKRTVDIHPTVPNPYNLLSTLKPDYSWYTVLDLKDAFFCLPLAPQSQELFAFEWKDPERGISGQLTWTRLPQGFKNSPTLFNEALHRDLTDFRTQHPEVTLLQYVDDLLLAAPTKKACTQGTRHLLQELGEKGYRASAKKAQICQTKVTYLGYILSEGKRWLTPGRIETVARIPPPRNPREVREFLGTAGFCRLWIPGFAELAAPLYALTKPSTPFTWQTEHQLAFEALKKALLSAPALGLPDTSKPFTLFLDERQGIAKGVLTQKLGPWKRPVAYLSKKLDPVAAGWPPCLRIMAATAMLVKDSAKLTLGQPLTVITPHTLEAIVRQPPDRWITNARLTHYQALLLDTDRVQFGPPVTLNPATLLPVPENQPSPHDCRQVLAETHGTREDLKDQELPDADHTWYTDGSSYLDSGTRRAGAAVVDGHNTIWAQSLPPGTSAQKAELIALTKALELSKGKKANIYTDSRYAFATAHTHGSIYERRGWLTSEGKEIKNKAEIIALLKALFLPQEVAIIHCPGHQKGQDPVAVGNRQADRVARQAAMAEVLTLATEPDNTSHITAGKRTADGSEFEKRTADGSEFESPKKKAKVE

SEQ ID NO: 1579 - protein, 2102 aa, synthetic construct
MPAAKRVKLDGGDKKYSIGLDIGTNSVGWAVITDEYKVPSKKFKVLGNTDRHSIKKNLIGALLFDSGETAEATRLKRTARRRYTRRKNRICYLQEIFSNEMAKVDDSFFHRLEESFLVEEDKKHERHPIFGNIVDEVAYHEKYPTIYHLRKKLVDSTDKADLRLIYLALAHMIKFRGHFLIEGDLNPDNSDVDKLFIQLVQTYNQLFEENPINASGVDAKAILSARLSKSRRLENLIAQLPGEKKNGLFGNLIALSLGLTPNFKSNFDLAEDAKLQLSKDTYDDDLDNLLAQIGDQYADLFLAAKNLSDAILLSDILRVNTEITKAPLSASMIKRYDEHHQDLTLLKALVRQQLPEKYKEIFFDQSKNGYAGYIDGGASQEEFYKFIKPILEKMDGTEELLVKLNREDLLRKQRTFDNGSIPHQIHLGELHAILRRQEDFYPFLKDNREKIEKILTFRIPYYVGPLARGNSRFAWMTRKSEETITPWNFEEVVDKGASAQSFIERMTNFDKNLPNEKVLPKHSLLYEYFTVYNELTKVKYVTEGMRKPAFLSGEQKKAIVDLLFKTNRKVTVKQLKEDYFKKIECFDSVEISGVEDRFNASLGTYHDLLKIIKDKDFLDNEENEDILEDIVLTLTLFEDREMIEERLKTYAHLFDDKVMKQLKRRRYTGWGRLSRKLINGIRDKQSGKTILDFLKSDGFANRNFMQLIHDDSLTFKEDIQKAQVSGQGDSLHEHIANLAGSPAIKKGILQTVKVVDELVKVMGRHKPENIVIEMARENQTTQKGQKNSRERMKRIEEGIKELGSQILKEHPVENTQLQNEKLYLYYLQNGRDMYVDQELDINRLSDYDVDHIVPQSFLKDDSIDNKVLTRSDKARGKSDNVPSEEVVKKMKNYWRQLLNAKLITQRKFDNLTKAERGGLSELDKAGFIKRQLVETRQITKHVAQILDSRMNTKYDENDKLIREVKVITLKSKLVSDFRKDFQFYKVREINNYHHAHDAYLNAVVGTALIKKYPKLESEFVYGDYKVYDVRKMIAKSEQEIGKATAKYFFYSNIMNFFKTEITLANGEIRKRPLIETNGETGEIVWDKGRDFATVRKVLSMPQVNIVKKTEVQTGGFSKESILPKRNSDKLIARKKDWDPKKYGGFDSPTVAYSVLVVAKVEKGKSKKLKSVKELLGITIMERSSFEKNPIDFLEAKGYKEVKKDLIIKLPKYSLFELENGRKRMLASAGELQKGNELALPSKYVNFLYLASHYEKLKGSPEDNEQKQLFVEQHKHYLDEIIEQISEFSKRVILADANLDKVLSAYNKHRDKPIREQAENIIHLFTLTNLGAPAAFKYFDTTIDRKRYTSTKEVLDATLIHQSITGLYETRIDLSQLGGDGGEAAAKPAPGGSGGTVSLQDEHRLFDIPVTTSLPDVWLQDFPQAWAETGGLGRAKCQAPIIIDLKPTAVPVSIKQYPMSLEAHMGIRQHIIKFLELGVLRPCRSPWNTPLLPVKKPGTQDYRPVQDLREINKRTVDIHPTVPNPYNLLSTLKPDYSWYTVLDLKDAFFCLPLAPQSQELFAFEWKDPERGISGQLTWTRLPQGFKNSPTLFNEALHRDLTDFRTQHPEVTLLQYVDDLLLAAPTKKACTQGTRHLLQELGEKGYRASAKKAQICQTKVTYLGYILSEGKRWLTPGRIETVARIPPPRNPREVREFLGTAGFCRLWIPGFAELAAPLYALTKPSTPFTWQTEHQLAFEALKKALLSAPALGLPDTSKPFTLFLDERQGIAKGVLTQKLGPWKRPVAYLSKKLDPVAAGWPPCLRIMAATAMLVKDSAKLTLGQPLTVITPHTLEAIVRQPPDRWITNARLTHYQALLLDTDRVQFGPPVTLNPATLLPVPENQPSPHDCRQVLAETHGTREDLKDQELPDADHTWYTDGSSYLDSGTRRAGAAVVDGHNTIWAQSLPPGTSAQKAELIALTKALELSKGKKANIYTDSRYAFATAHTHGSIYERRGWLTSEGKEIKNKAEIIALLKALFLPQEVAIIHCPGHQKGQDPVAVGNRQADRVARQAAMAEVLTLATEPDNTSHITAGKRTADGSEFEKRTADGSEFESPKKKAKVE

SEQ ID NO: 1580 - protein, 2102 aa, synthetic construct
MPAAKRVKLDGGDKKYSIGLDIGTNSVGWAVITDEYKVPSKKFKVLGNTDRHSIKKNLIGALLFDSGETAEATRLKRTARRRYTRRKNRICYLQEIFSNEMAKVDDSFFHRLEESFLVEEDKKHERHPIFGNIVDEVAYHEKYPTIYHLRKKLVDSTDKADLRLIYLALAHMIKFRGHFLIEGDLNPDNSDVDKLFIQLVQTYNQLFEENPINASGVDAKAILSARLSKSRRLENLIAQLPGEKKNGLFGNLIALSLGLTPNFKSNFDLAEDAKLQLSKDTYDDDLDNLLAQIGDQYADLFLAAKNLSDAILLSDILRVNTEITKAPLSASMIKRYDEHHQDLTLLKALVRQQLPEKYKEIFFDQSKNGYAGYIDGGASQEEFYKFIKPILEKMDGTEELLVKLNREDLLRKQRTFDNGSIPHQIHLGELHAILRRQEDFYPFLKDNREKIEKILTFRIPYYVGPLARGNSRFAWMTRKSEETITPWNFEEVVDKGASAQSFIERMTNFDKNLPNEKVLPKHSLLYEYFTVYNELTKVKYVTEGMRKPAFLSGEQKKAIVDLLFKTNRKVTVKQLKEDYFKKIECFDSVEISGVEDRFNASLGTYHDLLKIIKDKDFLDNEENEDILEDIVLTLTLFEDREMIEERLKTYAHLFDDKVMKQLKRRRYTGWGRLSRKLINGIRDKQSGKTILDFLKSDGFANRNFMQLIHDDSLTFKEDIQKAQVSGQGDSLHEHIANLAGSPAIKKGILQTVKVVDELVKVMGRHKPENIVIEMARENQTTQKGQKNSRERMKRIEEGIKELGSQILKEHPVENTQLQNEKLYLYYLQNGRDMYVDQELDINRLSDYDVDHIVPQSFLKDDSIDNKVLTRSDKARGKSDNVPSEEVVKKMKNYWRQLLNAKLITQRKFDNLTKAERGGLSELDKAGFIKRQLVETRQITKHVAQILDSRMNTKYDENDKLIREVKVITLKSKLVSDFRKDFQFYKVREINNYHHAHDAYLNAVVGTALIKKYPKLESEFVYGDYKVYDVRKMIAKSEQEIGKATAKYFFYSNIMNFFKTEITLANGEIRKRPLIETNGETGEIVWDKGRDFATVRKVLSMPQVNIVKKTEVQTGGFSKESILPKRNSDKLIARKKDWDPKKYGGFDSPTVAYSVLVVAKVEKGKSKKLKSVKELLGITIMERSSFEKNPIDFLEAKGYKEVKKDLIIKLPKYSLFELENGRKRMLASAGELQKGNELALPSKYVNFLYLASHYEKLKGSPEDNEQKQLFVEQHKHYLDEIIEQISEFSKRVILADANLDKVLSAYNKHRDKPIREQAENIIHLFTLTNLGAPAAFKYFDTTIDRKRYTSTKEVLDATLIHQSITGLYETRIDLSQLGGDGGPAPGGGEAAAKGGTVSLQDEHRLFDIPVTTSLPDVWLQDFPQAWAETGGLGRAKCQAPIIIDLKPTAVPVSIKQYPMSLEAHMGIRQHIIKFLELGVLRPCRSPWNTPLLPVKKPGTQDYRPVQDLREINKRTVDIHPTVPNPYNLLSTLKPDYSWYTVLDLKDAFFCLPLAPQSQELFAFEWKDPERGISGQLTWTRLPQGFKNSPTLFNEALHRDLTDFRTQHPEVTLLQYVDDLLLAAPTKKACTQGTRHLLQELGEKGYRASAKKAQICQTKVTYLGYILSEGKRWLTPGRIETVARIPPPRNPREVREFLGTAGFCRLWIPGFAELAAPLYALTKPSTPFTWQTEHQLAFEALKKALLSAPALGLPDTSKPFTLFLDERQGIAKGVLTQKLGPWKRPVAYLSKKLDPVAAGWPPCLRIMAATAMLVKDSAKLTLGQPLTVITPHTLEAIVRQPPDRWITNARLTHYQALLLDTDRVQFGPPVTLNPATLLPVPENQPSPHDCRQVLAETHGTREDLKDQELPDADHTWYTDGSSYLDSGTRRAGAAVVDGHNTIWAQSLPPGTSAQKAELIALTKALELSKGKKANIYTDSRYAFATAHTHGSIYERRGWLTSEGKEIKNKAEIIALLKALFLPQEVAIIHCPGHQKGQDPVAVGNRQADRVARQAAMAEVLTLATEPDNTSHITAGKRTADGSEFEKRTADGSEFESPKKKAKVE

SEQ ID NO: 1581 - protein, 2102 aa, synthetic construct
MPAAKRVKLDGGDKKYSIGLDIGTNSVGWAVITDEYKVPSKKFKVLGNTDRHSIKKNLIGALLFDSGETAEATRLKRTARRRYTRRKNRICYLQEIFSNEMAKVDDSFFHRLEESFLVEEDKKHERHPIFGNIVDEVAYHEKYPTIYHLRKKLVDSTDKADLRLIYLALAHMIKFRGHFLIEGDLNPDNSDVDKLFIQLVQTYNQLFEENPINASGVDAKAILSARLSKSRRLENLIAQLPGEKKNGLFGNLIALSLGLTPNFKSNFDLAEDAKLQLSKDTYDDDLDNLLAQIGDQYADLFLAAKNLSDAILLSDILRVNTEITKAPLSASMIKRYDEHHQDLTLLKALVRQQLPEKYKEIFFDQSKNGYAGYIDGGASQEEFYKFIKPILEKMDGTEELLVKLNREDLLRKQRTFDNGSIPHQIHLGELHAILRRQEDFYPFLKDNREKIEKILTFRIPYYVGPLARGNSRFAWMTRKSEETITPWNFEEVVDKGASAQSFIERMTNFDKNLPNEKVLPKHSLLYEYFTVYNELTKVKYVTEGMRKPAFLSGEQKKAIVDLLFKTNRKVTVKQLKEDYFKKIECFDSVEISGVEDRFNASLGTYHDLLKIIKDKDFLDNEENEDILEDIVLTLTLFEDREMIEERLKTYAHLFDDKVMKQLKRRRYTGWGRLSRKLINGIRDKQSGKTILDFLKSDGFANRNFMQLIHDDSLTFKEDIQKAQVSGQGDSLHEHIANLAGSPAIKKGILQTVKVVDELVKVMGRHKPENIVIEMARENQTTQKGQKNSRERMKRIEEGIKELGSQILKEHPVENTQLQNEKLYLYYLQNGRDMYVDQELDINRLSDYDVDHIVPQSFLKDDSIDNKVLTRSDKARGKSDNVPSEEVVKKMKNYWRQLLNAKLITQRKFDNLTKAERGGLSELDKAGFIKRQLVETRQITKHVAQILDSRMNTKYDENDKLIREVKVITLKSKLVSDFRKDFQFYKVREINNYHHAHDAYLNAVVGTALIKKYPKLESEFVYGDYKVYDVRKMIAKSEQEIGKATAKYFFYSNIMNFFKTEITLANGEIRKRPLIETNGETGEIVWDKGRDFATVRKVLSMPQVNIVKKTEVQTGGFSKESILPKRNSDKLIARKKDWDPKKYGGFDSPTVAYSVLVVAKVEKGKSKKLKSVKELLGITIMERSSFEKNPIDFLEAKGYKEVKKDLIIKLPKYSLFELENGRKRMLASAGELQKGNELALPSKYVNFLYLASHYEKLKGSPEDNEQKQLFVEQHKHYLDEIIEQISEFSKRVILADANLDKVLSAYNKHRDKPIREQAENIIHLFTLTNLGAPAAFKYFDTTIDRKRYTSTKEVLDATLIHQSITGLYETRIDLSQLGGDGGPAPEAAAKGGGGGTVSLQDEHRLFDIPVTTSLPDVWLQDFPQAWAETGGLGRAKCQAPIIIDLKPTAVPVSIKQYPMSLEAHMGIRQHIIKFLELGVLRPCRSPWNTPLLPVKKPGTQDYRPVQDLREINKRTVDIHPTVPNPYNLLSTLKPDYSWYTVLDLKDAFFCLPLAPQSQELFAFEWKDPERGISGQLTWTRLPQGFKNSPTLFNEALHRDLTDFRTQHPEVTLLQYVDDLLLAAPTKKACTQGTRHLLQELGEKGYRASAKKAQICQTKVTYLGYILSEGKRWLTPGRIETVARIPPPRNPREVREFLGTAGFCRLWIPGFAELAAPLYALTKPSTPFTWQTEHQLAFEALKKALLSAPALGLPDTSKPFTLFLDERQGIAKGVLTQKLGPWKRPVAYLSKKLDPVAAGWPPCLRIMAATAMLVKDSAKLTLGQPLTVITPHTLEAIVRQPPDRWITNARLTHYQALLLDTDRVQFGPPVTLNPATLLPVPENQPSPHDCRQVLAETHGTREDLKDQELPDADHTWYTDGSSYLDSGTRRAGAAVVDGHNTIWAQSLPPGTSAQKAELIALTKALELSKGKKANIYTDSRYAFATAHTHGSIYERRGWLTSEGKEIKNKAEIIALLKALFLPQEVAIIHCPGHQKGQDPVAVGNRQADRVARQAAMAEVLTLATEPDNTSHITAGKRTADGSEFEKRTADGSEFESPKKKAKVE

SEQ ID NO: 1582 - protein, 2100 aa, synthetic construct
MPAAKRVKLDGGDKKYSIGLDIGTNSVGWAVITDEYKVPSKKFKVLGNTDRHSIKKNLIGALLFDSGETAEATRLKRTARRRYTRRKNRICYLQEIFSNEMAKVDDSFFHRLEESFLVEEDKKHERHPIFGNIVDEVAYHEKYPTIYHLRKKLVDSTDKADLRLIYLALAHMIKFRGHFLIEGDLNPDNSDVDKLFIQLVQTYNQLFEENPINASGVDAKAILSARLSKSRRLENLIAQLPGEKKNGLFGNLIALSLGLTPNFKSNFDLAEDAKLQLSKDTYDDDLDNLLAQIGDQYADLFLAAKNLSDAILLSDILRVNTEITKAPLSASMIKRYDEHHQDLTLLKALVRQQLPEKYKEIFFDQSKNGYAGYIDGGASQEEFYKFIKPILEKMDGTEELLVKLNREDLLRKQRTFDNGSIPHQIHLGELHAILRRQEDFYPFLKDNREKIEKILTFRIPYYVGPLARGNSRFAWMTRKSEETITPWNFEEVVDKGASAQSFIERMTNFDKNLPNEKVLPKHSLLYEYFTVYNELTKVKYVTEGMRKPAFLSGEQKKAIVDLLFKTNRKVTVKQLKEDYFKKIECFDSVEISGVEDRFNASLGTYHDLLKIIKDKDFLDNEENEDILEDIVLTLTLFEDREMIEERLKTYAHLFDDKVMKQLKRRRYTGWGRLSRKLINGIRDKQSGKTILDFLKSDGFANRNFMQLIHDDSLTFKEDIQKAQVSGQGDSLHEHIANLAGSPAIKKGILQTVKVVDELVKVMGRHKPENIVIEMARENQTTQKGQKNSRERMKRIEEGIKELGSQILKEHPVENTQLQNEKLYLYYLQNGRDMYVDQELDINRLSDYDVDHIVPQSFLKDDSIDNKVLTRSDKARGKSDNVPSEEVVKKMKNYWRQLLNAKLITQRKFDNLTKAERGGLSELDKAGFIKRQLVETRQITKHVAQILDSRMNTKYDENDKLIREVKVITLKSKLVSDFRKDFQFYKVREINNYHHAHDAYLNAVVGTALIKKYPKLESEFVYGDYKVYDVRKMIAKSEQEIGKATAKYFFYSNIMNFFKTEITLANGEIRKRPLIETNGETGEIVWDKGRDFATVRKVLSMPQVNIVKKTEVQTGGFSKESILPKRNSDKLIARKKDWDPKKYGGFDSPTVAYSVLVVAKVEKGKSKKLKSVKELLGITIMERSSFEKNPIDFLEAKGYKEVKKDLIIKLPKYSLFELENGRKRMLASAGELQKGNELALPSKYVNFLYLASHYEKLKGSPEDNEQKQLFVEQHKHYLDEIIEQISEFSKRVILADANLDKVLSAYNKHRDKPIREQAENIIHLFTLTNLGAPAAFKYFDTTIDRKRYTSTKEVLDATLIHQSITGLYETRIDLSQLGGDGGGSSGSSGSSGGTVSLQDEHRLFDIPVTTSLPDVWLQDFPQAWAETGGLGRAKCQAPIIIDLKPTAVPVSIKQYPMSLEAHMGIRQHIIKFLELGVLRPCRSPWNTPLLPVKKPGTQDYRPVQDLREINKRTVDIHPTVPNPYNLLSTLKPDYSWYTVLDLKDAFFCLPLAPQSQELFAFEWKDPERGISGQLTWTRLPQGFKNSPTLFNEALHRDLTDFRTQHPEVTLLQYVDDLLLAAPTKKACTQGTRHLLQELGEKGYRASAKKAQICQTKVTYLGYILSEGKRWLTPGRIETVARIPPPRNPREVREFLGTAGFCRLWIPGFAELAAPLYALTKPSTPFTWQTEHQLAFEALKKALLSAPALGLPDTSKPFTLFLDERQGIAKGVLTQKLGPWKRPVAYLSKKLDPVAAGWPPCLRIMAATAMLVKDSAKLTLGQPLTVITPHTLEAIVRQPPDRWITNARLTHYQALLLDTDRVQFGPPVTLNPATLLPVPENQPSPHDCRQVLAETHGTREDLKDQELPDADHTWYTDGSSYLDSGTRRAGAAVVDGHNTIWAQSLPPGTSAQKAELIALTKALELSKGKKANIYTDSRYAFATAHTHGSIYERRGWLTSEGKEIKNKAEIIALLKALFLPQEVAIIHCPGHQKGQDPVAVGNRQADRVARQAAMAEVLTLATEPDNTSHITAGKRTADGSEFEKRTADGSEFESPKKKAKVE

SEQ ID NO: 1583 - protein, 2099 aa, synthetic construct
MPAAKRVKLDGGDKKYSIGLDIGTNSVGWAVITDEYKVPSKKFKVLGNTDRHSIKKNLIGALLFDSGETAEATRLKRTARRRYTRRKNRICYLQEIFSNEMAKVDDSFFHRLEESFLVEEDKKHERHPIFGNIVDEVAYHEKYPTIYHLRKKLVDSTDKADLRLIYLALAHMIKFRGHFLIEGDLNPDNSDVDKLFIQLVQTYNQLFEENPINASGVDAKAILSARLSKSRRLENLIAQLPGEKKNGLFGNLIALSLGLTPNFKSNFDLAEDAKLQLSKDTYDDDLDNLLAQIGDQYADLFLAAKNLSDAILLSDILRVNTEITKAPLSASMIKRYDEHHQDLTLLKALVRQQLPEKYKEIFFDQSKNGYAGYIDGGASQEEFYKFIKPILEKMDGTEELLVKLNREDLLRKQRTFDNGSIPHQIHLGELHAILRRQEDFYPFLKDNREKIEKILTFRIPYYVGPLARGNSRFAWMTRKSEETITPWNFEEVVDKGASAQSFIERMTNFDKNLPNEKVLPKHSLLYEYFTVYNELTKVKYVTEGMRKPAFLSGEQKKAIVDLLFKTNRKVTVKQLKEDYFKKIECFDSVEISGVEDRFNASLGTYHDLLKIIKDKDFLDNEENEDILEDIVLTLTLFEDREMIEERLKTYAHLFDDKVMKQLKRRRYTGWGRLSRKLINGIRDKQSGKTILDFLKSDGFANRNFMQLIHDDSLTFKEDIQKAQVSGQGDSLHEHIANLAGSPAIKKGILQTVKVVDELVKVMGRHKPENIVIEMARENQTTQKGQKNSRERMKRIEEGIKELGSQILKEHPVENTQLQNEKLYLYYLQNGRDMYVDQELDINRLSDYDVDHIVPQSFLKDDSIDNKVLTRSDKARGKSDNVPSEEVVKKMKNYWRQLLNAKLITQRKFDNLTKAERGGLSELDKAGFIKRQLVETRQITKHVAQILDSRMNTKYDENDKLIREVKVITLKSKLVSDFRKDFQFYKVREINNYHHAHDAYLNAVVGTALIKKYPKLESEFVYGDYKVYDVRKMIAKSEQEIGKATAKYFFYSNIMNFFKTEITLANGEIRKRPLIETNGETGEIVWDKGRDFATVRKVLSMPQVNIVKKTEVQTGGFSKESILPKRNSDKLIARKKDWDPKKYGGFDSPTVAYSVLVVAKVEKGKSKKLKSVKELLGITIMERSSFEKNPIDFLEAKGYKEVKKDLIIKLPKYSLFELENGRKRMLASAGELQKGNELALPSKYVNFLYLASHYEKLKGSPEDNEQKQLFVEQHKHYLDEIIEQISEFSKRVILADANLDKVLSAYNKHRDKPIREQAENIIHLFTLTNLGAPAAFKYFDTTIDRKRYTSTKEVLDATLIHQSITGLYETRIDLSQLGGDGGEAAAKGSSGGTVSLQDEHRLFDIPVTTSLPDVWLQDFPQAWAETGGLGRAKCQAPIIIDLKPTAVPVSIKQYPMSLEAHMGIRQHIIKFLELGVLRPCRSPWNTPLLPVKKPGTQDYRPVQDLREINKRTVDIHPTVPNPYNLLSTLKPDYSWYTVLDLKDAFFCLPLAPQSQELFAFEWKDPERGISGQLTWTRLPQGFKNSPTLFNEALHRDLTDFRTQHPEVTLLQYVDDLLLAAPTKKACTQGTRHLLQELGEKGYRASAKKAQICQTKVTYLGYILSEGKRWLTPGRIETVARIPPPRNPREVREFLGTAGFCRLWIPGFAELAAPLYALTKPSTPFTWQTEHQLAFEALKKALLSAPALGLPDTSKPFTLFLDERQGIAKGVLTQKLGPWKRPVAYLSKKLDPVAAGWPPCLRIMAATAMLVKDSAKLTLGQPLTVITPHTLEAIVRQPPDRWITNARLTHYQALLLDTDRVQFGPPVTLNPATLLPVPENQPSPHDCRQVLAETHGTREDLKDQELPDADHTWYTDGSSYLDSGTRRAGAAVVDGHNTIWAQSLPPGTSAQKAELIALTKALELSKGKKANIYTDSRYAFATAHTHGSIYERRGWLTSEGKEIKNKAEIIALLKALFLPQEVAIIHCPGHQKGQDPVAVGNRQADRVARQAAMAEVLTLATEPDNTSHITAGKRTADGSEFEKRTADGSEFESPKKKAKVE

SEQ ID NO: 1584 - protein, 2100 aa, synthetic construct
MPAAKRVKLDGGDKKYSIGLDIGTNSVGWAVITDEYKVPSKKFKVLGNTDRHSIKKNLIGALLFDSGETAEATRLKRTARRRYTRRKNRICYLQEIFSNEMAKVDDSFFHRLEESFLVEEDKKHERHPIFGNIVDEVAYHEKYPTIYHLRKKLVDSTDKADLRLIYLALAHMIKFRGHFLIEGDLNPDNSDVDKLFIQLVQTYNQLFEENPINASGVDAKAILSARLSKSRRLENLIAQLPGEKKNGLFGNLIALSLGLTPNFKSNFDLAEDAKLQLSKDTYDDDLDNLLAQIGDQYADLFLAAKNLSDAILLSDILRVNTEITKAPLSASMIKRYDEHHQDLTLLKALVRQQLPEKYKEIFFDQSKNGYAGYIDGGASQEEFYKFIKPILEKMDGTEELLVKLNREDLLRKQRTFDNGSIPHQIHLGELHAILRRQEDFYPFLKDNREKIEKILTFRIPYYVGPLARGNSRFAWMTRKSEETITPWNFEEVVDKGASAQSFIERMTNFDKNLPNEKVLPKHSLLYEYFTVYNELTKVKYVTEGMRKPAFLSGEQKKAIVDLLFKTNRKVTVKQLKEDYFKKIECFDSVEISGVEDRFNASLGTYHDLLKIIKDKDFLDNEENEDILEDIVLTLTLFEDREMIEERLKTYAHLFDDKVMKQLKRRRYTGWGRLSRKLINGIRDKQSGKTILDFLKSDGFANRNFMQLIHDDSLTFKEDIQKAQVSGQGDSLHEHIANLAGSPAIKKGILQTVKVVDELVKVMGRHKPENIVIEMARENQTTQKGQKNSRERMKRIEEGIKELGSQILKEHPVENTQLQNEKLYLYYLQNGRDMYVDQELDINRLSDYDVDHIVPQSFLKDDSIDNKVLTRSDKARGKSDNVPSEEVVKKMKNYWRQLLNAKLITQRKFDNLTKAERGGLSELDKAGFIKRQLVETRQITKHVAQILDSRMNTKYDENDKLIREVKVITLKSKLVSDFRKDFQFYKVREINNYHHAHDAYLNAVVGTALIKKYPKLESEFVYGDYKVYDVRKMIAKSEQEIGKATAKYFFYSNIMNFFKTEITLANGEIRKRPLIETNGETGEIVWDKGRDFATVRKVLSMPQVNIVKKTEVQTGGFSKESILPKRNSDKLIARKKDWDPKKYGGFDSPTVAYSVLVVAKVEKGKSKKLKSVKELLGITIMERSSFEKNPIDFLEAKGYKEVKKDLIIKLPKYSLFELENGRKRMLASAGELQKGNELALPSKYVNFLYLASHYEKLKGSPEDNEQKQLFVEQHKHYLDEIIEQISEFSKRVILADANLDKVLSAYNKHRDKPIREQAENIIHLFTLTNLGAPAAFKYFDTTIDRKRYTSTKEVLDATLIHQSITGLYETRIDLSQLGGDGGGSSGGSPAPGGTVSLQDEHRLFDIPVTTSLPDVWLQDFPQAWAETGGLGRAKCQAPIIIDLKPTAVPVSIKQYPMSLEAHMGIRQHIIKFLELGVLRPCRSPWNTPLLPVKKPGTQDYRPVQDLREINKRTVDIHPTVPNPYNLLSTLKPDYSWYTVLDLKDAFFCLPLAPQSQELFAFEWKDPERGISGQLTWTRLPQGFKNSPTLFNEALHRDLTDFRTQHPEVTLLQYVDDLLLAAPTKKACTQGTRHLLQELGEKGYRASAKKAQICQTKVTYLGYILSEGKRWLTPGRIETVARIPPPRNPREVREFLGTAGFCRLWIPGFAELAAPLYALTKPSTPFTWQTEHQLAFEALKKALLSAPALGLPDTSKPFTLFLDERQGIAKGVLTQKLGPWKRPVAYLSKKLDPVAAGWPPCLRIMAATAMLVKDSAKLTLGQPLTVITPHTLEAIVRQPPDRWITNARLTHYQALLLDTDRVQFGPPVTLNPATLLPVPENQPSPHDCRQVLAETHGTREDLKDQELPDADHTWYTDGSSYLDSGTRRAGAAVVDGHNTIWAQSLPPGTSAQKAELIALTKALELSKGKKANIYTDSRYAFATAHTHGSIYERRGWLTSEGKEIKNKAEIIALLKALFLPQEVAIIHCPGHQKGQDPVAVGNRQADRVARQAAMAEVLTLATEPDNTSHITAGKRTADGSEFEKRTADGSEFESPKKKAKVE

SEQ ID NO: 1585 - protein, 2102 aa, synthetic construct
MPAAKRVKLDGGDKKYSIGLDIGTNSVGWAVITDEYKVPSKKFKVLGNTDRHSIKKNLIGALLFDSGETAEATRLKRTARRRYTRRKNRICYLQEIFSNEMAKVDDSFFHRLEESFLVEEDKKHERHPIFGNIVDEVAYHEKYPTIYHLRKKLVDSTDKADLRLIYLALAHMIKFRGHFLIEGDLNPDNSDVDKLFIQLVQTYNQLFEENPINASGVDAKAILSARLSKSRRLENLIAQLPGEKKNGLFGNLIALSLGLTPNFKSNFDLAEDAKLQLSKDTYDDDLDNLLAQIGDQYADLFLAAKNLSDAILLSDILRVNTEITKAPLSASMIKRYDEHHQDLTLLKALVRQQLPEKYKEIFFDQSKNGYAGYIDGGASQEEFYKFIKPILEKMDGTEELLVKLNREDLLRKQRTFDNGSIPHQIHLGELHAILRRQEDFYPFLKDNREKIEKILTFRIPYYVGPLARGNSRFAWMTRKSEETITPWNFEEVVDKGASAQSFIERMTNFDKNLPNEKVLPKHSLLYEYFTVYNELTKVKYVTEGMRKPAFLSGEQKKAIVDLLFKTNRKVTVKQLKEDYFKKIECFDSVEISGVEDRFNASLGTYHDLLKIIKDKDFLDNEENEDILEDIVLTLTLFEDREMIEERLKTYAHLFDDKVMKQLKRRRYTGWGRLSRKLINGIRDKQSGKTILDFLKSDGFANRNFMQLIHDDSLTFKEDIQKAQVSGQGDSLHEHIANLAGSPAIKKGILQTVKVVDELVKVMGRHKPENIVIEMARENQTTQKGQKNSRERMKRIEEGIKELGSQILKEHPVENTQLQNEKLYLYYLQNGRDMYVDQELDINRLSDYDVDHIVPQSFLKDDSIDNKVLTRSDKARGKSDNVPSEEVVKKMKNYWRQLLNAKLITQRKFDNLTKAERGGLSELDKAGFIKRQLVETRQITKHVAQILDSRMNTKYDENDKLIREVKVITLKSKLVSDFRKDFQFYKVREINNYHHAHDAYLNAVVGTALIKKYPKLESEFVYGDYKVYDVRKMIAKSEQEIGKATAKYFFYSNIMNFFKTEITLANGEIRKRPLIETNGETGEIVWDKGRDFATVRKVLSMPQVNIVKKTEVQTGGFSKESILPKRNSDKLIARKKDWDPKKYGGFDSPTVAYSVLVVAKVEKGKSKKLKSVKELLGITIMERSSFEKNPIDFLEAKGYKEVKKDLIIKLPKYSLFELENGRKRMLASAGELQKGNELALPSKYVNFLYLASHYEKLKGSPEDNEQKQLFVEQHKHYLDEIIEQISEFSKRVILADANLDKVLSAYNKHRDKPIREQAENIIHLFTLTNLGAPAAFKYFDTTIDRKRYTSTKEVLDATLIHQSITGLYETRIDLSQLGGDGGGGGEAAAKGGSGGTVSLQDEHRLFDIPVTTSLPDVWLQDFPQAWAETGGLGRAKCQAPIIIDLKPTAVPVSIKQYPMSLEAHMGIRQHIIKFLELGVLRPCRSPWNTPLLPVKKPGTQDYRPVQDLREINKRTVDIHPTVPNPYNLLSTLKPDYSWYTVLDLKDAFFCLPLAPQSQELFAFEWKDPERGISGQLTWTRLPQGFKNSPTLFNEALHRDLTDFRTQHPEVTLLQYVDDLLLAAPTKKACTQGTRHLLQELGEKGYRASAKKAQICQTKVTYLGYILSEGKRWLTPGRIETVARIPPPRNPREVREFLGTAGFCRLWIPGFAELAAPLYALTKPSTPFTWQTEHQLAFEALKKALLSAPALGLPDTSKPFTLFLDERQGIAKGVLTQKLGPWKRPVAYLSKKLDPVAAGWPPCLRIMAATAMLVKDSAKLTLGQPLTVITPHTLEAIVRQPPDRWITNARLTHYQALLLDTDRVQFGPPVTLNPATLLPVPENQPSPHDCRQVLAETHGTREDLKDQELPDADHTWYTDGSSYLDSGTRRAGAAVVDGHNTIWAQSLPPGTSAQKAELIALTKALELSKGKKANIYTDSRYAFATAHTHGSIYERRGWLTSEGKEIKNKAEIIALLKALFLPQEVAIIHCPGHQKGQDPVAVGNRQADRVARQAAMAEVLTLATEPDNTSHITAGKRTADGSEFEKRTADGSEFESPKKKAKVE

SEQ ID NO: 1586 - protein, 2100 aa, synthetic construct
MPAAKRVKLDGGDKKYSIGLDIGTNSVGWAVITDEYKVPSKKFKVLGNTDRHSIKKNLIGALLFDSGETAEATRLKRTARRRYTRRKNRICYLQEIFSNEMAKVDDSFFHRLEESFLVEEDKKHERHPIFGNIVDEVAYHEKYPTIYHLRKKLVDSTDKADLRLIYLALAHMIKFRGHFLIEGDLNPDNSDVDKLFIQLVQTYNQLFEENPINASGVDAKAILSARLSKSRRLENLIAQLPGEKKNGLFGNLIALSLGLTPNFKSNFDLAEDAKLQLSKDTYDDDLDNLLAQIGDQYADLFLAAKNLSDAILLSDILRVNTEITKAPLSASMIKRYDEHHQDLTLLKALVRQQLPEKYKEIFFDQSKNGYAGYIDGGASQEEFYKFIKPILEKMDGTEELLVKLNREDLLRKQRTFDNGSIPHQIHLGELHAILRRQEDFYPFLKDNREKIEKILTFRIPYYVGPLARGNSRFAWMTRKSEETITPWNFEEVVDKGASAQSFIERMTNFDKNLPNEKVLPKHSLLYEYFTVYNELTKVKYVTEGMRKPAFLSGEQKKAIVDLLFKTNRKVTVKQLKEDYFKKIECFDSVEISGVEDRFNASLGTYHDLLKIIKDKDFLDNEENEDILEDIVLTLTLFEDREMIEERLKTYAHLFDDKVMKQLKRRRYTGWGRLSRKLINGIRDKQSGKTILDFLKSDGFANRNFMQLIHDDSLTFKEDIQKAQVSGQGDSLHEHIANLAGSPAIKKGILQTVKVVDELVKVMGRHKPENIVIEMARENQTTQKGQKNSRERMKRIEEGIKELGSQILKEHPVENTQLQNEKLYLYYLQNGRDMYVDQELDINRLSDYDVDHIVPQSFLKDDSIDNKVLTRSDKARGKSDNVPSEEVVKKMKNYWRQLLNAKLITQRKFDNLTKAERGGLSELDKAGFIKRQLVETRQITKHVAQILDSRMNTKYDENDKLIREVKVITLKSKLVSDFRKDFQFYKVREINNYHHAHDAYLNAVVGTALIKKYPKLESEFVYGDYKVYDVRKMIAKSEQEIGKATAKYFFYSNIMNFFKTEITLANGEIRKRPLIETNGETGEIVWDKGRDFATVRKVLSMPQVNIVKKTEVQTGGFSKESILPKRNSDKLIARKKDWDPKKYGGFDSPTVAYSVLVVAKVEKGKSKKLKSVKELLGITIMERSSFEKNPIDFLEAKGYKEVKKDLIIKLPKYSLFELENGRKRMLASAGELQKGNELALPSKYVNFLYLASHYEKLKGSPEDNEQKQLFVEQHKHYLDEIIEQISEFSKRVILADANLDKVLSAYNKHRDKPIREQAENIIHLFTLTNLGAPAAFKYFDTTIDRKRYTSTKEVLDATLIHQSITGLYETRIDLSQLGGDGGPAPGSSGGSGGTVSLQDEHRLFDIPVTTSLPDVWLQDFPQAWAETGGLGRAKCQAPIIIDLKPTAVPVSIKQYPMSLEAHMGIRQHIIKFLELGVLRPCRSPWNTPLLPVKKPGTQDYRPVQDLREINKRTVDIHPTVPNPYNLLSTLKPDYSWYTVLDLKDAFFCLPLAPQSQELFAFEWKDPERGISGQLTWTRLPQGFKNSPTLFNEALHRDLTDFRTQHPEVTLLQYVDDLLLAAPTKKACTQGTRHLLQELGEKGYRASAKKAQICQTKVTYLGYILSEGKRWLTPGRIETVARIPPPRNPREVREFLGTAGFCRLWIPGFAELAAPLYALTKPSTPFTWQTEHQLAFEALKKALLSAPALGLPDTSKPFTLFLDERQGIAKGVLTQKLGPWKRPVAYLSKKLDPVAAGWPPCLRIMAATAMLVKDSAKLTLGQPLTVITPHTLEAIVRQPPDRWITNARLTHYQALLLDTDRVQFGPPVTLNPATLLPVPENQPSPHDCRQVLAETHGTREDLKDQELPDADHTWYTDGSSYLDSGTRRAGAAVVDGHNTIWAQSLPPGTSAQKAELIALTKALELSKGKKANIYTDSRYAFATAHTHGSIYERRGWLTSEGKEIKNKAEIIALLKALFLPQEVAIIHCPGHQKGQDPVAVGNRQADRVARQAAMAEVLTLATEPDNTSHITAGKRTADGSEFEKRTADGSEFESPKKKAKVE

SEQ ID NO: 1587 - protein, 2101 aa, synthetic construct
MPAAKRVKLDGGDKKYSIGLDIGTNSVGWAVITDEYKVPSKKFKVLGNTDRHSIKKNLIGALLFDSGETAEATRLKRTARRRYTRRKNRICYLQEIFSNEMAKVDDSFFHRLEESFLVEEDKKHERHPIFGNIVDEVAYHEKYPTIYHLRKKLVDSTDKADLRLIYLALAHMIKFRGHFLIEGDLNPDNSDVDKLFIQLVQTYNQLFEENPINASGVDAKAILSARLSKSRRLENLIAQLPGEKKNGLFGNLIALSLGLTPNFKSNFDLAEDAKLQLSKDTYDDDLDNLLAQIGDQYADLFLAAKNLSDAILLSDILRVNTEITKAPLSASMIKRYDEHHQDLTLLKALVRQQLPEKYKEIFFDQSKNGYAGYIDGGASQEEFYKFIKPILEKMDGTEELLVKLNREDLLRKQRTFDNGSIPHQIHLGELHAILRRQEDFYPFLKDNREKIEKILTFRIPYYVGPLARGNSRFAWMTRKSEETITPWNFEEVVDKGASAQSFIERMTNFDKNLPNEKVLPKHSLLYEYFTVYNELTKVKYVTEGMRKPAFLSGEQKKAIVDLLFKTNRKVTVKQLKEDYFKKIECFDSVEISGVEDRFNASLGTYHDLLKIIKDKDFLDNEENEDILEDIVLTLTLFEDREMIEERLKTYAHLFDDKVMKQLKRRRYTGWGRLSRKLINGIRDKQSGKTILDFLKSDGFANRNFMQLIHDDSLTFKEDIQKAQVSGQGDSLHEHIANLAGSPAIKKGILQTVKVVDELVKVMGRHKPENIVIEMARENQTTQKGQKNSRERMKRIEEGIKELGSQILKEHPVENTQLQNEKLYLYYLQNGRDMYVDQELDINRLSDYDVDHIVPQSFLKDDSIDNKVLTRSDKARGKSDNVPSEEVVKKMKNYWRQLLNAKLITQRKFDNLTKAERGGLSELDKAGFIKRQLVETRQITKHVAQILDSRMNTKYDENDKLIREVKVITLKSKLVSDFRKDFQFYKVREINNYHHAHDAYLNAVVGTALIKKYPKLESEFVYGDYKVYDVRKMIAKSEQEIGKATAKYFFYSNIMNFFKTEITLANGEIRKRPLIETNGETGEIVWDKGRDFATVRKVLSMPQVNIVKKTEVQTGGFSKESILPKRNSDKLIARKKDWDPKKYGGFDSPTVAYSVLVVAKVEKGKSKKLKSVKELLGITIMERSSFEKNPIDFLEAKGYKEVKKDLIIKLPKYSLFELENGRKRMLASAGELQKGNELALPSKYVNFLYLASHYEKLKGSPEDNEQKQLFVEQHKHYLDEIIEQISEFSKRVILADANLDKVLSAYNKHRDKPIREQAENIIHLFTLTNLGAPAAFKYFDTTIDRKRYTSTKEVLDATLIHQSITGLYETRIDLSQLGGDGGEAAAKEAAAKGGTVSLQDEHRLFDIPVTTSLPDVWLQDFPQAWAETGGLGRAKCQAPIIIDLKPTAVPVSIKQYPMSLEAHMGIRQHIIKFLELGVLRPCRSPWNTPLLPVKKPGTQDYRPVQDLREINKRTVDIHPTVPNPYNLLSTLKPDYSWYTVLDLKDAFFCLPLAPQSQELFAFEWKDPERGISGQLTWTRLPQGFKNSPTLFNEALHRDLTDFRTQHPEVTLLQYVDDLLLAAPTKKACTQGTRHLLQELGEKGYRASAKKAQICQTKVTYLGYILSEGKRWLTPGRIETVARIPPPRNPREVREFLGTAGFCRLWIPGFAELAAPLYALTKPSTPFTWQTEHQLAFEALKKALLSAPALGLPDTSKPFTLFLDERQGIAKGVLTQKLGPWKRPVAYLSKKLDPVAAGWPPCLRIMAATAMLVKDSAKLTLGQPLTVITPHTLEAIVRQPPDRWITNARLTHYQALLLDTDRVQFGPPVTLNPATLLPVPENQPSPHDCRQVLAETHGTREDLKDQELPDADHTWYTDGSSYLDSGTRRAGAAVVDGHNTIWAQSLPPGTSAQKAELIALTKALELSKGKKANIYTDSRYAFATAHTHGSIYERRGWLTSEGKEIKNKAEIIALLKALFLPQEVAIIHCPGHQKGQDPVAVGNRQADRVARQAAMAEVLTLATEPDNTSHITAGKRTADGSEFEKRTADGSEFESPKKKAKVE

SEQ ID NO: 1588 - protein, 2109 aa, synthetic construct
MPAAKRVKLDGGDKKYSIGLDIGTNSVGWAVITDEYKVPSKKFKVLGNTDRHSIKKNLIGALLFDSGETAEATRLKRTARRRYTRRKNRICYLQEIFSNEMAKVDDSFFHRLEESFLVEEDKKHERHPIFGNIVDEVAYHEKYPTIYHLRKKLVDSTDKADLRLIYLALAHMIKFRGHFLIEGDLNPDNSDVDKLFIQLVQTYNQLFEENPINASGVDAKAILSARLSKSRRLENLIAQLPGEKKNGLFGNLIALSLGLTPNFKSNFDLAEDAKLQLSKDTYDDDLDNLLAQIGDQYADLFLAAKNLSDAILLSDILRVNTEITKAPLSASMIKRYDEHHQDLTLLKALVRQQLPEKYKEIFFDQSKNGYAGYIDGGASQEEFYKFIKPILEKMDGTEELLVKLNREDLLRKQRTFDNGSIPHQIHLGELHAILRRQEDFYPFLKDNREKIEKILTFRIPYYVGPLARGNSRFAWMTRKSEETITPWNFEEVVDKGASAQSFIERMTNFDKNLPNEKVLPKHSLLYEYFTVYNELTKVKYVTEGMRKPAFLSGEQKKAIVDLLFKTNRKVTVKQLKEDYFKKIECFDSVEISGVEDRFNASLGTYHDLLKIIKDKDFLDNEENEDILEDIVLTLTLFEDREMIEERLKTYAHLFDDKVMKQLKRRRYTGWGRLSRKLINGIRDKQSGKTILDFLKSDGFANRNFMQLIHDDSLTFKEDIQKAQVSGQGDSLHEHIANLAGSPAIKKGILQTVKVVDELVKVMGRHKPENIVIEMARENQTTQKGQKNSRERMKRIEEGIKELGSQILKEHPVENTQLQNEKLYLYYLQNGRDMYVDQELDINRLSDYDVDHIVPQSFLKDDSIDNKVLTRSDKARGKSDNVPSEEVVKKMKNYWRQLLNAKLITQRKFDNLTKAERGGLSELDKAGFIKRQLVETRQITKHVAQILDSRMNTKYDENDKLIREVKVITLKSKLVSDFRKDFQFYKVREINNYHHAHDAYLNAVVGTALIKKYPKLESEFVYGDYKVYDVRKMIAKSEQEIGKATAKYFFYSNIMNFFKTEITLANGEIRKRPLIETNGETGEIVWDKGRDFATVRKVLSMPQVNIVKKTEVQTGGFSKESILPKRNSDKLIARKKDWDPKKYGGFDSPTVAYSVLVVAKVEKGKSKKLKSVKELLGITIMERSSFEKNPIDFLEAKGYKEVKKDLIIKLPKYSLFELENGRKRMLASAGELQKGNELALPSKYVNFLYLASHYEKLKGSPEDNEQKQLFVEQHKHYLDEIIEQISEFSKRVILADANLDKVLSAYNKHRDKPIREQAENIIHLFTLTNLGAPAAFKYFDTTIDRKRYTSTKEVLDATLIHQSITGLYETRIDLSQLGGDGGGSSGSSGSSGSSGSSGSSGGTVSLQDEHRLFDIPVTTSLPDVWLQDFPQAWAETGGLGRAKCQAPIIIDLKPTAVPVSIKQYPMSLEAHMGIRQHIIKFLELGVLRPCRSPWNTPLLPVKKPGTQDYRPVQDLREINKRTVDIHPTVPNPYNLLSTLKPDYSWYTVLDLKDAFFCLPLAPQSQELFAFEWKDPERGISGQLTWTRLPQGFKNSPTLFNEALHRDLTDFRTQHPEVTLLQYVDDLLLAAPTKKACTQGTRHLLQELGEKGYRASAKKAQICQTKVTYLGYILSEGKRWLTPGRIETVARIPPPRNPREVREFLGTAGFCRLWIPGFAELAAPLYALTKPSTPFTWQTEHQLAFEALKKALLSAPALGLPDTSKPFTLFLDERQGIAKGVLTQKLGPWKRPVAYLSKKLDPVAAGWPPCLRIMAATAMLVKDSAKLTLGQPLTVITPHTLEAIVRQPPDRWITNARLTHYQALLLDTDRVQFGPPVTLNPATLLPVPENQPSPHDCRQVLAETHGTREDLKDQELPDADHTWYTDGSSYLDSGTRRAGAAVVDGHNTIWAQSLPPGTSAQKAELIALTKALELSKGKKANIYTDSRYAFATAHTHGSIYERRGWLTSEGKEIKNKAEIIALLKALFLPQEVAIIHCPGHQKGQDPVAVGNRQADRVARQAAMAEVLTLATEPDNTSHITAGKRTADGSEFEKRTADGSEFESPKKKAKVE

SEQ ID NO: 1589 - protein, 2102 aa, synthetic construct
MPAAKRVKLDGGDKKYSIGLDIGTNSVGWAVITDEYKVPSKKFKVLGNTDRHSIKKNLIGALLFDSGETAEATRLKRTARRRYTRRKNRICYLQEIFSNEMAKVDDSFFHRLEESFLVEEDKKHERHPIFGNIVDEVAYHEKYPTIYHLRKKLVDSTDKADLRLIYLALAHMIKFRGHFLIEGDLNPDNSDVDKLFIQLVQTYNQLFEENPINASGVDAKAILSARLSKSRRLENLIAQLPGEKKNGLFGNLIALSLGLTPNFKSNFDLAEDAKLQLSKDTYDDDLDNLLAQIGDQYADLFLAAKNLSDAILLSDILRVNTEITKAPLSASMIKRYDEHHQDLTLLKALVRQQLPEKYKEIFFDQSKNGYAGYIDGGASQEEFYKFIKPILEKMDGTEELLVKLNREDLLRKQRTFDNGSIPHQIHLGELHAILRRQEDFYPFLKDNREKIEKILTFRIPYYVGPLARGNSRFAWMTRKSEETITPWNFEEVVDKGASAQSFIERMTNFDKNLPNEKVLPKHSLLYEYFTVYNELTKVKYVTEGMRKPAFLSGEQKKAIVDLLFKTNRKVTVKQLKEDYFKKIECFDSVEISGVEDRFNASLGTYHDLLKIIKDKDFLDNEENEDILEDIVLTLTLFEDREMIEERLKTYAHLFDDKVMKQLKRRRYTGWGRLSRKLINGIRDKQSGKTILDFLKSDGFANRNFMQLIHDDSLTFKEDIQKAQVSGQGDSLHEHIANLAGSPAIKKGILQTVKVVDELVKVMGRHKPENIVIEMARENQTTQKGQKNSRERMKRIEEGIKELGSQILKEHPVENTQLQNEKLYLYYLQNGRDMYVDQELDINRLSDYDVDHIVPQSFLKDDSIDNKVLTRSDKARGKSDNVPSEEVVKKMKNYWRQLLNAKLITQRKFDNLTKAERGGLSELDKAGFIKRQLVETRQITKHVAQILDSRMNTKYDENDKLIREVKVITLKSKLVSDFRKDFQFYKVREINNYHHAHDAYLNAVVGTALIKKYPKLESEFVYGDYKVYDVRKMIAKSEQEIGKATAKYFFYSNIMNFFKTEITLANGEIRKRPLIETNGETGEIVWDKGRDFATVRKVLSMPQVNIVKKTEVQTGGFSKESILPKRNSDKLIARKKDWDPKKYGGFDSPTVAYSVLVVAKVEKGKSKKLKSVKELLGITIMERSSFEKNPIDFLEAKGYKEVKKDLIIKLPKYSLFELENGRKRMLASAGELQKGNELALPSKYVNFLYLASHYEKLKGSPEDNEQKQLFVEQHKHYLDEIIEQISEFSKRVILADANLDKVLSAYNKHRDKPIREQAENIIHLFTLTNLGAPAAFKYFDTTIDRKRYTSTKEVLDATLIHQSITGLYETRIDLSQLGGDGGGGGEAAAKPAPGGTVSLQDEHRLFDIPVTTSLPDVWLQDFPQAWAETGGLGRAKCQAPIIIDLKPTAVPVSIKQYPMSLEAHMGIRQHIIKFLELGVLRPCRSPWNTPLLPVKKPGTQDYRPVQDLREINKRTVDIHPTVPNPYNLLSTLKPDYSWYTVLDLKDAFFCLPLAPQSQELFAFEWKDPERGISGQLTWTRLPQGFKNSPTLFNEALHRDLTDFRTQHPEVTLLQYVDDLLLAAPTKKACTQGTRHLLQELGEKGYRASAKKAQICQTKVTYLGYILSEGKRWLTPGRIETVARIPPPRNPREVREFLGTAGFCRLWIPGFAELAAPLYALTKPSTPFTWQTEHQLAFEALKKALLSAPALGLPDTSKPFTLFLDERQGIAKGVLTQKLGPWKRPVAYLSKKLDPVAAGWPPCLRIMAATAMLVKDSAKLTLGQPLTVITPHTLEAIVRQPPDRWITNARLTHYQALLLDTDRVQFGPPVTLNPATLLPVPENQPSPHDCRQVLAETHGTREDLKDQELPDADHTWYTDGSSYLDSGTRRAGAAVVDGHNTIWAQSLPPGTSAQKAELIALTKALELSKGKKANIYTDSRYAFATAHTHGSIYERRGWLTSEGKEIKNKAEIIALLKALFLPQEVAIIHCPGHQKGQDPVAVGNRQADRVARQAAMAEVLTLATEPDNTSHITAGKRTADGSEFEKRTADGSEFESPKKKAKVE

SEQ ID NO: 1590 - protein, 2097 aa, synthetic construct
MPAAKRVKLDGGDKKYSIGLDIGTNSVGWAVITDEYKVPSKKFKVLGNTDRHSIKKNLIGALLFDSGETAEATRLKRTARRRYTRRKNRICYLQEIFSNEMAKVDDSFFHRLEESFLVEEDKKHERHPIFGNIVDEVAYHEKYPTIYHLRKKLVDSTDKADLRLIYLALAHMIKFRGHFLIEGDLNPDNSDVDKLFIQLVQTYNQLFEENPINASGVDAKAILSARLSKSRRLENLIAQLPGEKKNGLFGNLIALSLGLTPNFKSNFDLAEDAKLQLSKDTYDDDLDNLLAQIGDQYADLFLAAKNLSDAILLSDILRVNTEITKAPLSASMIKRYDEHHQDLTLLKALVRQQLPEKYKEIFFDQSKNGYAGYIDGGASQEEFYKFIKPILEKMDGTEELLVKLNREDLLRKQRTFDNGSIPHQIHLGELHAILRRQEDFYPFLKDNREKIEKILTFRIPYYVGPLARGNSRFAWMTRKSEETITPWNFEEVVDKGASAQSFIERMTNFDKNLPNEKVLPKHSLLYEYFTVYNELTKVKYVTEGMRKPAFLSGEQKKAIVDLLFKTNRKVTVKQLKEDYFKKIECFDSVEISGVEDRFNASLGTYHDLLKIIKDKDFLDNEENEDILEDIVLTLTLFEDREMIEERLKTYAHLFDDKVMKQLKRRRYTGWGRLSRKLINGIRDKQSGKTILDFLKSDGFANRNFMQLIHDDSLTFKEDIQKAQVSGQGDSLHEHIANLAGSPAIKKGILQTVKVVDELVKVMGRHKPENIVIEMARENQTTQKGQKNSRERMKRIEEGIKELGSQILKEHPVENTQLQNEKLYLYYLQNGRDMYVDQELDINRLSDYDVDHIVPQSFLKDDSIDNKVLTRSDKARGKSDNVPSEEVVKKMKNYWRQLLNAKLITQRKFDNLTKAERGGLSELDKAGFIKRQLVETRQITKHVAQILDSRMNTKYDENDKLIREVKVITLKSKLVSDFRKDFQFYKVREINNYHHAHDAYLNAVVGTALIKKYPKLESEFVYGDYKVYDVRKMIAKSEQEIGKATAKYFFYSNIMNFFKTEITLANGEIRKRPLIETNGETGEIVWDKGRDFATVRKVLSMPQVNIVKKTEVQTGGFSKESILPKRNSDKLIARKKDWDPKKYGGFDSPTVAYSVLVVAKVEKGKSKKLKSVKELLGITIMERSSFEKNPIDFLEAKGYKEVKKDLIIKLPKYSLFELENGRKRMLASAGELQKGNELALPSKYVNFLYLASHYEKLKGSPEDNEQKQLFVEQHKHYLDEIIEQISEFSKRVILADANLDKVLSAYNKHRDKPIREQAENIIHLFTLTNLGAPAAFKYFDTTIDRKRYTSTKEVLDATLIHQSITGLYETRIDLSQLGGDGGPAPGGGGGTVSLQDEHRLFDIPVTTSLPDVWLQDFPQAWAETGGLGRAKCQAPIIIDLKPTAVPVSIKQYPMSLEAHMGIRQHIIKFLELGVLRPCRSPWNTPLLPVKKPGTQDYRPVQDLREINKRTVDIHPTVPNPYNLLSTLKPDYSWYTVLDLKDAFFCLPLAPQSQELFAFEWKDPERGISGQLTWTRLPQGFKNSPTLFNEALHRDLTDFRTQHPEVTLLQYVDDLLLAAPTKKACTQGTRHLLQELGEKGYRASAKKAQICQTKVTYLGYILSEGKRWLTPGRIETVARIPPPRNPREVREFLGTAGFCRLWIPGFAELAAPLYALTKPSTPFTWQTEHQLAFEALKKALLSAPALGLPDTSKPFTLFLDERQGIAKGVLTQKLGPWKRPVAYLSKKLDPVAAGWPPCLRIMAATAMLVKDSAKLTLGQPLTVITPHTLEAIVRQPPDRWITNARLTHYQALLLDTDRVQFGPPVTLNPATLLPVPENQPSPHDCRQVLAETHGTREDLKDQELPDADHTWYTDGSSYLDSGTRRAGAAVVDGHNTIWAQSLPPGTSAQKAELIALTKALELSKGKKANIYTDSRYAFATAHTHGSIYERRGWLTSEGKEIKNKAEIIALLKALFLPQEVAIIHCPGHQKGQDPVAVGNRQADRVARQAAMAEVLTLATEPDNTSHITAGKRTADGSEFEKRTADGSEFESPKKKAKVE

SEQ ID NO: 1591 - protein, 2100 aa, synthetic construct
MPAAKRVKLDGGDKKYSIGLDIGTNSVGWAVITDEYKVPSKKFKVLGNTDRHSIKKNLIGALLFDSGETAEATRLKRTARRRYTRRKNRICYLQEIFSNEMAKVDDSFFHRLEESFLVEEDKKHERHPIFGNIVDEVAYHEKYPTIYHLRKKLVDSTDKADLRLIYLALAHMIKFRGHFLIEGDLNPDNSDVDKLFIQLVQTYNQLFEENPINASGVDAKAILSARLSKSRRLENLIAQLPGEKKNGLFGNLIALSLGLTPNFKSNFDLAEDAKLQLSKDTYDDDLDNLLAQIGDQYADLFLAAKNLSDAILLSDILRVNTEITKAPLSASMIKRYDEHHQDLTLLKALVRQQLPEKYKEIFFDQSKNGYAGYIDGGASQEEFYKFIKPILEKMDGTEELLVKLNREDLLRKQRTFDNGSIPHQIHLGELHAILRRQEDFYPFLKDNREKIEKILTFRIPYYVGPLARGNSRFAWMTRKSEETITPWNFEEVVDKGASAQSFIERMTNFDKNLPNEKVLPKHSLLYEYFTVYNELTKVKYVTEGMRKPAFLSGEQKKAIVDLLFKTNRKVTVKQLKEDYFKKIECFDSVEISGVEDRFNASLGTYHDLLKIIKDKDFLDNEENEDILEDIVLTLTLFEDREMIEERLKTYAHLFDDKVMKQLKRRRYTGWGRLSRKLINGIRDKQSGKTILDFLKSDGFANRNFMQLIHDDSLTFKEDIQKAQVSGQGDSLHEHIANLAGSPAIKKGILQTVKVVDELVKVMGRHKPENIVIEMARENQTTQKGQKNSRERMKRIEEGIKELGSQILKEHPVENTQLQNEKLYLYYLQNGRDMYVDQELDINRLSDYDVDHIVPQSFLKDDSIDNKVLTRSDKARGKSDNVPSEEVVKKMKNYWRQLLNAKLITQRKFDNLTKAERGGLSELDKAGFIKRQLVETRQITKHVAQILDSRMNTKYDENDKLIREVKVITLKSKLVSDFRKDFQFYKVREINNYHHAHDAYLNAVVGTALIKKYPKLESEFVYGDYKVYDVRKMIAKSEQEIGKATAKYFFYSNIMNFFKTEITLANGEIRKRPLIETNGETGEIVWDKGRDFATVRKVLSMPQVNIVKKTEVQTGGFSKESILPKRNSDKLIARKKDWDPKKYGGFDSPTVAYSVLVVAKVEKGKSKKLKSVKELLGITIMERSSFEKNPIDFLEAKGYKEVKKDLIIKLPKYSLFELENGRKRMLASAGELQKGNELALPSKYVNFLYLASHYEKLKGSPEDNEQKQLFVEQHKHYLDEIIEQISEFSKRVILADANLDKVLSAYNKHRDKPIREQAENIIHLFTLTNLGAPAAFKYFDTTIDRKRYTSTKEVLDATLIHQSITGLYETRIDLSQLGGDGGGGSPAPGSSGGTVSLQDEHRLFDIPVTTSLPDVWLQDFPQAWAETGGLGRAKCQAPIIIDLKPTAVPVSIKQYPMSLEAHMGIRQHIIKFLELGVLRPCRSPWNTPLLPVKKPGTQDYRPVQDLREINKRTVDIHPTVPNPYNLLSTLKPDYSWYTVLDLKDAFFCLPLAPQSQELFAFEWKDPERGISGQLTWTRLPQGFKNSPTLFNEALHRDLTDFRTQHPEVTLLQYVDDLLLAAPTKKACTQGTRHLLQELGEKGYRASAKKAQICQTKVTYLGYILSEGKRWLTPGRIETVARIPPPRNPREVREFLGTAGFCRLWIPGFAELAAPLYALTKPSTPFTWQTEHQLAFEALKKALLSAPALGLPDTSKPFTLFLDERQGIAKGVLTQKLGPWKRPVAYLSKKLDPVAAGWPPCLRIMAATAMLVKDSAKLTLGQPLTVITPHTLEAIVRQPPDRWITNARLTHYQALLLDTDRVQFGPPVTLNPATLLPVPENQPSPHDCRQVLAETHGTREDLKDQELPDADHTWYTDGSSYLDSGTRRAGAAVVDGHNTIWAQSLPPGTSAQKAELIALTKALELSKGKKANIYTDSRYAFATAHTHGSIYERRGWLTSEGKEIKNKAEIIALLKALFLPQEVAIIHCPGHQKGQDPVAVGNRQADRVARQAAMAEVLTLATEPDNTSHITAGKRTADGSEFEKRTADGSEFESPKKKAKVE

SEQ ID NO: 1592 - protein, 2097 aa, synthetic construct
MPAAKRVKLDGGDKKYSIGLDIGTNSVGWAVITDEYKVPSKKFKVLGNTDRHSIKKNLIGALLFDSGETAEATRLKRTARRRYTRRKNRICYLQEIFSNEMAKVDDSFFHRLEESFLVEEDKKHERHPIFGNIVDEVAYHEKYPTIYHLRKKLVDSTDKADLRLIYLALAHMIKFRGHFLIEGDLNPDNSDVDKLFIQLVQTYNQLFEENPINASGVDAKAILSARLSKSRRLENLIAQLPGEKKNGLFGNLIALSLGLTPNFKSNFDLAEDAKLQLSKDTYDDDLDNLLAQIGDQYADLFLAAKNLSDAILLSDILRVNTEITKAPLSASMIKRYDEHHQDLTLLKALVRQQLPEKYKEIFFDQSKNGYAGYIDGGASQEEFYKFIKPILEKMDGTEELLVKLNREDLLRKQRTFDNGSIPHQIHLGELHAILRRQEDFYPFLKDNREKIEKILTFRIPYYVGPLARGNSRFAWMTRKSEETITPWNFEEVVDKGASAQSFIERMTNFDKNLPNEKVLPKHSLLYEYFTVYNELTKVKYVTEGMRKPAFLSGEQKKAIVDLLFKTNRKVTVKQLKEDYFKKIECFDSVEISGVEDRFNASLGTYHDLLKIIKDKDFLDNEENEDILEDIVLTLTLFEDREMIEERLKTYAHLFDDKVMKQLKRRRYTGWGRLSRKLINGIRDKQSGKTILDFLKSDGFANRNFMQLIHDDSLTFKEDIQKAQVSGQGDSLHEHIANLAGSPAIKKGILQTVKVVDELVKVMGRHKPENIVIEMARENQTTQKGQKNSRERMKRIEEGIKELGSQILKEHPVENTQLQNEKLYLYYLQNGRDMYVDQELDINRLSDYDVDHIVPQSFLKDDSIDNKVLTRSDKARGKSDNVPSEEVVKKMKNYWRQLLNAKLITQRKFDNLTKAERGGLSELDKAGFIKRQLVETRQITKHVAQILDSRMNTKYDENDKLIREVKVITLKSKLVSDFRKDFQFYKVREINNYHHAHDAYLNAVVGTALIKKYPKLESEFVYGDYKVYDVRKMIAKSEQEIGKATAKYFFYSNIMNFFKTEITLANGEIRKRPLIETNGETGEIVWDKGRDFATVRKVLSMPQVNIVKKTEVQTGGFSKESILPKRNSDKLIARKKDWDPKKYGGFDSPTVAYSVLVVAKVEKGKSKKLKSVKELLGITIMERSSFEKNPIDFLEAKGYKEVKKDLIIKLPKYSLFELENGRKRMLASAGELQKGNELALPSKYVNFLYLASHYEKLKGSPEDNEQKQLFVEQHKHYLDEIIEQISEFSKRVILADANLDKVLSAYNKHRDKPIREQAENIIHLFTLTNLGAPAAFKYFDTTIDRKRYTSTKEVLDATLIHQSITGLYETRIDLSQLGGDGGGSSPAPGGTVSLQDEHRLFDIPVTTSLPDVWLQDFPQAWAETGGLGRAKCQAPIIIDLKPTAVPVSIKQYPMSLEAHMGIRQHIIKFLELGVLRPCRSPWNTPLLPVKKPGTQDYRPVQDLREINKRTVDIHPTVPNPYNLLSTLKPDYSWYTVLDLKDAFFCLPLAPQSQELFAFEWKDPERGISGQLTWTRLPQGFKNSPTLFNEALHRDLTDFRTQHPEVTLLQYVDDLLLAAPTKKACTQGTRHLLQELGEKGYRASAKKAQICQTKVTYLGYILSEGKRWLTPGRIETVARIPPPRNPREVREFLGTAGFCRLWIPGFAELAAPLYALTKPSTPFTWQTEHQLAFEALKKALLSAPALGLPDTSKPFTLFLDERQGIAKGVLTQKLGPWKRPVAYLSKKLDPVAAGWPPCLRIMAATAMLVKDSAKLTLGQPLTVITPHTLEAIVRQPPDRWITNARLTHYQALLLDTDRVQFGPPVTLNPATLLPVPENQPSPHDCRQVLAETHGTREDLKDQELPDADHTWYTDGSSYLDSGTRRAGAAVVDGHNTIWAQSLPPGTSAQKAELIALTKALELSKGKKANIYTDSRYAFATAHTHGSIYERRGWLTSEGKEIKNKAEIIALLKALFLPQEVAIIHCPGHQKGQDPVAVGNRQADRVARQAAMAEVLTLATEPDNTSHITAGKRTADGSEFEKRTADGSEFESPKKKAKVE

SEQ ID NO: 1593 - protein, 2102 aa, synthetic construct
MPAAKRVKLDGGDKKYSIGLDIGTNSVGWAVITDEYKVPSKKFKVLGNTDRHSIKKNLIGALLFDSGETAEATRLKRTARRRYTRRKNRICYLQEIFSNEMAKVDDSFFHRLEESFLVEEDKKHERHPIFGNIVDEVAYHEKYPTIYHLRKKLVDSTDKADLRLIYLALAHMIKFRGHFLIEGDLNPDNSDVDKLFIQLVQTYNQLFEENPINASGVDAKAILSARLSKSRRLENLIAQLPGEKKNGLFGNLIALSLGLTPNFKSNFDLAEDAKLQLSKDTYDDDLDNLLAQIGDQYADLFLAAKNLSDAILLSDILRVNTEITKAPLSASMIKRYDEHHQDLTLLKALVRQQLPEKYKEIFFDQSKNGYAGYIDGGASQEEFYKFIKPILEKMDGTEELLVKLNREDLLRKQRTFDNGSIPHQIHLGELHAILRRQEDFYPFLKDNREKIEKILTFRIPYYVGPLARGNSRFAWMTRKSEETITPWNFEEVVDKGASAQSFIERMTNFDKNLPNEKVLPKHSLLYEYFTVYNELTKVKYVTEGMRKPAFLSGEQKKAIVDLLFKTNRKVTVKQLKEDYFKKIECFDSVEISGVEDRFNASLGTYHDLLKIIKDKDFLDNEENEDILEDIVLTLTLFEDREMIEERLKTYAHLFDDKVMKQLKRRRYTGWGRLSRKLINGIRDKQSGKTILDFLKSDGFANRNFMQLIHDDSLTFKEDIQKAQVSGQGDSLHEHIANLAGSPAIKKGILQTVKVVDELVKVMGRHKPENIVIEMARENQTTQKGQKNSRERMKRIEEGIKELGSQILKEHPVENTQLQNEKLYLYYLQNGRDMYVDQELDINRLSDYDVDHIVPQSFLKDDSIDNKVLTRSDKARGKSDNVPSEEVVKKMKNYWRQLLNAKLITQRKFDNLTKAERGGLSELDKAGFIKRQLVETRQITKHVAQILDSRMNTKYDENDKLIREVKVITLKSKLVSDFRKDFQFYKVREINNYHHAHDAYLNAVVGTALIKKYPKLESEFVYGDYKVYDVRKMIAKSEQEIGKATAKYFFYSNIMNFFKTEITLANGEIRKRPLIETNGETGEIVWDKGRDFATVRKVLSMPQVNIVKKTEVQTGGFSKESILPKRNSDKLIARKKDWDPKKYGGFDSPTVAYSVLVVAKVEKGKSKKLKSVKELLGITIMERSSFEKNPIDFLEAKGYKEVKKDLIIKLPKYSLFELENGRKRMLASAGELQKGNELALPSKYVNFLYLASHYEKLKGSPEDNEQKQLFVEQHKHYLDEIIEQISEFSKRVILADANLDKVLSAYNKHRDKPIREQAENIIHLFTLTNLGAPAAFKYFDTTIDRKRYTSTKEVLDATLIHQSITGLYETRIDLSQLGGDGGEAAAKGGGGSSGGTVSLQDEHRLFDIPVTTSLPDVWLQDFPQAWAETGGLGRAKCQAPIIIDLKPTAVPVSIKQYPMSLEAHMGIRQHIIKFLELGVLRPCRSPWNTPLLPVKKPGTQDYRPVQDLREINKRTVDIHPTVPNPYNLLSTLKPDYSWYTVLDLKDAFFCLPLAPQSQELFAFEWKDPERGISGQLTWTRLPQGFKNSPTLFNEALHRDLTDFRTQHPEVTLLQYVDDLLLAAPTKKACTQGTRHLLQELGEKGYRASAKKAQICQTKVTYLGYILSEGKRWLTPGRIETVARIPPPRNPREVREFLGTAGFCRLWIPGFAELAAPLYALTKPSTPFTWQTEHQLAFEALKKALLSAPALGLPDTSKPFTLFLDERQGIAKGVLTQKLGPWKRPVAYLSKKLDPVAAGWPPCLRIMAATAMLVKDSAKLTLGQPLTVITPHTLEAIVRQPPDRWITNARLTHYQALLLDTDRVQFGPPVTLNPATLLPVPENQPSPHDCRQVLAETHGTREDLKDQELPDADHTWYTDGSSYLDSGTRRAGAAVVDGHNTIWAQSLPPGTSAQKAELIALTKALELSKGKKANIYTDSRYAFATAHTHGSIYERRGWLTSEGKEIKNKAEIIALLKALFLPQEVAIIHCPGHQKGQDPVAVGNRQADRVARQAAMAEVLTLATEPDNTSHITAGKRTADGSEFEKRTADGSEFESPKKKAKVE

SEQ ID NO: 1594 - protein, 2103 aa, synthetic construct
MPAAKRVKLDGGDKKYSIGLDIGTNSVGWAVITDEYKVPSKKFKVLGNTDRHSIKKNLIGALLFDSGETAEATRLKRTARRRYTRRKNRICYLQEIFSNEMAKVDDSFFHRLEESFLVEEDKKHERHPIFGNIVDEVAYHEKYPTIYHLRKKLVDSTDKADLRLIYLALAHMIKFRGHFLIEGDLNPDNSDVDKLFIQLVQTYNQLFEENPINASGVDAKAILSARLSKSRRLENLIAQLPGEKKNGLFGNLIALSLGLTPNFKSNFDLAEDAKLQLSKDTYDDDLDNLLAQIGDQYADLFLAAKNLSDAILLSDILRVNTEITKAPLSASMIKRYDEHHQDLTLLKALVRQQLPEKYKEIFFDQSKNGYAGYIDGGASQEEFYKFIKPILEKMDGTEELLVKLNREDLLRKQRTFDNGSIPHQIHLGELHAILRRQEDFYPFLKDNREKIEKILTFRIPYYVGPLARGNSRFAWMTRKSEETITPWNFEEVVDKGASAQSFIERMTNFDKNLPNEKVLPKHSLLYEYFTVYNELTKVKYVTEGMRKPAFLSGEQKKAIVDLLFKTNRKVTVKQLKEDYFKKIECFDSVEISGVEDRFNASLGTYHDLLKIIKDKDFLDNEENEDILEDIVLTLTLFEDREMIEERLKTYAHLFDDKVMKQLKRRRYTGWGRLSRKLINGIRDKQSGKTILDFLKSDGFANRNFMQLIHDDSLTFKEDIQKAQVSGQGDSLHEHIANLAGSPAIKKGILQTVKVVDELVKVMGRHKPENIVIEMARENQTTQKGQKNSRERMKRIEEGIKELGSQILKEHPVENTQLQNEKLYLYYLQNGRDMYVDQELDINRLSDYDVDHIVPQSFLKDDSIDNKVLTRSDKARGKSDNVPSEEVVKKMKNYWRQLLNAKLITQRKFDNLTKAERGGLSELDKAGFIKRQLVETRQITKHVAQILDSRMNTKYDENDKLIREVKVITLKSKLVSDFRKDFQFYKVREINNYHHAHDAYLNAVVGTALIKKYPKLESEFVYGDYKVYDVRKMIAKSEQEIGKATAKYFFYSNIMNFFKTEITLANGEIRKRPLIETNGETGEIVWDKGRDFATVRKVLSMPQVNIVKKTEVQTGGFSKESILPKRNSDKLIARKKDWDPKKYGGFDSPTVAYSVLVVAKVEKGKSKKLKSVKELLGITIMERSSFEKNPIDFLEAKGYKEVKKDLIIKLPKYSLFELENGRKRMLASAGELQKGNELALPSKYVNFLYLASHYEKLKGSPEDNEQKQLFVEQHKHYLDEIIEQISEFSKRVILADANLDKVLSAYNKHRDKPIREQAENIIHLFTLTNLGAPAAFKYFDTTIDRKRYTSTKEVLDATLIHQSITGLYETRIDLSQLGGDGGGSAGSAAGSGEFGGTVSLQDEHRLFDIPVTTSLPDVWLQDFPQAWAETGGLGRAKCQAPIIIDLKPTAVPVSIKQYPMSLEAHMGIRQHIIKFLELGVLRPCRSPWNTPLLPVKKPGTQDYRPVQDLREINKRTVDIHPTVPNPYNLLSTLKPDYSWYTVLDLKDAFFCLPLAPQSQELFAFEWKDPERGISGQLTWTRLPQGFKNSPTLFNEALHRDLTDFRTQHPEVTLLQYVDDLLLAAPTKKACTQGTRHLLQELGEKGYRASAKKAQICQTKVTYLGYILSEGKRWLTPGRIETVARIPPPRNPREVREFLGTAGFCRLWIPGFAELAAPLYALTKPSTPFTWQTEHQLAFEALKKALLSAPALGLPDTSKPFTLFLDERQGIAKGVLTQKLGPWKRPVAYLSKKLDPVAAGWPPCLRIMAATAMLVKDSAKLTLGQPLTVITPHTLEAIVRQPPDRWITNARLTHYQALLLDTDRVQFGPPVTLNPATLLPVPENQPSPHDCRQVLAETHGTREDLKDQELPDADHTWYTDGSSYLDSGTRRAGAAVVDGHNTIWAQSLPPGTSAQKAELIALTKALELSKGKKANIYTDSRYAFATAHTHGSIYERRGWLTSEGKEIKNKAEIIALLKALFLPQEVAIIHCPGHQKGQDPVAVGNRQADRVARQAAMAEVLTLATEPDNTSHITAGKRTADGSEFEKRTADGSEFESPKKKAKVE

SEQ ID NO: 1595 - protein, 2100 aa, synthetic construct
MPAAKRVKLDGGDKKYSIGLDIGTNSVGWAVITDEYKVPSKKFKVLGNTDRHSIKKNLIGALLFDSGETAEATRLKRTARRRYTRRKNRICYLQEIFSNEMAKVDDSFFHRLEESFLVEEDKKHERHPIFGNIVDEVAYHEKYPTIYHLRKKLVDSTDKADLRLIYLALAHMIKFRGHFLIEGDLNPDNSDVDKLFIQLVQTYNQLFEENPINASGVDAKAILSARLSKSRRLENLIAQLPGEKKNGLFGNLIALSLGLTPNFKSNFDLAEDAKLQLSKDTYDDDLDNLLAQIGDQYADLFLAAKNLSDAILLSDILRVNTEITKAPLSASMIKRYDEHHQDLTLLKALVRQQLPEKYKEIFFDQSKNGYAGYIDGGASQEEFYKFIKPILEKMDGTEELLVKLNREDLLRKQRTFDNGSIPHQIHLGELHAILRRQEDFYPFLKDNREKIEKILTFRIPYYVGPLARGNSRFAWMTRKSEETITPWNFEEVVDKGASAQSFIERMTNFDKNLPNEKVLPKHSLLYEYFTVYNELTKVKYVTEGMRKPAFLSGEQKKAIVDLLFKTNRKVTVKQLKEDYFKKIECFDSVEISGVEDRFNASLGTYHDLLKIIKDKDFLDNEENEDILEDIVLTLTLFEDREMIEERLKTYAHLFDDKVMKQLKRRRYTGWGRLSRKLINGIRDKQSGKTILDFLKSDGFANRNFMQLIHDDSLTFKEDIQKAQVSGQGDSLHEHIANLAGSPAIKKGILQTVKVVDELVKVMGRHKPENIVIEMARENQTTQKGQKNSRERMKRIEEGIKELGSQILKEHPVENTQLQNEKLYLYYLQNGRDMYVDQELDINRLSDYDVDHIVPQSFLKDDSIDNKVLTRSDKARGKSDNVPSEEVVKKMKNYWRQLLNAKLITQRKFDNLTKAERGGLSELDKAGFIKRQLVETRQITKHVAQILDSRMNTKYDENDKLIREVKVITLKSKLVSDFRKDFQFYKVREINNYHHAHDAYLNAVVGTALIKKYPKLESEFVYGDYKVYDVRKMIAKSEQEIGKATAKYFFYSNIMNFFKTEITLANGEIRKRPLIETNGETGEIVWDKGRDFATVRKVLSMPQVNIVKKTEVQTGGFSKESILPKRNSDKLIARKKDWDPKKYGGFDSPTVAYSVLVVAKVEKGKSKKLKSVKELLGITIMERSSFEKNPIDFLEAKGYKEVKKDLIIKLPKYSLFELENGRKRMLASAGELQKGNELALPSKYVNFLYLASHYEKLKGSPEDNEQKQLFVEQHKHYLDEIIEQISEFSKRVILADANLDKVLSAYNKHRDKPIREQAENIIHLFTLTNLGAPAAFKYFDTTIDRKRYTSTKEVLDATLIHQSITGLYETRIDLSQLGGDGGGGGPAPGGSGGTVSLQDEHRLFDIPVTTSLPDVWLQDFPQAWAETGGLGRAKCQAPIIIDLKPTAVPVSIKQYPMSLEAHMGIRQHIIKFLELGVLRPCRSPWNTPLLPVKKPGTQDYRPVQDLREINKRTVDIHPTVPNPYNLLSTLKPDYSWYTVLDLKDAFFCLPLAPQSQELFAFEWKDPERGISGQLTWTRLPQGFKNSPTLFNEALHRDLTDFRTQHPEVTLLQYVDDLLLAAPTKKACTQGTRHLLQELGEKGYRASAKKAQICQTKVTYLGYILSEGKRWLTPGRIETVARIPPPRNPREVREFLGTAGFCRLWIPGFAELAAPLYALTKPSTPFTWQTEHQLAFEALKKALLSAPALGLPDTSKPFTLFLDERQGIAKGVLTQKLGPWKRPVAYLSKKLDPVAAGWPPCLRIMAATAMLVKDSAKLTLGQPLTVITPHTLEAIVRQPPDRWITNARLTHYQALLLDTDRVQFGPPVTLNPATLLPVPENQPSPHDCRQVLAETHGTREDLKDQELPDADHTWYTDGSSYLDSGTRRAGAAVVDGHNTIWAQSLPPGTSAQKAELIALTKALELSKGKKANIYTDSRYAFATAHTHGSIYERRGWLTSEGKEIKNKAEIIALLKALFLPQEVAIIHCPGHQKGQDPVAVGNRQADRVARQAAMAEVLTLATEPDNTSHITAGKRTADGSEFEKRTADGSEFESPKKKAKVE

SEQ ID NO: 1596 - protein, 2102 aa, synthetic construct
MPAAKRVKLDGGDKKYSIGLDIGTNSVGWAVITDEYKVPSKKFKVLGNTDRHSIKKNLIGALLFDSGETAEATRLKRTARRRYTRRKNRICYLQEIFSNEMAKVDDSFFHRLEESFLVEEDKKHERHPIFGNIVDEVAYHEKYPTIYHLRKKLVDSTDKADLRLIYLALAHMIKFRGHFLIEGDLNPDNSDVDKLFIQLVQTYNQLFEENPINASGVDAKAILSARLSKSRRLENLIAQLPGEKKNGLFGNLIALSLGLTPNFKSNFDLAEDAKLQLSKDTYDDDLDNLLAQIGDQYADLFLAAKNLSDAILLSDILRVNTEITKAPLSASMIKRYDEHHQDLTLLKALVRQQLPEKYKEIFFDQSKNGYAGYIDGGASQEEFYKFIKPILEKMDGTEELLVKLNREDLLRKQRTFDNGSIPHQIHLGELHAILRRQEDFYPFLKDNREKIEKILTFRIPYYVGPLARGNSRFAWMTRKSEETITPWNFEEVVDKGASAQSFIERMTNFDKNLPNEKVLPKHSLLYEYFTVYNELTKVKYVTEGMRKPAFLSGEQKKAIVDLLFKTNRKVTVKQLKEDYFKKIECFDSVEISGVEDRFNASLGTYHDLLKIIKDKDFLDNEENEDILEDIVLTLTLFEDREMIEERLKTYAHLFDDKVMKQLKRRRYTGWGRLSRKLINGIRDKQSGKTILDFLKSDGFANRNFMQLIHDDSLTFKEDIQKAQVSGQGDSLHEHIANLAGSPAIKKGILQTVKVVDELVKVMGRHKPENIVIEMARENQTTQKGQKNSRERMKRIEEGIKELGSQILKEHPVENTQLQNEKLYLYYLQNGRDMYVDQELDINRLSDYDVDHIVPQSFLKDDSIDNKVLTRSDKARGKSDNVPSEEVVKKMKNYWRQLLNAKLITQRKFDNLTKAERGGLSELDKAGFIKRQLVETRQITKHVAQILDSRMNTKYDENDKLIREVKVITLKSKLVSDFRKDFQFYKVREINNYHHAHDAYLNAVVGTALIKKYPKLESEFVYGDYKVYDVRKMIAKSEQEIGKATAKYFFYSNIMNFFKTEITLANGEIRKRPLIETNGETGEIVWDKGRDFATVRKVLSMPQVNIVKKTEVQTGGFSKESILPKRNSDKLIARKKDWDPKKYGGFDSPTVAYSVLVVAKVEKGKSKKLKSVKELLGITIMERSSFEKNPIDFLEAKGYKEVKKDLIIKLPKYSLFELENGRKRMLASAGELQKGNELALPSKYVNFLYLASHYEKLKGSPEDNEQKQLFVEQHKHYLDEIIEQISEFSKRVILADANLDKVLSAYNKHRDKPIREQAENIIHLFTLTNLGAPAAFKYFDTTIDRKRYTSTKEVLDATLIHQSITGLYETRIDLSQLGGDGGGSSPAPEAAAKGGTVSLQDEHRLFDIPVTTSLPDVWLQDFPQAWAETGGLGRAKCQAPIIIDLKPTAVPVSIKQYPMSLEAHMGIRQHIIKFLELGVLRPCRSPWNTPLLPVKKPGTQDYRPVQDLREINKRTVDIHPTVPNPYNLLSTLKPDYSWYTVLDLKDAFFCLPLAPQSQELFAFEWKDPERGISGQLTWTRLPQGFKNSPTLFNEALHRDLTDFRTQHPEVTLLQYVDDLLLAAPTKKACTQGTRHLLQELGEKGYRASAKKAQICQTKVTYLGYILSEGKRWLTPGRIETVARIPPPRNPREVREFLGTAGFCRLWIPGFAELAAPLYALTKPSTPFTWQTEHQLAFEALKKALLSAPALGLPDTSKPFTLFLDERQGIAKGVLTQKLGPWKRPVAYLSKKLDPVAAGWPPCLRIMAATAMLVKDSAKLTLGQPLTVITPHTLEAIVRQPPDRWITNARLTHYQALLLDTDRVQFGPPVTLNPATLLPVPENQPSPHDCRQVLAETHGTREDLKDQELPDADHTWYTDGSSYLDSGTRRAGAAVVDGHNTIWAQSLPPGTSAQKAELIALTKALELSKGKKANIYTDSRYAFATAHTHGSIYERRGWLTSEGKEIKNKAEIIALLKALFLPQEVAIIHCPGHQKGQDPVAVGNRQADRVARQAAMAEVLTLATEPDNTSHITAGKRTADGSEFEKRTADGSEFESPKKKAKVE

SEQ ID NO: 1597 - protein, 2101 aa, synthetic construct
MPAAKRVKLDGGDKKYSIGLDIGTNSVGWAVITDEYKVPSKKFKVLGNTDRHSIKKNLIGALLFDSGETAEATRLKRTARRRYTRRKNRICYLQEIFSNEMAKVDDSFFHRLEESFLVEEDKKHERHPIFGNIVDEVAYHEKYPTIYHLRKKLVDSTDKADLRLIYLALAHMIKFRGHFLIEGDLNPDNSDVDKLFIQLVQTYNQLFEENPINASGVDAKAILSARLSKSRRLENLIAQLPGEKKNGLFGNLIALSLGLTPNFKSNFDLAEDAKLQLSKDTYDDDLDNLLAQIGDQYADLFLAAKNLSDAILLSDILRVNTEITKAPLSASMIKRYDEHHQDLTLLKALVRQQLPEKYKEIFFDQSKNGYAGYIDGGASQEEFYKFIKPILEKMDGTEELLVKLNREDLLRKQRTFDNGSIPHQIHLGELHAILRRQEDFYPFLKDNREKIEKILTFRIPYYVGPLARGNSRFAWMTRKSEETITPWNFEEVVDKGASAQSFIERMTNFDKNLPNEKVLPKHSLLYEYFTVYNELTKVKYVTEGMRKPAFLSGEQKKAIVDLLFKTNRKVTVKQLKEDYFKKIECFDSVEISGVEDRFNASLGTYHDLLKIIKDKDFLDNEENEDILEDIVLTLTLFEDREMIEERLKTYAHLFDDKVMKQLKRRRYTGWGRLSRKLINGIRDKQSGKTILDFLKSDGFANRNFMQLIHDDSLTFKEDIQKAQVSGQGDSLHEHIANLAGSPAIKKGILQTVKVVDELVKVMGRHKPENIVIEMARENQTTQKGQKNSRERMKRIEEGIKELGSQILKEHPVENTQLQNEKLYLYYLQNGRDMYVDQELDINRLSDYDVDHIVPQSFLKDDSIDNKVLTRSDKARGKSDNVPSEEVVKKMKNYWRQLLNAKLITQRKFDNLTKAERGGLSELDKAGFIKRQLVETRQITKHVAQILDSRMNTKYDENDKLIREVKVITLKSKLVSDFRKDFQFYKVREINNYHHAHDAYLNAVVGTALIKKYPKLESEFVYGDYKVYDVRKMIAKSEQEIGKATAKYFFYSNIMNFFKTEITLANGEIRKRPLIETNGETGEIVWDKGRDFATVRKVLSMPQVNIVKKTEVQTGGFSKESILPKRNSDKLIARKKDWDPKKYGGFDSPTVAYSVLVVAKVEKGKSKKLKSVKELLGITIMERSSFEKNPIDFLEAKGYKEVKKDLIIKLPKYSLFELENGRKRMLASAGELQKGNELALPSKYVNFLYLASHYEKLKGSPEDNEQKQLFVEQHKHYLDEIIEQISEFSKRVILADANLDKVLSAYNKHRDKPIREQAENIIHLFTLTNLGAPAAFKYFDTTIDRKRYTSTKEVLDATLIHQSITGLYETRIDLSQLGGDGGGGGGSGGGGSGGTVSLQDEHRLFDIPVTTSLPDVWLQDFPQAWAETGGLGRAKCQAPIIIDLKPTAVPVSIKQYPMSLEAHMGIRQHIIKFLELGVLRPCRSPWNTPLLPVKKPGTQDYRPVQDLREINKRTVDIHPTVPNPYNLLSTLKPDYSWYTVLDLKDAFFCLPLAPQSQELFAFEWKDPERGISGQLTWTRLPQGFKNSPTLFNEALHRDLTDFRTQHPEVTLLQYVDDLLLAAPTKKACTQGTRHLLQELGEKGYRASAKKAQICQTKVTYLGYILSEGKRWLTPGRIETVARIPPPRNPREVREFLGTAGFCRLWIPGFAELAAPLYALTKPSTPFTWQTEHQLAFEALKKALLSAPALGLPDTSKPFTLFLDERQGIAKGVLTQKLGPWKRPVAYLSKKLDPVAAGWPPCLRIMAATAMLVKDSAKLTLGQPLTVITPHTLEAIVRQPPDRWITNARLTHYQALLLDTDRVQFGPPVTLNPATLLPVPENQPSPHDCRQVLAETHGTREDLKDQELPDADHTWYTDGSSYLDSGTRRAGAAVVDGHNTIWAQSLPPGTSAQKAELIALTKALELSKGKKANIYTDSRYAFATAHTHGSIYERRGWLTSEGKEIKNKAEIIALLKALFLPQEVAIIHCPGHQKGQDPVAVGNRQADRVARQAAMAEVLTLATEPDNTSHITAGKRTADGSEFEKRTADGSEFESPKKKAKVE

SEQ ID NO: 1598 - protein, 2102 aa, synthetic construct
MPAAKRVKLDGGDKKYSIGLDIGTNSVGWAVITDEYKVPSKKFKVLGNTDRHSIKKNLIGALLFDSGETAEATRLKRTARRRYTRRKNRICYLQEIFSNEMAKVDDSFFHRLEESFLVEEDKKHERHPIFGNIVDEVAYHEKYPTIYHLRKKLVDSTDKADLRLIYLALAHMIKFRGHFLIEGDLNPDNSDVDKLFIQLVQTYNQLFEENPINASGVDAKAILSARLSKSRRLENLIAQLPGEKKNGLFGNLIALSLGLTPNFKSNFDLAEDAKLQLSKDTYDDDLDNLLAQIGDQYADLFLAAKNLSDAILLSDILRVNTEITKAPLSASMIKRYDEHHQDLTLLKALVRQQLPEKYKEIFFDQSKNGYAGYIDGGASQEEFYKFIKPILEKMDGTEELLVKLNREDLLRKQRTFDNGSIPHQIHLGELHAILRRQEDFYPFLKDNREKIEKILTFRIPYYVGPLARGNSRFAWMTRKSEETITPWNFEEVVDKGASAQSFIERMTNFDKNLPNEKVLPKHSLLYEYFTVYNELTKVKYVTEGMRKPAFLSGEQKKAIVDLLFKTNRKVTVKQLKEDYFKKIECFDSVEISGVEDRFNASLGTYHDLLKIIKDKDFLDNEENEDILEDIVLTLTLFEDREMIEERLKTYAHLFDDKVMKQLKRRRYTGWGRLSRKLINGIRDKQSGKTILDFLKSDGFANRNFMQLIHDDSLTFKEDIQKAQVSGQGDSLHEHIANLAGSPAIKKGILQTVKVVDELVKVMGRHKPENIVIEMARENQTTQKGQKNSRERMKRIEEGIKELGSQILKEHPVENTQLQNEKLYLYYLQNGRDMYVDQELDINRLSDYDVDHIVPQSFLKDDSIDNKVLTRSDKARGKSDNVPSEEVVKKMKNYWRQLLNAKLITQRKFDNLTKAERGGLSELDKAGFIKRQLVETRQITKHVAQILDSRMNTKYDENDKLIREVKVITLKSKLVSDFRKDFQFYKVREINNYHHAHDAYLNAVVGTALIKKYPKLESEFVYGDYKVYDVRKMIAKSEQEIGKATAKYFFYSNIMNFFKTEITLANGEIRKRPLIETNGETGEIVWDKGRDFATVRKVLSMPQVNIVKKTEVQTGGFSKESILPKRNSDKLIARKKDWDPKKYGGFDSPTVAYSVLVVAKVEKGKSKKLKSVKELLGITIMERSSFEKNPIDFLEAKGYKEVKKDLIIKLPKYSLFELENGRKRMLASAGELQKGNELALPSKYVNFLYLASHYEKLKGSPEDNEQKQLFVEQHKHYLDEIIEQISEFSKRVILADANLDKVLSAYNKHRDKPIREQAENIIHLFTLTNLGAPAAFKYFDTTIDRKRYTSTKEVLDATLIHQSITGLYETRIDLSQLGGDGGGGSPAPEAAAKGGTVSLQDEHRLFDIPVTTSLPDVWLQDFPQAWAETGGLGRAKCQAPIIIDLKPTAVPVSIKQYPMSLEAHMGIRQHIIKFLELGVLRPCRSPWNTPLLPVKKPGTQDYRPVQDLREINKRTVDIHPTVPNPYNLLSTLKPDYSWYTVLDLKDAFFCLPLAPQSQELFAFEWKDPERGISGQLTWTRLPQGFKNSPTLFNEALHRDLTDFRTQHPEVTLLQYVDDLLLAAPTKKACTQGTRHLLQELGEKGYRASAKKAQICQTKVTYLGYILSEGKRWLTPGRIETVARIPPPRNPREVREFLGTAGFCRLWIPGFAELAAPLYALTKPSTPFTWQTEHQLAFEALKKALLSAPALGLPDTSKPFTLFLDERQGIAKGVLTQKLGPWKRPVAYLSKKLDPVAAGWPPCLRIMAATAMLVKDSAKLTLGQPLTVITPHTLEAIVRQPPDRWITNARLTHYQALLLDTDRVQFGPPVTLNPATLLPVPENQPSPHDCRQVLAETHGTREDLKDQELPDADHTWYTDGSSYLDSGTRRAGAAVVDGHNTIWAQSLPPGTSAQKAELIALTKALELSKGKKANIYTDSRYAFATAHTHGSIYERRGWLTSEGKEIKNKAEIIALLKALFLPQEVAIIHCPGHQKGQDPVAVGNRQADRVARQAAMAEVLTLATEPDNTSHITAGKRTADGSEFEKRTADGSEFESPKKKAKVE

SEQ ID NO: 1599 - protein, 2100 aa, synthetic construct
MPAAKRVKLDGGDKKYSIGLDIGTNSVGWAVITDEYKVPSKKFKVLGNTDRHSIKKNLIGALLFDSGETAEATRLKRTARRRYTRRKNRICYLQEIFSNEMAKVDDSFFHRLEESFLVEEDKKHERHPIFGNIVDEVAYHEKYPTIYHLRKKLVDSTDKADLRLIYLALAHMIKFRGHFLIEGDLNPDNSDVDKLFIQLVQTYNQLFEENPINASGVDAKAILSARLSKSRRLENLIAQLPGEKKNGLFGNLIALSLGLTPNFKSNFDLAEDAKLQLSKDTYDDDLDNLLAQIGDQYADLFLAAKNLSDAILLSDILRVNTEITKAPLSASMIKRYDEHHQDLTLLKALVRQQLPEKYKEIFFDQSKNGYAGYIDGGASQEEFYKFIKPILEKMDGTEELLVKLNREDLLRKQRTFDNGSIPHQIHLGELHAILRRQEDFYPFLKDNREKIEKILTFRIPYYVGPLARGNSRFAWMTRKSEETITPWNFEEVVDKGASAQSFIERMTNFDKNLPNEKVLPKHSLLYEYFTVYNELTKVKYVTEGMRKPAFLSGEQKKAIVDLLFKTNRKVTVKQLKEDYFKKIECFDSVEISGVEDRFNASLGTYHDLLKIIKDKDFLDNEENEDILEDIVLTLTLFEDREMIEERLKTYAHLFDDKVMKQLKRRRYTGWGRLSRKLINGIRDKQSGKTILDFLKSDGFANRNFMQLIHDDSLTFKEDIQKAQVSGQGDSLHEHIANLAGSPAIKKGILQTVKVVDELVKVMGRHKPENIVIEMARENQTTQKGQKNSRERMKRIEEGIKELGSQILKEHPVENTQLQNEKLYLYYLQNGRDMYVDQELDINRLSDYDVDHIVPQSFLKDDSIDNKVLTRSDKARGKSDNVPSEEVVKKMKNYWRQLLNAKLITQRKFDNLTKAERGGLSELDKAGFIKRQLVETRQITKHVAQILDSRMNTKYDENDKLIREVKVITLKSKLVSDFRKDFQFYKVREINNYHHAHDAYLNAVVGTALIKKYPKLESEFVYGDYKVYDVRKMIAKSEQEIGKATAKYFFYSNIMNFFKTEITLANGEIRKRPLIETNGETGEIVWDKGRDFATVRKVLSMPQVNIVKKTEVQTGGFSKESILPKRNSDKLIARKKDWDPKKYGGFDSPTVAYSVLVVAKVEKGKSKKLKSVKELLGITIMERSSFEKNPIDFLEAKGYKEVKKDLIIKLPKYSLFELENGRKRMLASAGELQKGNELALPSKYVNFLYLASHYEKLKGSPEDNEQKQLFVEQHKHYLDEIIEQISEFSKRVILADANLDKVLSAYNKHRDKPIREQAENIIHLFTLTNLGAPAAFKYFDTTIDRKRYTSTKEVLDATLIHQSITGLYETRIDLSQLGGDGGPAPGGSGSSGGTVSLQDEHRLFDIPVTTSLPDVWLQDFPQAWAETGGLGRAKCQAPIIIDLKPTAVPVSIKQYPMSLEAHMGIRQHIIKFLELGVLRPCRSPWNTPLLPVKKPGTQDYRPVQDLREINKRTVDIHPTVPNPYNLLSTLKPDYSWYTVLDLKDAFFCLPLAPQSQELFAFEWKDPERGISGQLTWTRLPQGFKNSPTLFNEALHRDLTDFRTQHPEVTLLQYVDDLLLAAPTKKACTQGTRHLLQELGEKGYRASAKKAQICQTKVTYLGYILSEGKRWLTPGRIETVARIPPPRNPREVREFLGTAGFCRLWIPGFAELAAPLYALTKPSTPFTWQTEHQLAFEALKKALLSAPALGLPDTSKPFTLFLDERQGIAKGVLTQKLGPWKRPVAYLSKKLDPVAAGWPPCLRIMAATAMLVKDSAKLTLGQPLTVITPHTLEAIVRQPPDRWITNARLTHYQALLLDTDRVQFGPPVTLNPATLLPVPENQPSPHDCRQVLAETHGTREDLKDQELPDADHTWYTDGSSYLDSGTRRAGAAVVDGHNTIWAQSLPPGTSAQKAELIALTKALELSKGKKANIYTDSRYAFATAHTHGSIYERRGWLTSEGKEIKNKAEIIALLKALFLPQEVAIIHCPGHQKGQDPVAVGNRQADRVARQAAMAEVLTLATEPDNTSHITAGKRTADGSEFEKRTADGSEFESPKKKAKVE

SEQ ID NO: 1600 - protein, 2006 aa, synthetic construct
MPAAKRVKLDGGDKKYSIGLDIGTNSVGWAVITDEYKVPSKKFKVLGNTDRHSIKKNLIGALLFDSGETAEATRLKRTARRRYTRRKNRICYLQEIFSNEMAKVDDSFFHRLEESFLVEEDKKHERHPIFGNIVDEVAYHEKYPTIYHLRKKLVDSTDKADLRLIYLALAHMIKFRGHFLIEGDLNPDNSDVDKLFIQLVQTYNQLFEENPINASGVDAKAILSARLSKSRRLENLIAQLPGEKKNGLFGNLIALSLGLTPNFKSNFDLAEDAKLQLSKDTYDDDLDNLLAQIGDQYADLFLAAKNLSDAILLSDILRVNTEITKAPLSASMIKRYDEHHQDLTLLKALVRQQLPEKYKEIFFDQSKNGYAGYIDGGASQEEFYKFIKPILEKMDGTEELLVKLNREDLLRKQRTFDNGSIPHQIHLGELHAILRRQEDFYPFLKDNREKIEKILTFRIPYYVGPLARGNSRFAWMTRKSEETITPWNFEEVVDKGASAQSFIERMTNFDKNLPNEKVLPKHSLLYEYFTVYNELTKVKYVTEGMRKPAFLSGEQKKAIVDLLFKTNRKVTVKQLKEDYFKKIECFDSVEISGVEDRFNASLGTYHDLLKIIKDKDFLDNEENEDILEDIVLTLTLFEDREMIEERLKTYAHLFDDKVMKQLKRRRYTGWGRLSRKLINGIRDKQSGKTILDFLKSDGFANRNFMQLIHDDSLTFKEDIQKAQVSGQGDSLHEHIANLAGSPAIKKGILQTVKVVDELVKVMGRHKPENIVIEMARENQTTQKGQKNSRERMKRIEEGIKELGSQILKEHPVENTQLQNEKLYLYYLQNGRDMYVDQELDINRLSDYDVDHIVPQSFLKDDSIDNKVLTRSDKARGKSDNVPSEEVVKKMKNYWRQLLNAKLITQRKFDNLTKAERGGLSELDKAGFIKRQLVETRQITKHVAQILDSRMNTKYDENDKLIREVKVITLKSKLVSDFRKDFQFYKVREINNYHHAHDAYLNAVVGTALIKKYPKLESEFVYGDYKVYDVRKMIAKSEQEIGKATAKYFFYSNIMNFFKTEITLANGEIRKRPLIETNGETGEIVWDKGRDFATVRKVLSMPQVNIVKKTEVQTGGFSKESILPKRNSDKLIARKKDWDPKKYGGFDSPTVAYSVLVVAKVEKGKSKKLKSVKELLGITIMERSSFEKNPIDFLEAKGYKEVKKDLIIKLPKYSLFELENGRKRMLASAGELQKGNELALPSKYVNFLYLASHYEKLKGSPEDNEQKQLFVEQHKHYLDEIIEQISEFSKRVILADANLDKVLSAYNKHRDKPIREQAENIIHLFTLTNLGAPAAFKYFDTTIDRKRYTSTKEVLDATLIHQSITGLYETRIDLSQLGGDGGEAAAKGGGPAPGGPLGTSDSPVTHADPIDWKSEEPVWVDQWPLTQEKLSAAQQLVQEQLRLGHIEPSTSAWNSPIFVIKKKSGKWRLLQDLRKVNETMMHMGALQPGLPTPSPIPDKSYIIVIDLKDCFYTIPLAPQDCKRFAFSLPSVNFKEPMQRYQWRVLPQGMTNSPTLCQKFVATAIAPVRQRFPQLYLVHYMDDILLAHTDEHLLYQAFSILKQHLSLNGLVIADEKIQTHFPYNYLGFSLYPRVYNTQLVKLQTDHLKTLNDFQKLLGDINWIRPYLKLPTYTLQPLFDILKGDSDPASPRTLSLEGRTALQSIEEAIRQQQITYCDYQRSWGLYILPTPRAPTGVLYQDKPLRWIYLSATPTKHLLPYYELVAKIIAKGRHEAIQYFGMEPPFICVPYALEQQDWLFQFSDNWSIAFANYPGQITHHYPSDKLLQFASSHAFIFPKIVRRQPIPEATLIFTDGSSNGTAALIINHQTYYAQTSFSSAQVVELFAVHQALLTVPTSFNLFTDSSYVVGALQMIETVPIIGTTSPEVLNLFTLIQQVLHCRQHPCFFGHIRAHSTLPGALVQGNHTADVLTKQVFFQSAGKRTADGSEFEKRTADGSEFESPKKKAKVE

SEQ ID NO: 1601 - protein, 2006 aa, synthetic construct
MPAAKRVKLDGGDKKYSIGLDIGTNSVGWAVITDEYKVPSKKFKVLGNTDRHSIKKNLIGALLFDSGETAEATRLKRTARRRYTRRKNRICYLQEIFSNEMAKVDDSFFHRLEESFLVEEDKKHERHPIFGNIVDEVAYHEKYPTIYHLRKKLVDSTDKADLRLIYLALAHMIKFRGHFLIEGDLNPDNSDVDKLFIQLVQTYNQLFEENPINASGVDAKAILSARLSKSRRLENLIAQLPGEKKNGLFGNLIALSLGLTPNFKSNFDLAEDAKLQLSKDTYDDDLDNLLAQIGDQYADLFLAAKNLSDAILLSDILRVNTEITKAPLSASMIKRYDEHHQDLTLLKALVRQQLPEKYKEIFFDQSKNGYAGYIDGGASQEEFYKFIKPILEKMDGTEELLVKLNREDLLRKQRTFDNGSIPHQIHLGELHAILRRQEDFYPFLKDNREKIEKILTFRIPYYVGPLARGNSRFAWMTRKSEETITPWNFEEVVDKGASAQSFIERMTNFDKNLPNEKVLPKHSLLYEYFTVYNELTKVKYVTEGMRKPAFLSGEQKKAIVDLLFKTNRKVTVKQLKEDYFKKIECFDSVEISGVEDRFNASLGTYHDLLKIIKDKDFLDNEENEDILEDIVLTLTLFEDREMIEERLKTYAHLFDDKVMKQLKRRRYTGWGRLSRKLINGIRDKQSGKTILDFLKSDGFANRNFMQLIHDDSLTFKEDIQKAQVSGQGDSLHEHIANLAGSPAIKKGILQTVKVVDELVKVMGRHKPENIVIEMARENQTTQKGQKNSRERMKRIEEGIKELGSQILKEHPVENTQLQNEKLYLYYLQNGRDMYVDQELDINRLSDYDVDHIVPQSFLKDDSIDNKVLTRSDKARGKSDNVPSEEVVKKMKNYWRQLLNAKLITQRKFDNLTKAERGGLSELDKAGFIKRQLVETRQITKHVAQILDSRMNTKYDENDKLIREVKVITLKSKLVSDFRKDFQFYKVREINNYHHAHDAYLNAVVGTALIKKYPKLESEFVYGDYKVYDVRKMIAKSEQEIGKATAKYFFYSNIMNFFKTEITLANGEIRKRPLIETNGETGEIVWDKGRDFATVRKVLSMPQVNIVKKTEVQTGGFSKESILPKRNSDKLIARKKDWDPKKYGGFDSPTVAYSVLVVAKVEKGKSKKLKSVKELLGITIMERSSFEKNPIDFLEAKGYKEVKKDLIIKLPKYSLFELENGRKRMLASAGELQKGNELALPSKYVNFLYLASHYEKLKGSPEDNEQKQLFVEQHKHYLDEIIEQISEFSKRVILADANLDKVLSAYNKHRDKPIREQAENIIHLFTLTNLGAPAAFKYFDTTIDRKRYTSTKEVLDATLIHQSITGLYETRIDLSQLGGDGGGGSEAAAKGSSGGPLGTSDSPVTHADPIDWKSEEPVWVDQWPLTQEKLSAAQQLVQEQLRLGHIEPSTSAWNSPIFVIKKKSGKWRLLQDLRKVNETMMHMGALQPGLPTPSPIPDKSYIIVIDLKDCFYTIPLAPQDCKRFAFSLPSVNFKEPMQRYQWRVLPQGMTNSPTLCQKFVATAIAPVRQRFPQLYLVHYMDDILLAHTDEHLLYQAFSILKQHLSLNGLVIADEKIQTHFPYNYLGFSLYPRVYNTQLVKLQTDHLKTLNDFQKLLGDINWIRPYLKLPTYTLQPLFDILKGDSDPASPRTLSLEGRTALQSIEEAIRQQQITYCDYQRSWGLYILPTPRAPTGVLYQDKPLRWIYLSATPTKHLLPYYELVAKIIAKGRHEAIQYFGMEPPFICVPYALEQQDWLFQFSDNWSIAFANYPGQITHHYPSDKLLQFASSHAFIFPKIVRRQPIPEATLIFTDGSSNGTAALIINHQTYYAQTSFSSAQVVELFAVHQALLTVPTSFNLFTDSSYVVGALQMIETVPIIGTTSPEVLNLFTLIQQVLHCRQHPCFFGHIRAHSTLPGALVQGNHTADVLTKQVFFQSAGKRTADGSEFEKRTADGSEFESPKKKAKVE

SEQ ID NO: 1602 - protein, 2013 aa, synthetic construct
MPAAKRVKLDGGDKKYSIGLDIGTNSVGWAVITDEYKVPSKKFKVLGNTDRHSIKKNLIGALLFDSGETAEATRLKRTARRRYTRRKNRICYLQEIFSNEMAKVDDSFFHRLEESFLVEEDKKHERHPIFGNIVDEVAYHEKYPTIYHLRKKLVDSTDKADLRLIYLALAHMIKFRGHFLIEGDLNPDNSDVDKLFIQLVQTYNQLFEENPINASGVDAKAILSARLSKSRRLENLIAQLPGEKKNGLFGNLIALSLGLTPNFKSNFDLAEDAKLQLSKDTYDDDLDNLLAQIGDQYADLFLAAKNLSDAILLSDILRVNTEITKAPLSASMIKRYDEHHQDLTLLKALVRQQLPEKYKEIFFDQSKNGYAGYIDGGASQEEFYKFIKPILEKMDGTEELLVKLNREDLLRKQRTFDNGSIPHQIHLGELHAILRRQEDFYPFLKDNREKIEKILTFRIPYYVGPLARGNSRFAWMTRKSEETITPWNFEEVVDKGASAQSFIERMTNFDKNLPNEKVLPKHSLLYEYFTVYNELTKVKYVTEGMRKPAFLSGEQKKAIVDLLFKTNRKVTVKQLKEDYFKKIECFDSVEISGVEDRFNASLGTYHDLLKIIKDKDFLDNEENEDILEDIVLTLTLFEDREMIEERLKTYAHLFDDKVMKQLKRRRYTGWGRLSRKLINGIRDKQSGKTILDFLKSDGFANRNFMQLIHDDSLTFKEDIQKAQVSGQGDSLHEHIANLAGSPAIKKGILQTVKVVDELVKVMGRHKPENIVIEMARENQTTQKGQKNSRERMKRIEEGIKELGSQILKEHPVENTQLQNEKLYLYYLQNGRDMYVDQELDINRLSDYDVDHIVPQSFLKDDSIDNKVLTRSDKARGKSDNVPSEEVVKKMKNYWRQLLNAKLITQRKFDNLTKAERGGLSELDKAGFIKRQLVETRQITKHVAQILDSRMNTKYDENDKLIREVKVITLKSKLVSDFRKDFQFYKVREINNYHHAHDAYLNAVVGTALIKKYPKLESEFVYGDYKVYDVRKMIAKSEQEIGKATAKYFFYSNIMNFFKTEITLANGEIRKRPLIETNGETGEIVWDKGRDFATVRKVLSMPQVNIVKKTEVQTGGFSKESILPKRNSDKLIARKKDWDPKKYGGFDSPTVAYSVLVVAKVEKGKSKKLKSVKELLGITIMERSSFEKNPIDFLEAKGYKEVKKDLIIKLPKYSLFELENGRKRMLASAGELQKGNELALPSKYVNFLYLASHYEKLKGSPEDNEQKQLFVEQHKHYLDEIIEQISEFSKRVILADANLDKVLSAYNKHRDKPIREQAENIIHLFTLTNLGAPAAFKYFDTTIDRKRYTSTKEVLDATLIHQSITGLYETRIDLSQLGGDGGGSSGSSGSSGSSGSSGSSGGPLGTSDSPVTHADPIDWKSEEPVWVDQWPLTQEKLSAAQQLVQEQLRLGHIEPSTSAWNSPIFVIKKKSGKWRLLQDLRKVNETMMHMGALQPGLPTPSPIPDKSYIIVIDLKDCFYTIPLAPQDCKRFAFSLPSVNFKEPMQRYQWRVLPQGMTNSPTLCQKFVATAIAPVRQRFPQLYLVHYMDDILLAHTDEHLLYQAFSILKQHLSLNGLVIADEKIQTHFPYNYLGFSLYPRVYNTQLVKLQTDHLKTLNDFQKLLGDINWIRPYLKLPTYTLQPLFDILKGDSDPASPRTLSLEGRTALQSIEEAIRQQQITYCDYQRSWGLYILPTPRAPTGVLYQDKPLRWIYLSATPTKHLLPYYELVAKIIAKGRHEAIQYFGMEPPFICVPYALEQQDWLFQFSDNWSIAFANYPGQITHHYPSDKLLQFASSHAFIFPKIVRRQPIPEATLIFTDGSSNGTAALIINHQTYYAQTSFSSAQVVELFAVHQALLTVPTSFNLFTDSSYVVGALQMIETVPIIGTTSPEVLNLFTLIQQVLHCRQHPCFFGHIRAHSTLPGALVQGNHTADVLTKQVFFQSAGKRTADGSEFEKRTADGSEFESPKKKAKVE

SEQ ID NO: 1603 - protein, 2001 aa, synthetic construct
MPAAKRVKLDGGDKKYSIGLDIGTNSVGWAVITDEYKVPSKKFKVLGNTDRHSIKKNLIGALLFDSGETAEATRLKRTARRRYTRRKNRICYLQEIFSNEMAKVDDSFFHRLEESFLVEEDKKHERHPIFGNIVDEVAYHEKYPTIYHLRKKLVDSTDKADLRLIYLALAHMIKFRGHFLIEGDLNPDNSDVDKLFIQLVQTYNQLFEENPINASGVDAKAILSARLSKSRRLENLIAQLPGEKKNGLFGNLIALSLGLTPNFKSNFDLAEDAKLQLSKDTYDDDLDNLLAQIGDQYADLFLAAKNLSDAILLSDILRVNTEITKAPLSASMIKRYDEHHQDLTLLKALVRQQLPEKYKEIFFDQSKNGYAGYIDGGASQEEFYKFIKPILEKMDGTEELLVKLNREDLLRKQRTFDNGSIPHQIHLGELHAILRRQEDFYPFLKDNREKIEKILTFRIPYYVGPLARGNSRFAWMTRKSEETITPWNFEEVVDKGASAQSFIERMTNFDKNLPNEKVLPKHSLLYEYFTVYNELTKVKYVTEGMRKPAFLSGEQKKAIVDLLFKTNRKVTVKQLKEDYFKKIECFDSVEISGVEDRFNASLGTYHDLLKIIKDKDFLDNEENEDILEDIVLTLTLFEDREMIEERLKTYAHLFDDKVMKQLKRRRYTGWGRLSRKLINGIRDKQSGKTILDFLKSDGFANRNFMQLIHDDSLTFKEDIQKAQVSGQGDSLHEHIANLAGSPAIKKGILQTVKVVDELVKVMGRHKPENIVIEMARENQTTQKGQKNSRERMKRIEEGIKELGSQILKEHPVENTQLQNEKLYLYYLQNGRDMYVDQELDINRLSDYDVDHIVPQSFLKDDSIDNKVLTRSDKARGKSDNVPSEEVVKKMKNYWRQLLNAKLITQRKFDNLTKAERGGLSELDKAGFIKRQLVETRQITKHVAQILDSRMNTKYDENDKLIREVKVITLKSKLVSDFRKDFQFYKVREINNYHHAHDAYLNAVVGTALIKKYPKLESEFVYGDYKVYDVRKMIAKSEQEIGKATAKYFFYSNIMNFFKTEITLANGEIRKRPLIETNGETGEIVWDKGRDFATVRKVLSMPQVNIVKKTEVQTGGFSKESILPKRNSDKLIARKKDWDPKKYGGFDSPTVAYSVLVVAKVEKGKSKKLKSVKELLGITIMERSSFEKNPIDFLEAKGYKEVKKDLIIKLPKYSLFELENGRKRMLASAGELQKGNELALPSKYVNFLYLASHYEKLKGSPEDNEQKQLFVEQHKHYLDEIIEQISEFSKRVILADANLDKVLSAYNKHRDKPIREQAENIIHLFTLTNLGAPAAFKYFDTTIDRKRYTSTKEVLDATLIHQSITGLYETRIDLSQLGGDGGGSSGSSGGPLGTSDSPVTHADPIDWKSEEPVWVDQWPLTQEKLSAAQQLVQEQLRLGHIEPSTSAWNSPIFVIKKKSGKWRLLQDLRKVNETMMHMGALQPGLPTPSPIPDKSYIIVIDLKDCFYTIPLAPQDCKRFAFSLPSVNFKEPMQRYQWRVLPQGMTNSPTLCQKFVATAIAPVRQRFPQLYLVHYMDDILLAHTDEHLLYQAFSILKQHLSLNGLVIADEKIQTHFPYNYLGFSLYPRVYNTQLVKLQTDHLKTLNDFQKLLGDINWIRPYLKLPTYTLQPLFDILKGDSDPASPRTLSLEGRTALQSIEEAIRQQQITYCDYQRSWGLYILPTPRAPTGVLYQDKPLRWIYLSATPTKHLLPYYELVAKIIAKGRHEAIQYFGMEPPFICVPYALEQQDWLFQFSDNWSIAFANYPGQITHHYPSDKLLQFASSHAFIFPKIVRRQPIPEATLIFTDGSSNGTAALIINHQTYYAQTSFSSAQVVELFAVHQALLTVPTSFNLFTDSSYVVGALQMIETVPIIGTTSPEVLNLFTLIQQVLHCRQHPCFFGHIRAHSTLPGALVQGNHTADVLTKQVFFQSAGKRTADGSEFEKRTADGSEFESPKKKAKVE

SEQ ID NO: 1604 - protein, 2216 aa, synthetic construct
MPAAKRVKLDGGDKKYSIGLDIGTNSVGWAVITDEYKVPSKKFKVLGNTDRHSIKKNLIGALLFDSGETAEATRLKRTARRRYTRRKNRICYLQEIFSNEMAKVDDSFFHRLEESFLVEEDKKHERHPIFGNIVDEVAYHEKYPTIYHLRKKLVDSTDKADLRLIYLALAHMIKFRGHFLIEGDLNPDNSDVDKLFIQLVQTYNQLFEENPINASGVDAKAILSARLSKSRRLENLIAQLPGEKKNGLFGNLIALSLGLTPNFKSNFDLAEDAKLQLSKDTYDDDLDNLLAQIGDQYADLFLAAKNLSDAILLSDILRVNTEITKAPLSASMIKRYDEHHQDLTLLKALVRQQLPEKYKEIFFDQSKNGYAGYIDGGASQEEFYKFIKPILEKMDGTEELLVKLNREDLLRKQRTFDNGSIPHQIHLGELHAILRRQEDFYPFLKDNREKIEKILTFRIPYYVGPLARGNSRFAWMTRKSEETITPWNFEEVVDKGASAQSFIERMTNFDKNLPNEKVLPKHSLLYEYFTVYNELTKVKYVTEGMRKPAFLSGEQKKAIVDLLFKTNRKVTVKQLKEDYFKKIECFDSVEISGVEDRFNASLGTYHDLLKIIKDKDFLDNEENEDILEDIVLTLTLFEDREMIEERLKTYAHLFDDKVMKQLKRRRYTGWGRLSRKLINGIRDKQSGKTILDFLKSDGFANRNFMQLIHDDSLTFKEDIQKAQVSGQGDSLHEHIANLAGSPAIKKGILQTVKVVDELVKVMGRHKPENIVIEMARENQTTQKGQKNSRERMKRIEEGIKELGSQILKEHPVENTQLQNEKLYLYYLQNGRDMYVDQELDINRLSDYDVDHIVPQSFLKDDSIDNKVLTRSDKARGKSDNVPSEEVVKKMKNYWRQLLNAKLITQRKFDNLTKAERGGLSELDKAGFIKRQLVETRQITKHVAQILDSRMNTKYDENDKLIREVKVITLKSKLVSDFRKDFQFYKVREINNYHHAHDAYLNAVVGTALIKKYPKLESEFVYGDYKVYDVRKMIAKSEQEIGKATAKYFFYSNIMNFFKTEITLANGEIRKRPLIETNGETGEIVWDKGRDFATVRKVLSMPQVNIVKKTEVQTGGFSKESILPKRNSDKLIARKKDWDPKKYGGFDSPTVAYSVLVVAKVEKGKSKKLKSVKELLGITIMERSSFEKNPIDFLEAKGYKEVKKDLIIKLPKYSLFELENGRKRMLASAGELQKGNELALPSKYVNFLYLASHYEKLKGSPEDNEQKQLFVEQHKHYLDEIIEQISEFSKRVILADANLDKVLSAYNKHRDKPIREQAENIIHLFTLTNLGAPAAFKYFDTTIDRKRYTSTKEVLDATLIHQSITGLYETRIDLSQLGGDGGPAPGSSGGGGGTLGDQGSRGSDPLPEPRVTLTVEGIPTEFLVNTGAEHSVLTKPMGKMGSKRTVVAGATGSKVYPWTTKRLLKIGQKQVTHSFLVIPECPAPLLGRDLLTKLKAQIQFSTEGPQVTWEDRPAMCLVLNLEEEYRLHEKPVPPSIDPSWLQLFPMVWAEKAGMGLANQVPPVVVELKSDASPVAVRQYPMSKEAREGIRPHIQRFLDLGILVPCQSPWNTPLLPVKKPGTNDYRPVQDLREVNKRVQDIHPTVPNPYNLLSSLPPSHTWYSVLDLKDAFFCLKLHPNSQPLFAFEWRDPEKGNTGQLTWTRLPQGFKNSPTLFDEALHRDLASFRALNPQVVMLQYVDDLLVAAPTYRDCKEGTRRLLQELSKLGYRVSAKKAQLCREEVTYLGYLLKGGKRWLTPARKATVMKIPTPTTPRQVREFLGTAGFCRLWIPGFASLAAPLYPLTREKVPFTWTEAHQEAFGRIKEALLSAPALALPDLTKPFALYVDEKEGVARGVLTQTLGPWRRPVAYLSKKLDPVASGWPTCLKAIAAVALLLKDADKLTLGQNVLVIAPHNLESIVRQPPDRWMTNARMTHYQSLLLNERVSFAPPAILNPATLLPVESDDTPIHICSEILAEETGTRPDLRDQPLPGVPAWYTDGSSFIMDGRRQAGAAIVDNKRTVWASNLPEGTSAQKAELIALTQALRLAEGKSINIYTDSRYAFATAHVHGAIYKQRGLLTSAGKDIKNKEEILALLEAIHLPKRVAIIHCPGHQRGTDPVATGNRKADEAAKQAAQSTRILTETTKNAGKRTADGSEFEKRTADGSEFESPKKKAKVE

SEQ ID NO: 1605 - protein, 2218 aa, synthetic construct
MPAAKRVKLDGGDKKYSIGLDIGTNSVGWAVITDEYKVPSKKFKVLGNTDRHSIKKNLIGALLFDSGETAEATRLKRTARRRYTRRKNRICYLQEIFSNEMAKVDDSFFHRLEESFLVEEDKKHERHPIFGNIVDEVAYHEKYPTIYHLRKKLVDSTDKADLRLIYLALAHMIKFRGHFLIEGDLNPDNSDVDKLFIQLVQTYNQLFEENPINASGVDAKAILSARLSKSRRLENLIAQLPGEKKNGLFGNLIALSLGLTPNFKSNFDLAEDAKLQLSKDTYDDDLDNLLAQIGDQYADLFLAAKNLSDAILLSDILRVNTEITKAPLSASMIKRYDEHHQDLTLLKALVRQQLPEKYKEIFFDQSKNGYAGYIDGGASQEEFYKFIKPILEKMDGTEELLVKLNREDLLRKQRTFDNGSIPHQIHLGELHAILRRQEDFYPFLKDNREKIEKILTFRIPYYVGPLARGNSRFAWMTRKSEETITPWNFEEVVDKGASAQSFIERMTNFDKNLPNEKVLPKHSLLYEYFTVYNELTKVKYVTEGMRKPAFLSGEQKKAIVDLLFKTNRKVTVKQLKEDYFKKIECFDSVEISGVEDRFNASLGTYHDLLKIIKDKDFLDNEENEDILEDIVLTLTLFEDREMIEERLKTYAHLFDDKVMKQLKRRRYTGWGRLSRKLINGIRDKQSGKTILDFLKSDGFANRNFMQLIHDDSLTFKEDIQKAQVSGQGDSLHEHIANLAGSPAIKKGILQTVKVVDELVKVMGRHKPENIVIEMARENQTTQKGQKNSRERMKRIEEGIKELGSQILKEHPVENTQLQNEKLYLYYLQNGRDMYVDQELDINRLSDYDVDHIVPQSFLKDDSIDNKVLTRSDKARGKSDNVPSEEVVKKMKNYWRQLLNAKLITQRKFDNLTKAERGGLSELDKAGFIKRQLVETRQITKHVAQILDSRMNTKYDENDKLIREVKVITLKSKLVSDFRKDFQFYKVREINNYHHAHDAYLNAVVGTALIKKYPKLESEFVYGDYKVYDVRKMIAKSEQEIGKATAKYFFYSNIMNFFKTEITLANGEIRKRPLIETNGETGEIVWDKGRDFATVRKVLSMPQVNIVKKTEVQTGGFSKESILPKRNSDKLIARKKDWDPKKYGGFDSPTVAYSVLVVAKVEKGKSKKLKSVKELLGITIMERSSFEKNPIDFLEAKGYKEVKKDLIIKLPKYSLFELENGRKRMLASAGELQKGNELALPSKYVNFLYLASHYEKLKGSPEDNEQKQLFVEQHKHYLDEIIEQISEFSKRVILADANLDKVLSAYNKHRDKPIREQAENIIHLFTLTNLGAPAAFKYFDTTIDRKRYTSTKEVLDATLIHQSITGLYETRIDLSQLGGDGGPAPGGGEAAAKGGTLGDQGSRGSDPLPEPRVTLTVEGIPTEFLVNTGAEHSVLTKPMGKMGSKRTVVAGATGSKVYPWTTKRLLKIGQKQVTHSFLVIPECPAPLLGRDLLTKLKAQIQFSTEGPQVTWEDRPAMCLVLNLEEEYRLHEKPVPPSIDPSWLQLFPMVWAEKAGMGLANQVPPVVVELKSDASPVAVRQYPMSKEAREGIRPHIQRFLDLGILVPCQSPWNTPLLPVKKPGTNDYRPVQDLREVNKRVQDIHPTVPNPYNLLSSLPPSHTWYSVLDLKDAFFCLKLHPNSQPLFAFEWRDPEKGNTGQLTWTRLPQGFKNSPTLFDEALHRDLASFRALNPQVVMLQYVDDLLVAAPTYRDCKEGTRRLLQELSKLGYRVSAKKAQLCREEVTYLGYLLKGGKRWLTPARKATVMKIPTPTTPRQVREFLGTAGFCRLWIPGFASLAAPLYPLTREKVPFTWTEAHQEAFGRIKEALLSAPALALPDLTKPFALYVDEKEGVARGVLTQTLGPWRRPVAYLSKKLDPVASGWPTCLKAIAAVALLLKDADKLTLGQNVLVIAPHNLESIVRQPPDRWMTNARMTHYQSLLLNERVSFAPPAILNPATLLPVESDDTPIHICSEILAEETGTRPDLRDQPLPGVPAWYTDGSSFIMDGRRQAGAAIVDNKRTVWASNLPEGTSAQKAELIALTQALRLAEGKSINIYTDSRYAFATAHVHGAIYKQRGLLTSAGKDIKNKEEILALLEAIHLPKRVAIIHCPGHQRGTDPVATGNRKADEAAKQAAQSTRILTETTKNAGKRTADGSEFEKRTADGSEFESPKKKAKVE

SEQ ID NO: 1606 - protein, 2218 aa, synthetic construct
MPAAKRVKLDGGDKKYSIGLDIGTNSVGWAVITDEYKVPSKKFKVLGNTDRHSIKKNLIGALLFDSGETAEATRLKRTARRRYTRRKNRICYLQEIFSNEMAKVDDSFFHRLEESFLVEEDKKHERHPIFGNIVDEVAYHEKYPTIYHLRKKLVDSTDKADLRLIYLALAHMIKFRGHFLIEGDLNPDNSDVDKLFIQLVQTYNQLFEENPINASGVDAKAILSARLSKSRRLENLIAQLPGEKKNGLFGNLIALSLGLTPNFKSNFDLAEDAKLQLSKDTYDDDLDNLLAQIGDQYADLFLAAKNLSDAILLSDILRVNTEITKAPLSASMIKRYDEHHQDLTLLKALVRQQLPEKYKEIFFDQSKNGYAGYIDGGASQEEFYKFIKPILEKMDGTEELLVKLNREDLLRKQRTFDNGSIPHQIHLGELHAILRRQEDFYPFLKDNREKIEKILTFRIPYYVGPLARGNSRFAWMTRKSEETITPWNFEEVVDKGASAQSFIERMTNFDKNLPNEKVLPKHSLLYEYFTVYNELTKVKYVTEGMRKPAFLSGEQKKAIVDLLFKTNRKVTVKQLKEDYFKKIECFDSVEISGVEDRFNASLGTYHDLLKIIKDKDFLDNEENEDILEDIVLTLTLFEDREMIEERLKTYAHLFDDKVMKQLKRRRYTGWGRLSRKLINGIRDKQSGKTILDFLKSDGFANRNFMQLIHDDSLTFKEDIQKAQVSGQGDSLHEHIANLAGSPAIKKGILQTVKVVDELVKVMGRHKPENIVIEMARENQTTQKGQKNSRERMKRIEEGIKELGSQILKEHPVENTQLQNEKLYLYYLQNGRDMYVDQELDINRLSDYDVDHIVPQSFLKDDSIDNKVLTRSDKARGKSDNVPSEEVVKKMKNYWRQLLNAKLITQRKFDNLTKAERGGLSELDKAGFIKRQLVETRQITKHVAQILDSRMNTKYDENDKLIREVKVITLKSKLVSDFRKDFQFYKVREINNYHHAHDAYLNAVVGTALIKKYPKLESEFVYGDYKVYDVRKMIAKSEQEIGKATAKYFFYSNIMNFFKTEITLANGEIRKRPLIETNGETGEIVWDKGRDFATVRKVLSMPQVNIVKKTEVQTGGFSKESILPKRNSDKLIARKKDWDPKKYGGFDSPTVAYSVLVVAKVEKGKSKKLKSVKELLGITIMERSSFEKNPIDFLEAKGYKEVKKDLIIKLPKYSLFELENGRKRMLASAGELQKGNELALPSKYVNFLYLASHYEKLKGSPEDNEQKQLFVEQHKHYLDEIIEQISEFSKRVILADANLDKVLSAYNKHRDKPIREQAENIIHLFTLTNLGAPAAFKYFDTTIDRKRYTSTKEVLDATLIHQSITGLYETRIDLSQLGGDGGGGGGSSEAAAKGGTLGDQGSRGSDPLPEPRVTLTVEGIPTEFLVNTGAEHSVLTKPMGKMGSKRTVVAGATGSKVYPWTTKRLLKIGQKQVTHSFLVIPECPAPLLGRDLLTKLKAQIQFSTEGPQVTWEDRPAMCLVLNLEEEYRLHEKPVPPSIDPSWLQLFPMVWAEKAGMGLANQVPPVVVELKSDASPVAVRQYPMSKEAREGIRPHIQRFLDLGILVPCQSPWNTPLLPVKKPGTNDYRPVQDLREVNKRVQDIHPTVPNPYNLLSSLPPSHTWYSVLDLKDAFFCLKLHPNSQPLFAFEWRDPEKGNTGQLTWTRLPQGFKNSPTLFDEALHRDLASFRALNPQVVMLQYVDDLLVAAPTYRDCKEGTRRLLQELSKLGYRVSAKKAQLCREEVTYLGYLLKGGKRWLTPARKATVMKIPTPTTPRQVREFLGTAGFCRLWIPGFASLAAPLYPLTREKVPFTWTEAHQEAFGRIKEALLSAPALALPDLTKPFALYVDEKEGVARGVLTQTLGPWRRPVAYLSKKLDPVASGWPTCLKAIAAVALLLKDADKLTLGQNVLVIAPHNLESIVRQPPDRWMTNARMTHYQSLLLNERVSFAPPAILNPATLLPVESDDTPIHICSEILAEETGTRPDLRDQPLPGVPAWYTDGSSFIMDGRRQAGAAIVDNKRTVWASNLPEGTSAQKAELIALTQALRLAEGKSINIYTDSRYAFATAHVHGAIYKQRGLLTSAGKDIKNKEEILALLEAIHLPKRVAIIHCPGHQRGTDPVATGNRKADEAAKQAAQSTRILTETTKNAGKRTADGSEFEKRTADGSEFESPKKKAKVE

SEQ ID NO: 1607 - protein, 2213 aa, synthetic construct
MPAAKRVKLDGGDKKYSIGLDIGTNSVGWAVITDEYKVPSKKFKVLGNTDRHSIKKNLIGALLFDSGETAEATRLKRTARRRYTRRKNRICYLQEIFSNEMAKVDDSFFHRLEESFLVEEDKKHERHPIFGNIVDEVAYHEKYPTIYHLRKKLVDSTDKADLRLIYLALAHMIKFRGHFLIEGDLNPDNSDVDKLFIQLVQTYNQLFEENPINASGVDAKAILSARLSKSRRLENLIAQLPGEKKNGLFGNLIALSLGLTPNFKSNFDLAEDAKLQLSKDTYDDDLDNLLAQIGDQYADLFLAAKNLSDAILLSDILRVNTEITKAPLSASMIKRYDEHHQDLTLLKALVRQQLPEKYKEIFFDQSKNGYAGYIDGGASQEEFYKFIKPILEKMDGTEELLVKLNREDLLRKQRTFDNGSIPHQIHLGELHAILRRQEDFYPFLKDNREKIEKILTFRIPYYVGPLARGNSRFAWMTRKSEETITPWNFEEVVDKGASAQSFIERMTNFDKNLPNEKVLPKHSLLYEYFTVYNELTKVKYVTEGMRKPAFLSGEQKKAIVDLLFKTNRKVTVKQLKEDYFKKIECFDSVEISGVEDRFNASLGTYHDLLKIIKDKDFLDNEENEDILEDIVLTLTLFEDREMIEERLKTYAHLFDDKVMKQLKRRRYTGWGRLSRKLINGIRDKQSGKTILDFLKSDGFANRNFMQLIHDDSLTFKEDIQKAQVSGQGDSLHEHIANLAGSPAIKKGILQTVKVVDELVKVMGRHKPENIVIEMARENQTTQKGQKNSRERMKRIEEGIKELGSQILKEHPVENTQLQNEKLYLYYLQNGRDMYVDQELDINRLSDYDVDHIVPQSFLKDDSIDNKVLTRSDKARGKSDNVPSEEVVKKMKNYWRQLLNAKLITQRKFDNLTKAERGGLSELDKAGFIKRQLVETRQITKHVAQILDSRMNTKYDENDKLIREVKVITLKSKLVSDFRKDFQFYKVREINNYHHAHDAYLNAVVGTALIKKYPKLESEFVYGDYKVYDVRKMIAKSEQEIGKATAKYFFYSNIMNFFKTEITLANGEIRKRPLIETNGETGEIVWDKGRDFATVRKVLSMPQVNIVKKTEVQTGGFSKESILPKRNSDKLIARKKDWDPKKYGGFDSPTVAYSVLVVAKVEKGKSKKLKSVKELLGITIMERSSFEKNPIDFLEAKGYKEVKKDLIIKLPKYSLFELENGRKRMLASAGELQKGNELALPSKYVNFLYLASHYEKLKGSPEDNEQKQLFVEQHKHYLDEIIEQISEFSKRVILADANLDKVLSAYNKHRDKPIREQAENIIHLFTLTNLGAPAAFKYFDTTIDRKRYTSTKEVLDATLIHQSITGLYETRIDLSQLGGDGGGGSPAPGGTLGDQGSRGSDPLPEPRVTLTVEGIPTEFLVNTGAEHSVLTKPMGKMGSKRTVVAGATGSKVYPWTTKRLLKIGQKQVTHSFLVIPECPAPLLGRDLLTKLKAQIQFSTEGPQVTWEDRPAMCLVLNLEEEYRLHEKPVPPSIDPSWLQLFPMVWAEKAGMGLANQVPPVVVELKSDASPVAVRQYPMSKEAREGIRPHIQRFLDLGILVPCQSPWNTPLLPVKKPGTNDYRPVQDLREVNKRVQDIHPTVPNPYNLLSSLPPSHTWYSVLDLKDAFFCLKLHPNSQPLFAFEWRDPEKGNTGQLTWTRLPQGFKNSPTLFDEALHRDLASFRALNPQVVMLQYVDDLLVAAPTYRDCKEGTRRLLQELSKLGYRVSAKKAQLCREEVTYLGYLLKGGKRWLTPARKATVMKIPTPTTPRQVREFLGTAGFCRLWIPGFASLAAPLYPLTREKVPFTWTEAHQEAFGRIKEALLSAPALALPDLTKPFALYVDEKEGVARGVLTQTLGPWRRPVAYLSKKLDPVASGWPTCLKAIAAVALLLKDADKLTLGQNVLVIAPHNLESIVRQPPDRWMTNARMTHYQSLLLNERVSFAPPAILNPATLLPVESDDTPIHICSEILAEETGTRPDLRDQPLPGVPAWYTDGSSFIMDGRRQAGAAIVDNKRTVWASNLPEGTSAQKAELIALTQALRLAEGKSINIYTDSRYAFATAHVHGAIYKQRGLLTSAGKDIKNKEEILALLEAIHLPKRVAIIHCPGHQRGTDPVATGNRKADEAAKQAAQSTRILTETTKNAGKRTADGSEFEKRTADGSEFESPKKKAKVE

SEQ ID NO: 1608 - protein, 2216 aa, synthetic construct
MPAAKRVKLDGGDKKYSIGLDIGTNSVGWAVITDEYKVPSKKFKVLGNTDRHSIKKNLIGALLFDSGETAEATRLKRTARRRYTRRKNRICYLQEIFSNEMAKVDDSFFHRLEESFLVEEDKKHERHPIFGNIVDEVAYHEKYPTIYHLRKKLVDSTDKADLRLIYLALAHMIKFRGHFLIEGDLNPDNSDVDKLFIQLVQTYNQLFEENPINASGVDAKAILSARLSKSRRLENLIAQLPGEKKNGLFGNLIALSLGLTPNFKSNFDLAEDAKLQLSKDTYDDDLDNLLAQIGDQYADLFLAAKNLSDAILLSDILRVNTEITKAPLSASMIKRYDEHHQDLTLLKALVRQQLPEKYKEIFFDQSKNGYAGYIDGGASQEEFYKFIKPILEKMDGTEELLVKLNREDLLRKQRTFDNGSIPHQIHLGELHAILRRQEDFYPFLKDNREKIEKILTFRIPYYVGPLARGNSRFAWMTRKSEETITPWNFEEVVDKGASAQSFIERMTNFDKNLPNEKVLPKHSLLYEYFTVYNELTKVKYVTEGMRKPAFLSGEQKKAIVDLLFKTNRKVTVKQLKEDYFKKIECFDSVEISGVEDRFNASLGTYHDLLKIIKDKDFLDNEENEDILEDIVLTLTLFEDREMIEERLKTYAHLFDDKVMKQLKRRRYTGWGRLSRKLINGIRDKQSGKTILDFLKSDGFANRNFMQLIHDDSLTFKEDIQKAQVSGQGDSLHEHIANLAGSPAIKKGILQTVKVVDELVKVMGRHKPENIVIEMARENQTTQKGQKNSRERMKRIEEGIKELGSQILKEHPVENTQLQNEKLYLYYLQNGRDMYVDQELDINRLSDYDVDHIVPQSFLKDDSIDNKVLTRSDKARGKSDNVPSEEVVKKMKNYWRQLLNAKLITQRKFDNLTKAERGGLSELDKAGFIKRQLVETRQITKHVAQILDSRMNTKYDENDKLIREVKVITLKSKLVSDFRKDFQFYKVREINNYHHAHDAYLNAVVGTALIKKYPKLESEFVYGDYKVYDVRKMIAKSEQEIGKATAKYFFYSNIMNFFKTEITLANGEIRKRPLIETNGETGEIVWDKGRDFATVRKVLSMPQVNIVKKTEVQTGGFSKESILPKRNSDKLIARKKDWDPKKYGGFDSPTVAYSVLVVAKVEKGKSKKLKSVKELLGITIMERSSFEKNPIDFLEAKGYKEVKKDLIIKLPKYSLFELENGRKRMLASAGELQKGNELALPSKYVNFLYLASHYEKLKGSPEDNEQKQLFVEQHKHYLDEIIEQISEFSKRVILADANLDKVLSAYNKHRDKPIREQAENIIHLFTLTNLGAPAAFKYFDTTIDRKRYTSTKEVLDATLIHQSITGLYETRIDLSQLGGDGGGGSGGGGSSGGTLGDQGSRGSDPLPEPRVTLTVEGIPTEFLVNTGAEHSVLTKPMGKMGSKRTVVAGATGSKVYPWTTKRLLKIGQKQVTHSFLVIPECPAPLLGRDLLTKLKAQIQFSTEGPQVTWEDRPAMCLVLNLEEEYRLHEKPVPPSIDPSWLQLFPMVWAEKAGMGLANQVPPVVVELKSDASPVAVRQYPMSKEAREGIRPHIQRFLDLGILVPCQSPWNTPLLPVKKPGTNDYRPVQDLREVNKRVQDIHPTVPNPYNLLSSLPPSHTWYSVLDLKDAFFCLKLHPNSQPLFAFEWRDPEKGNTGQLTWTRLPQGFKNSPTLFDEALHRDLASFRALNPQVVMLQYVDDLLVAAPTYRDCKEGTRRLLQELSKLGYRVSAKKAQLCREEVTYLGYLLKGGKRWLTPARKATVMKIPTPTTPRQVREFLGTAGFCRLWIPGFASLAAPLYPLTREKVPFTWTEAHQEAFGRIKEALLSAPALALPDLTKPFALYVDEKEGVARGVLTQTLGPWRRPVAYLSKKLDPVASGWPTCLKAIAAVALLLKDADKLTLGQNVLVIAPHNLESIVRQPPDRWMTNARMTHYQSLLLNERVSFAPPAILNPATLLPVESDDTPIHICSEILAEETGTRPDLRDQPLPGVPAWYTDGSSFIMDGRRQAGAAIVDNKRTVWASNLPEGTSAQKAELIALTQALRLAEGKSINIYTDSRYAFATAHVHGAIYKQRGLLTSAGKDIKNKEEILALLEAIHLPKRVAIIHCPGHQRGTDPVATGNRKADEAAKQAAQSTRILTETTKNAGKRTADGSEFEKRTADGSEFESPKKKAKVE

SEQ ID NO: 1609 - protein, 2220 aa, synthetic construct
MPAAKRVKLDGGDKKYSIGLDIGTNSVGWAVITDEYKVPSKKFKVLGNTDRHSIKKNLIGALLFDSGETAEATRLKRTARRRYTRRKNRICYLQEIFSNEMAKVDDSFFHRLEESFLVEEDKKHERHPIFGNIVDEVAYHEKYPTIYHLRKKLVDSTDKADLRLIYLALAHMIKFRGHFLIEGDLNPDNSDVDKLFIQLVQTYNQLFEENPINASGVDAKAILSARLSKSRRLENLIAQLPGEKKNGLFGNLIALSLGLTPNFKSNFDLAEDAKLQLSKDTYDDDLDNLLAQIGDQYADLFLAAKNLSDAILLSDILRVNTEITKAPLSASMIKRYDEHHQDLTLLKALVRQQLPEKYKEIFFDQSKNGYAGYIDGGASQEEFYKFIKPILEKMDGTEELLVKLNREDLLRKQRTFDNGSIPHQIHLGELHAILRRQEDFYPFLKDNREKIEKILTFRIPYYVGPLARGNSRFAWMTRKSEETITPWNFEEVVDKGASAQSFIERMTNFDKNLPNEKVLPKHSLLYEYFTVYNELTKVKYVTEGMRKPAFLSGEQKKAIVDLLFKTNRKVTVKQLKEDYFKKIECFDSVEISGVEDRFNASLGTYHDLLKIIKDKDFLDNEENEDILEDIVLTLTLFEDREMIEERLKTYAHLFDDKVMKQLKRRRYTGWGRLSRKLINGIRDKQSGKTILDFLKSDGFANRNFMQLIHDDSLTFKEDIQKAQVSGQGDSLHEHIANLAGSPAIKKGILQTVKVVDELVKVMGRHKPENIVIEMARENQTTQKGQKNSRERMKRIEEGIKELGSQILKEHPVENTQLQNEKLYLYYLQNGRDMYVDQELDINRLSDYDVDHIVPQSFLKDDSIDNKVLTRSDKARGKSDNVPSEEVVKKMKNYWRQLLNAKLITQRKFDNLTKAERGGLSELDKAGFIKRQLVETRQITKHVAQILDSRMNTKYDENDKLIREVKVITLKSKLVSDFRKDFQFYKVREINNYHHAHDAYLNAVVGTALIKKYPKLESEFVYGDYKVYDVRKMIAKSEQEIGKATAKYFFYSNIMNFFKTEITLANGEIRKRPLIETNGETGEIVWDKGRDFATVRKVLSMPQVNIVKKTEVQTGGFSKESILPKRNSDKLIARKKDWDPKKYGGFDSPTVAYSVLVVAKVEKGKSKKLKSVKELLGITIMERSSFEKNPIDFLEAKGYKEVKKDLIIKLPKYSLFELENGRKRMLASAGELQKGNELALPSKYVNFLYLASHYEKLKGSPEDNEQKQLFVEQHKHYLDEIIEQISEFSKRVILADANLDKVLSAYNKHRDKPIREQAENIIHLFTLTNLGAPAAFKYFDTTIDRKRYTSTKEVLDATLIHQSITGLYETRIDLSQLGGDGGPAPAPAPAPAPAPGGTLGDQGSRGSDPLPEPRVTLTVEGIPTEFLVNTGAEHSVLTKPMGKMGSKRTVVAGATGSKVYPWTTKRLLKIGQKQVTHSFLVIPECPAPLLGRDLLTKLKAQIQFSTEGPQVTWEDRPAMCLVLNLEEEYRLHEKPVPPSIDPSWLQLFPMVWAEKAGMGLANQVPPVVVELKSDASPVAVRQYPMSKEAREGIRPHIQRFLDLGILVPCQSPWNTPLLPVKKPGTNDYRPVQDLREVNKRVQDIHPTVPNPYNLLSSLPPSHTWYSVLDLKDAFFCLKLHPNSQPLFAFEWRDPEKGNTGQLTWTRLPQGFKNSPTLFDEALHRDLASFRALNPQVVMLQYVDDLLVAAPTYRDCKEGTRRLLQELSKLGYRVSAKKAQLCREEVTYLGYLLKGGKRWLTPARKATVMKIPTPTTPRQVREFLGTAGFCRLWIPGFASLAAPLYPLTREKVPFTWTEAHQEAFGRIKEALLSAPALALPDLTKPFALYVDEKEGVARGVLTQTLGPWRRPVAYLSKKLDPVASGWPTCLKAIAAVALLLKDADKLTLGQNVLVIAPHNLESIVRQPPDRWMTNARMTHYQSLLLNERVSFAPPAILNPATLLPVESDDTPIHICSEILAEETGTRPDLRDQPLPGVPAWYTDGSSFIMDGRRQAGAAIVDNKRTVWASNLPEGTSAQKAELIALTQALRLAEGKSINIYTDSRYAFATAHVHGAIYKQRGLLTSAGKDIKNKEEILALLEAIHLPKRVAIIHCPGHQRGTDPVATGNRKADEAAKQAAQSTRILTETTKNAGKRTADGSEFEKRTADGSEFESPKKKAKVE

SEQ ID NO: 1610 - protein, 2127 aa, synthetic construct
MPAAKRVKLDGGDKKYSIGLDIGTNSVGWAVITDEYKVPSKKFKVLGNTDRHSIKKNLIGALLFDSGETAEATRLKRTARRRYTRRKNRICYLQEIFSNEMAKVDDSFFHRLEESFLVEEDKKHERHPIFGNIVDEVAYHEKYPTIYHLRKKLVDSTDKADLRLIYLALAHMIKFRGHFLIEGDLNPDNSDVDKLFIQLVQTYNQLFEENPINASGVDAKAILSARLSKSRRLENLIAQLPGEKKNGLFGNLIALSLGLTPNFKSNFDLAEDAKLQLSKDTYDDDLDNLLAQIGDQYADLFLAAKNLSDAILLSDILRVNTEITKAPLSASMIKRYDEHHQDLTLLKALVRQQLPEKYKEIFFDQSKNGYAGYIDGGASQEEFYKFIKPILEKMDGTEELLVKLNREDLLRKQRTFDNGSIPHQIHLGELHAILRRQEDFYPFLKDNREKIEKILTFRIPYYVGPLARGNSRFAWMTRKSEETITPWNFEEVVDKGASAQSFIERMTNFDKNLPNEKVLPKHSLLYEYFTVYNELTKVKYVTEGMRKPAFLSGEQKKAIVDLLFKTNRKVTVKQLKEDYFKKIECFDSVEISGVEDRFNASLGTYHDLLKIIKDKDFLDNEENEDILEDIVLTLTLFEDREMIEERLKTYAHLFDDKVMKQLKRRRYTGWGRLSRKLINGIRDKQSGKTILDFLKSDGFANRNFMQLIHDDSLTFKEDIQKAQVSGQGDSLHEHIANLAGSPAIKKGILQTVKVVDELVKVMGRHKPENIVIEMARENQTTQKGQKNSRERMKRIEEGIKELGSQILKEHPVENTQLQNEKLYLYYLQNGRDMYVDQELDINRLSDYDVDHIVPQSFLKDDSIDNKVLTRSDKARGKSDNVPSEEVVKKMKNYWRQLLNAKLITQRKFDNLTKAERGGLSELDKAGFIKRQLVETRQITKHVAQILDSRMNTKYDENDKLIREVKVITLKSKLVSDFRKDFQFYKVREINNYHHAHDAYLNAVVGTALIKKYPKLESEFVYGDYKVYDVRKMIAKSEQEIGKATAKYFFYSNIMNFFKTEITLANGEIRKRPLIETNGETGEIVWDKGRDFATVRKVLSMPQVNIVKKTEVQTGGFSKESILPKRNSDKLIARKKDWDPKKYGGFDSPTVAYSVLVVAKVEKGKSKKLKSVKELLGITIMERSSFEKNPIDFLEAKGYKEVKKDLIIKLPKYSLFELENGRKRMLASAGELQKGNELALPSKYVNFLYLASHYEKLKGSPEDNEQKQLFVEQHKHYLDEIIEQISEFSKRVILADANLDKVLSAYNKHRDKPIREQAENIIHLFTLTNLGAPAAFKYFDTTIDRKRYTSTKEVLDATLIHQSITGLYETRIDLSQLGGDGGEAAAKGGSPAPGGLLGRDLLTKLKAQIQFSTEGPQVTWEDRPAMCLVLNLEEEYRLHEKPVPPSIDPSWLQLFPMVWAEKAGMGLANQVPPVVVELKSDASPVAVRQYPMSKEAREGIRPHIQRFLDLGILVPCQSPWNTPLLPVKKPGTNDYRPVQDLREVNKRVQDIHPTVPNPYNLLSSLPPSHTWYSVLDLKDAFFCLKLHPNSQPLFAFEWRDPEKGNTGQLTWTRLPQGFKNSPTLFDEALHRDLASFRALNPQVVMLQYVDDLLVAAPTYRDCKEGTRRLLQELSKLGYRVSAKKAQLCREEVTYLGYLLKGGKRWLTPARKATVMKIPTPTTPRQVREFLGTAGFCRLWIPGFASLAAPLYPLTREKVPFTWTEAHQEAFGRIKEALLSAPALALPDLTKPFALYVDEKEGVARGVLTQTLGPWRRPVAYLSKKLDPVASGWPTCLKAIAAVALLLKDADKLTLGQNVLVIAPHNLESIVRQPPDRWMTNARMTHYQSLLLNERVSFAPPAILNPATLLPVESDDTPIHICSEILAEETGTRPDLRDQPLPGVPAWYTDGSSFIMDGRRQAGAAIVDNKRTVWASNLPEGTSAQKAELIALTQALRLAEGKSINIYTDSRYAFATAHVHGAIYKQRGLLTSAGKDIKNKEEILALLEAIHLPKRVAIIHCPGHQRGTDPVATGNRKADEAAKQAAQSTRILTETTKNAGKRTADGSEFEKRTADGSEFESPKKKAKVE

SEQ ID NO: 1611 - protein, 2125 aa, synthetic construct
MPAAKRVKLDGGDKKYSIGLDIGTNSVGWAVITDEYKVPSKKFKVLGNTDRHSIKKNLIGALLFDSGETAEATRLKRTARRRYTRRKNRICYLQEIFSNEMAKVDDSFFHRLEESFLVEEDKKHERHPIFGNIVDEVAYHEKYPTIYHLRKKLVDSTDKADLRLIYLALAHMIKFRGHFLIEGDLNPDNSDVDKLFIQLVQTYNQLFEENPINASGVDAKAILSARLSKSRRLENLIAQLPGEKKNGLFGNLIALSLGLTPNFKSNFDLAEDAKLQLSKDTYDDDLDNLLAQIGDQYADLFLAAKNLSDAILLSDILRVNTEITKAPLSASMIKRYDEHHQDLTLLKALVRQQLPEKYKEIFFDQSKNGYAGYIDGGASQEEFYKFIKPILEKMDGTEELLVKLNREDLLRKQRTFDNGSIPHQIHLGELHAILRRQEDFYPFLKDNREKIEKILTFRIPYYVGPLARGNSRFAWMTRKSEETITPWNFEEVVDKGASAQSFIERMTNFDKNLPNEKVLPKHSLLYEYFTVYNELTKVKYVTEGMRKPAFLSGEQKKAIVDLLFKTNRKVTVKQLKEDYFKKIECFDSVEISGVEDRFNASLGTYHDLLKIIKDKDFLDNEENEDILEDIVLTLTLFEDREMIEERLKTYAHLFDDKVMKQLKRRRYTGWGRLSRKLINGIRDKQSGKTILDFLKSDGFANRNFMQLIHDDSLTFKEDIQKAQVSGQGDSLHEHIANLAGSPAIKKGILQTVKVVDELVKVMGRHKPENIVIEMARENQTTQKGQKNSRERMKRIEEGIKELGSQILKEHPVENTQLQNEKLYLYYLQNGRDMYVDQELDINRLSDYDVDHIVPQSFLKDDSIDNKVLTRSDKARGKSDNVPSEEVVKKMKNYWRQLLNAKLITQRKFDNLTKAERGGLSELDKAGFIKRQLVETRQITKHVAQILDSRMNTKYDENDKLIREVKVITLKSKLVSDFRKDFQFYKVREINNYHHAHDAYLNAVVGTALIKKYPKLESEFVYGDYKVYDVRKMIAKSEQEIGKATAKYFFYSNIMNFFKTEITLANGEIRKRPLIETNGETGEIVWDKGRDFATVRKVLSMPQVNIVKKTEVQTGGFSKESILPKRNSDKLIARKKDWDPKKYGGFDSPTVAYSVLVVAKVEKGKSKKLKSVKELLGITIMERSSFEKNPIDFLEAKGYKEVKKDLIIKLPKYSLFELENGRKRMLASAGELQKGNELALPSKYVNFLYLASHYEKLKGSPEDNEQKQLFVEQHKHYLDEIIEQISEFSKRVILADANLDKVLSAYNKHRDKPIREQAENIIHLFTLTNLGAPAAFKYFDTTIDRKRYTSTKEVLDATLIHQSITGLYETRIDLSQLGGDGGGGGGGSGSSGGLLGRDLLTKLKAQIQFSTEGPQVTWEDRPAMCLVLNLEEEYRLHEKPVPPSIDPSWLQLFPMVWAEKAGMGLANQVPPVVVELKSDASPVAVRQYPMSKEAREGIRPHIQRFLDLGILVPCQSPWNTPLLPVKKPGTNDYRPVQDLREVNKRVQDIHPTVPNPYNLLSSLPPSHTWYSVLDLKDAFFCLKLHPNSQPLFAFEWRDPEKGNTGQLTWTRLPQGFKNSPTLFDEALHRDLASFRALNPQVVMLQYVDDLLVAAPTYRDCKEGTRRLLQELSKLGYRVSAKKAQLCREEVTYLGYLLKGGKRWLTPARKATVMKIPTPTTPRQVREFLGTAGFCRLWIPGFASLAAPLYPLTREKVPFTWTEAHQEAFGRIKEALLSAPALALPDLTKPFALYVDEKEGVARGVLTQTLGPWRRPVAYLSKKLDPVASGWPTCLKAIAAVALLLKDADKLTLGQNVLVIAPHNLESIVRQPPDRWMTNARMTHYQSLLLNERVSFAPPAILNPATLLPVESDDTPIHICSEILAEETGTRPDLRDQPLPGVPAWYTDGSSFIMDGRRQAGAAIVDNKRTVWASNLPEGTSAQKAELIALTQALRLAEGKSINIYTDSRYAFATAHVHGAIYKQRGLLTSAGKDIKNKEEILALLEAIHLPKRVAIIHCPGHQRGTDPVATGNRKADEAAKQAAQSTRILTETTKNAGKRTADGSEFEKRTADGSEFESPKKKAKVE

SEQ ID NO: 1612 - protein, 2127 aa, synthetic construct
MPAAKRVKLDGGDKKYSIGLDIGTNSVGWAVITDEYKVPSKKFKVLGNTDRHSIKKNLIGALLFDSGETAEATRLKRTARRRYTRRKNRICYLQEIFSNEMAKVDDSFFHRLEESFLVEEDKKHERHPIFGNIVDEVAYHEKYPTIYHLRKKLVDSTDKADLRLIYLALAHMIKFRGHFLIEGDLNPDNSDVDKLFIQLVQTYNQLFEENPINASGVDAKAILSARLSKSRRLENLIAQLPGEKKNGLFGNLIALSLGLTPNFKSNFDLAEDAKLQLSKDTYDDDLDNLLAQIGDQYADLFLAAKNLSDAILLSDILRVNTEITKAPLSASMIKRYDEHHQDLTLLKALVRQQLPEKYKEIFFDQSKNGYAGYIDGGASQEEFYKFIKPILEKMDGTEELLVKLNREDLLRKQRTFDNGSIPHQIHLGELHAILRRQEDFYPFLKDNREKIEKILTFRIPYYVGPLARGNSRFAWMTRKSEETITPWNFEEVVDKGASAQSFIERMTNFDKNLPNEKVLPKHSLLYEYFTVYNELTKVKYVTEGMRKPAFLSGEQKKAIVDLLFKTNRKVTVKQLKEDYFKKIECFDSVEISGVEDRFNASLGTYHDLLKIIKDKDFLDNEENEDILEDIVLTLTLFEDREMIEERLKTYAHLFDDKVMKQLKRRRYTGWGRLSRKLINGIRDKQSGKTILDFLKSDGFANRNFMQLIHDDSLTFKEDIQKAQVSGQGDSLHEHIANLAGSPAIKKGILQTVKVVDELVKVMGRHKPENIVIEMARENQTTQKGQKNSRERMKRIEEGIKELGSQILKEHPVENTQLQNEKLYLYYLQNGRDMYVDQELDINRLSDYDVDHIVPQSFLKDDSIDNKVLTRSDKARGKSDNVPSEEVVKKMKNYWRQLLNAKLITQRKFDNLTKAERGGLSELDKAGFIKRQLVETRQITKHVAQILDSRMNTKYDENDKLIREVKVITLKSKLVSDFRKDFQFYKVREINNYHHAHDAYLNAVVGTALIKKYPKLESEFVYGDYKVYDVRKMIAKSEQEIGKATAKYFFYSNIMNFFKTEITLANGEIRKRPLIETNGETGEIVWDKGRDFATVRKVLSMPQVNIVKKTEVQTGGFSKESILPKRNSDKLIARKKDWDPKKYGGFDSPTVAYSVLVVAKVEKGKSKKLKSVKELLGITIMERSSFEKNPIDFLEAKGYKEVKKDLIIKLPKYSLFELENGRKRMLASAGELQKGNELALPSKYVNFLYLASHYEKLKGSPEDNEQKQLFVEQHKHYLDEIIEQISEFSKRVILADANLDKVLSAYNKHRDKPIREQAENIIHLFTLTNLGAPAAFKYFDTTIDRKRYTSTKEVLDATLIHQSITGLYETRIDLSQLGGDGGEAAAKGGGPAPGGLLGRDLLTKLKAQIQFSTEGPQVTWEDRPAMCLVLNLEEEYRLHEKPVPPSIDPSWLQLFPMVWAEKAGMGLANQVPPVVVELKSDASPVAVRQYPMSKEAREGIRPHIQRFLDLGILVPCQSPWNTPLLPVKKPGTNDYRPVQDLREVNKRVQDIHPTVPNPYNLLSSLPPSHTWYSVLDLKDAFFCLKLHPNSQPLFAFEWRDPEKGNTGQLTWTRLPQGFKNSPTLFDEALHRDLASFRALNPQVVMLQYVDDLLVAAPTYRDCKEGTRRLLQELSKLGYRVSAKKAQLCREEVTYLGYLLKGGKRWLTPARKATVMKIPTPTTPRQVREFLGTAGFCRLWIPGFASLAAPLYPLTREKVPFTWTEAHQEAFGRIKEALLSAPALALPDLTKPFALYVDEKEGVARGVLTQTLGPWRRPVAYLSKKLDPVASGWPTCLKAIAAVALLLKDADKLTLGQNVLVIAPHNLESIVRQPPDRWMTNARMTHYQSLLLNERVSFAPPAILNPATLLPVESDDTPIHICSEILAEETGTRPDLRDQPLPGVPAWYTDGSSFIMDGRRQAGAAIVDNKRTVWASNLPEGTSAQKAELIALTQALRLAEGKSINIYTDSRYAFATAHVHGAIYKQRGLLTSAGKDIKNKEEILALLEAIHLPKRVAIIHCPGHQRGTDPVATGNRKADEAAKQAAQSTRILTETTKNAGKRTADGSEFEKRTADGSEFESPKKKAKVE

SEQ ID NO: 1613 - protein, 2127 aa, synthetic construct
MPAAKRVKLDGGDKKYSIGLDIGTNSVGWAVITDEYKVPSKKFKVLGNTDRHSIKKNLIGALLFDSGETAEATRLKRTARRRYTRRKNRICYLQEIFSNEMAKVDDSFFHRLEESFLVEEDKKHERHPIFGNIVDEVAYHEKYPTIYHLRKKLVDSTDKADLRLIYLALAHMIKFRGHFLIEGDLNPDNSDVDKLFIQLVQTYNQLFEENPINASGVDAKAILSARLSKSRRLENLIAQLPGEKKNGLFGNLIALSLGLTPNFKSNFDLAEDAKLQLSKDTYDDDLDNLLAQIGDQYADLFLAAKNLSDAILLSDILRVNTEITKAPLSASMIKRYDEHHQDLTLLKALVRQQLPEKYKEIFFDQSKNGYAGYIDGGASQEEFYKFIKPILEKMDGTEELLVKLNREDLLRKQRTFDNGSIPHQIHLGELHAILRRQEDFYPFLKDNREKIEKILTFRIPYYVGPLARGNSRFAWMTRKSEETITPWNFEEVVDKGASAQSFIERMTNFDKNLPNEKVLPKHSLLYEYFTVYNELTKVKYVTEGMRKPAFLSGEQKKAIVDLLFKTNRKVTVKQLKEDYFKKIECFDSVEISGVEDRFNASLGTYHDLLKIIKDKDFLDNEENEDILEDIVLTLTLFEDREMIEERLKTYAHLFDDKVMKQLKRRRYTGWGRLSRKLINGIRDKQSGKTILDFLKSDGFANRNFMQLIHDDSLTFKEDIQKAQVSGQGDSLHEHIANLAGSPAIKKGILQTVKVVDELVKVMGRHKPENIVIEMARENQTTQKGQKNSRERMKRIEEGIKELGSQILKEHPVENTQLQNEKLYLYYLQNGRDMYVDQELDINRLSDYDVDHIVPQSFLKDDSIDNKVLTRSDKARGKSDNVPSEEVVKKMKNYWRQLLNAKLITQRKFDNLTKAERGGLSELDKAGFIKRQLVETRQITKHVAQILDSRMNTKYDENDKLIREVKVITLKSKLVSDFRKDFQFYKVREINNYHHAHDAYLNAVVGTALIKKYPKLESEFVYGDYKVYDVRKMIAKSEQEIGKATAKYFFYSNIMNFFKTEITLANGEIRKRPLIETNGETGEIVWDKGRDFATVRKVLSMPQVNIVKKTEVQTGGFSKESILPKRNSDKLIARKKDWDPKKYGGFDSPTVAYSVLVVAKVEKGKSKKLKSVKELLGITIMERSSFEKNPIDFLEAKGYKEVKKDLIIKLPKYSLFELENGRKRMLASAGELQKGNELALPSKYVNFLYLASHYEKLKGSPEDNEQKQLFVEQHKHYLDEIIEQISEFSKRVILADANLDKVLSAYNKHRDKPIREQAENIIHLFTLTNLGAPAAFKYFDTTIDRKRYTSTKEVLDATLIHQSITGLYETRIDLSQLGGDGGEAAAKPAPGSSGGLLGRDLLTKLKAQIQFSTEGPQVTWEDRPAMCLVLNLEEEYRLHEKPVPPSIDPSWLQLFPMVWAEKAGMGLANQVPPVVVELKSDASPVAVRQYPMSKEAREGIRPHIQRFLDLGILVPCQSPWNTPLLPVKKPGTNDYRPVQDLREVNKRVQDIHPTVPNPYNLLSSLPPSHTWYSVLDLKDAFFCLKLHPNSQPLFAFEWRDPEKGNTGQLTWTRLPQGFKNSPTLFDEALHRDLASFRALNPQVVMLQYVDDLLVAAPTYRDCKEGTRRLLQELSKLGYRVSAKKAQLCREEVTYLGYLLKGGKRWLTPARKATVMKIPTPTTPRQVREFLGTAGFCRLWIPGFASLAAPLYPLTREKVPFTWTEAHQEAFGRIKEALLSAPALALPDLTKPFALYVDEKEGVARGVLTQTLGPWRRPVAYLSKKLDPVASGWPTCLKAIAAVALLLKDADKLTLGQNVLVIAPHNLESIVRQPPDRWMTNARMTHYQSLLLNERVSFAPPAILNPATLLPVESDDTPIHICSEILAEETGTRPDLRDQPLPGVPAWYTDGSSFIMDGRRQAGAAIVDNKRTVWASNLPEGTSAQKAELIALTQALRLAEGKSINIYTDSRYAFATAHVHGAIYKQRGLLTSAGKDIKNKEEILALLEAIHLPKRVAIIHCPGHQRGTDPVATGNRKADEAAKQAAQSTRILTETTKNAGKRTADGSEFEKRTADGSEFESPKKKAKVE

SEQ ID NO: 1614 - protein, 2127 aa, synthetic construct
MPAAKRVKLDGGDKKYSIGLDIGTNSVGWAVITDEYKVPSKKFKVLGNTDRHSIKKNLIGALLFDSGETAEATRLKRTARRRYTRRKNRICYLQEIFSNEMAKVDDSFFHRLEESFLVEEDKKHERHPIFGNIVDEVAYHEKYPTIYHLRKKLVDSTDKADLRLIYLALAHMIKFRGHFLIEGDLNPDNSDVDKLFIQLVQTYNQLFEENPINASGVDAKAILSARLSKSRRLENLIAQLPGEKKNGLFGNLIALSLGLTPNFKSNFDLAEDAKLQLSKDTYDDDLDNLLAQIGDQYADLFLAAKNLSDAILLSDILRVNTEITKAPLSASMIKRYDEHHQDLTLLKALVRQQLPEKYKEIFFDQSKNGYAGYIDGGASQEEFYKFIKPILEKMDGTEELLVKLNREDLLRKQRTFDNGSIPHQIHLGELHAILRRQEDFYPFLKDNREKIEKILTFRIPYYVGPLARGNSRFAWMTRKSEETITPWNFEEVVDKGASAQSFIERMTNFDKNLPNEKVLPKHSLLYEYFTVYNELTKVKYVTEGMRKPAFLSGEQKKAIVDLLFKTNRKVTVKQLKEDYFKKIECFDSVEISGVEDRFNASLGTYHDLLKIIKDKDFLDNEENEDILEDIVLTLTLFEDREMIEERLKTYAHLFDDKVMKQLKRRRYTGWGRLSRKLINGIRDKQSGKTILDFLKSDGFANRNFMQLIHDDSLTFKEDIQKAQVSGQGDSLHEHIANLAGSPAIKKGILQTVKVVDELVKVMGRHKPENIVIEMARENQTTQKGQKNSRERMKRIEEGIKELGSQILKEHPVENTQLQNEKLYLYYLQNGRDMYVDQELDINRLSDYDVDHIVPQSFLKDDSIDNKVLTRSDKARGKSDNVPSEEVVKKMKNYWRQLLNAKLITQRKFDNLTKAERGGLSELDKAGFIKRQLVETRQITKHVAQILDSRMNTKYDENDKLIREVKVITLKSKLVSDFRKDFQFYKVREINNYHHAHDAYLNAVVGTALIKKYPKLESEFVYGDYKVYDVRKMIAKSEQEIGKATAKYFFYSNIMNFFKTEITLANGEIRKRPLIETNGETGEIVWDKGRDFATVRKVLSMPQVNIVKKTEVQTGGFSKESILPKRNSDKLIARKKDWDPKKYGGFDSPTVAYSVLVVAKVEKGKSKKLKSVKELLGITIMERSSFEKNPIDFLEAKGYKEVKKDLIIKLPKYSLFELENGRKRMLASAGELQKGNELALPSKYVNFLYLASHYEKLKGSPEDNEQKQLFVEQHKHYLDEIIEQISEFSKRVILADANLDKVLSAYNKHRDKPIREQAENIIHLFTLTNLGAPAAFKYFDTTIDRKRYTSTKEVLDATLIHQSITGLYETRIDLSQLGGDGGPAPGGSEAAAKGGLLGRDLLTKLKAQIQFSTEGPQVTWEDRPAMCLVLNLEEEYRLHEKPVPPSIDPSWLQLFPMVWAEKAGMGLANQVPPVVVELKSDASPVAVRQYPMSKEAREGIRPHIQRFLDLGILVPCQSPWNTPLLPVKKPGTNDYRPVQDLREVNKRVQDIHPTVPNPYNLLSSLPPSHTWYSVLDLKDAFFCLKLHPNSQPLFAFEWRDPEKGNTGQLTWTRLPQGFKNSPTLFDEALHRDLASFRALNPQVVMLQYVDDLLVAAPTYRDCKEGTRRLLQELSKLGYRVSAKKAQLCREEVTYLGYLLKGGKRWLTPARKATVMKIPTPTTPRQVREFLGTAGFCRLWIPGFASLAAPLYPLTREKVPFTWTEAHQEAFGRIKEALLSAPALALPDLTKPFALYVDEKEGVARGVLTQTLGPWRRPVAYLSKKLDPVASGWPTCLKAIAAVALLLKDADKLTLGQNVLVIAPHNLESIVRQPPDRWMTNARMTHYQSLLLNERVSFAPPAILNPATLLPVESDDTPIHICSEILAEETGTRPDLRDQPLPGVPAWYTDGSSFIMDGRRQAGAAIVDNKRTVWASNLPEGTSAQKAELIALTQALRLAEGKSINIYTDSRYAFATAHVHGAIYKQRGLLTSAGKDIKNKEEILALLEAIHLPKRVAIIHCPGHQRGTDPVATGNRKADEAAKQAAQSTRILTETTKNAGKRTADGSEFEKRTADGSEFESPKKKAKVE

SEQ ID NO: 1615 - protein, 2134 aa, synthetic construct
MPAAKRVKLDGGDKKYSIGLDIGTNSVGWAVITDEYKVPSKKFKVLGNTDRHSIKKNLIGALLFDSGETAEATRLKRTARRRYTRRKNRICYLQEIFSNEMAKVDDSFFHRLEESFLVEEDKKHERHPIFGNIVDEVAYHEKYPTIYHLRKKLVDSTDKADLRLIYLALAHMIKFRGHFLIEGDLNPDNSDVDKLFIQLVQTYNQLFEENPINASGVDAKAILSARLSKSRRLENLIAQLPGEKKNGLFGNLIALSLGLTPNFKSNFDLAEDAKLQLSKDTYDDDLDNLLAQIGDQYADLFLAAKNLSDAILLSDILRVNTEITKAPLSASMIKRYDEHHQDLTLLKALVRQQLPEKYKEIFFDQSKNGYAGYIDGGASQEEFYKFIKPILEKMDGTEELLVKLNREDLLRKQRTFDNGSIPHQIHLGELHAILRRQEDFYPFLKDNREKIEKILTFRIPYYVGPLARGNSRFAWMTRKSEETITPWNFEEVVDKGASAQSFIERMTNFDKNLPNEKVLPKHSLLYEYFTVYNELTKVKYVTEGMRKPAFLSGEQKKAIVDLLFKTNRKVTVKQLKEDYFKKIECFDSVEISGVEDRFNASLGTYHDLLKIIKDKDFLDNEENEDILEDIVLTLTLFEDREMIEERLKTYAHLFDDKVMKQLKRRRYTGWGRLSRKLINGIRDKQSGKTILDFLKSDGFANRNFMQLIHDDSLTFKEDIQKAQVSGQGDSLHEHIANLAGSPAIKKGILQTVKVVDELVKVMGRHKPENIVIEMARENQTTQKGQKNSRERMKRIEEGIKELGSQILKEHPVENTQLQNEKLYLYYLQNGRDMYVDQELDINRLSDYDVDHIVPQSFLKDDSIDNKVLTRSDKARGKSDNVPSEEVVKKMKNYWRQLLNAKLITQRKFDNLTKAERGGLSELDKAGFIKRQLVETRQITKHVAQILDSRMNTKYDENDKLIREVKVITLKSKLVSDFRKDFQFYKVREINNYHHAHDAYLNAVVGTALIKKYPKLESEFVYGDYKVYDVRKMIAKSEQEIGKATAKYFFYSNIMNFFKTEITLANGEIRKRPLIETNGETGEIVWDKGRDFATVRKVLSMPQVNIVKKTEVQTGGFSKESILPKRNSDKLIARKKDWDPKKYGGFDSPTVAYSVLVVAKVEKGKSKKLKSVKELLGITIMERSSFEKNPIDFLEAKGYKEVKKDLIIKLPKYSLFELENGRKRMLASAGELQKGNELALPSKYVNFLYLASHYEKLKGSPEDNEQKQLFVEQHKHYLDEIIEQISEFSKRVILADANLDKVLSAYNKHRDKPIREQAENIIHLFTLTNLGAPAAFKYFDTTIDRKRYTSTKEVLDATLIHQSITGLYETRIDLSQLGGDGGGSSGSSGSSGSSGSSGSSGGLLGRDLLTKLKAQIQFSTEGPQVTWEDRPAMCLVLNLEEEYRLHEKPVPPSIDPSWLQLFPMVWAEKAGMGLANQVPPVVVELKSDASPVAVRQYPMSKEAREGIRPHIQRFLDLGILVPCQSPWNTPLLPVKKPGTNDYRPVQDLREVNKRVQDIHPTVPNPYNLLSSLPPSHTWYSVLDLKDAFFCLKLHPNSQPLFAFEWRDPEKGNTGQLTWTRLPQGFKNSPTLFDEALHRDLASFRALNPQVVMLQYVDDLLVAAPTYRDCKEGTRRLLQELSKLGYRVSAKKAQLCREEVTYLGYLLKGGKRWLTPARKATVMKIPTPTTPRQVREFLGTAGFCRLWIPGFASLAAPLYPLTREKVPFTWTEAHQEAFGRIKEALLSAPALALPDLTKPFALYVDEKEGVARGVLTQTLGPWRRPVAYLSKKLDPVASGWPTCLKAIAAVALLLKDADKLTLGQNVLVIAPHNLESIVRQPPDRWMTNARMTHYQSLLLNERVSFAPPAILNPATLLPVESDDTPIHICSEILAEETGTRPDLRDQPLPGVPAWYTDGSSFIMDGRRQAGAAIVDNKRTVWASNLPEGTSAQKAELIALTQALRLAEGKSINIYTDSRYAFATAHVHGAIYKQRGLLTSAGKDIKNKEEILALLEAIHLPKRVAIIHCPGHQRGTDPVATGNRKADEAAKQAAQSTRILTETTKNAGKRTADGSEFEKRTADGSEFESPKKKAKVE

SEQ ID NO: 1616 - protein, 2123 aa, synthetic construct
MPAAKRVKLDGGDKKYSIGLDIGTNSVGWAVITDEYKVPSKKFKVLGNTDRHSIKKNLIGALLFDSGETAEATRLKRTARRRYTRRKNRICYLQEIFSNEMAKVDDSFFHRLEESFLVEEDKKHERHPIFGNIVDEVAYHEKYPTIYHLRKKLVDSTDKADLRLIYLALAHMIKFRGHFLIEGDLNPDNSDVDKLFIQLVQTYNQLFEENPINASGVDAKAILSARLSKSRRLENLIAQLPGEKKNGLFGNLIALSLGLTPNFKSNFDLAEDAKLQLSKDTYDDDLDNLLAQIGDQYADLFLAAKNLSDAILLSDILRVNTEITKAPLSASMIKRYDEHHQDLTLLKALVRQQLPEKYKEIFFDQSKNGYAGYIDGGASQEEFYKFIKPILEKMDGTEELLVKLNREDLLRKQRTFDNGSIPHQIHLGELHAILRRQEDFYPFLKDNREKIEKILTFRIPYYVGPLARGNSRFAWMTRKSEETITPWNFEEVVDKGASAQSFIERMTNFDKNLPNEKVLPKHSLLYEYFTVYNELTKVKYVTEGMRKPAFLSGEQKKAIVDLLFKTNRKVTVKQLKEDYFKKIECFDSVEISGVEDRFNASLGTYHDLLKIIKDKDFLDNEENEDILEDIVLTLTLFEDREMIEERLKTYAHLFDDKVMKQLKRRRYTGWGRLSRKLINGIRDKQSGKTILDFLKSDGFANRNFMQLIHDDSLTFKEDIQKAQVSGQGDSLHEHIANLAGSPAIKKGILQTVKVVDELVKVMGRHKPENIVIEMARENQTTQKGQKNSRERMKRIEEGIKELGSQILKEHPVENTQLQNEKLYLYYLQNGRDMYVDQELDINRLSDYDVDHIVPQSFLKDDSIDNKVLTRSDKARGKSDNVPSEEVVKKMKNYWRQLLNAKLITQRKFDNLTKAERGGLSELDKAGFIKRQLVETRQITKHVAQILDSRMNTKYDENDKLIREVKVITLKSKLVSDFRKDFQFYKVREINNYHHAHDAYLNAVVGTALIKKYPKLESEFVYGDYKVYDVRKMIAKSEQEIGKATAKYFFYSNIMNFFKTEITLANGEIRKRPLIETNGETGEIVWDKGRDFATVRKVLSMPQVNIVKKTEVQTGGFSKESILPKRNSDKLIARKKDWDPKKYGGFDSPTVAYSVLVVAKVEKGKSKKLKSVKELLGITIMERSSFEKNPIDFLEAKGYKEVKKDLIIKLPKYSLFELENGRKRMLASAGELQKGNELALPSKYVNFLYLASHYEKLKGSPEDNEQKQLFVEQHKHYLDEIIEQISEFSKRVILADANLDKVLSAYNKHRDKPIREQAENIIHLFTLTNLGAPAAFKYFDTTIDRKRYTSTKEVLDATLIHQSITGLYETRIDLSQLGGDGGPAPAPAPGGLLGRDLLTKLKAQIQFSTEGPQVTWEDRPAMCLVLNLEEEYRLHEKPVPPSIDPSWLQLFPMVWAEKAGMGLANQVPPVVVELKSDASPVAVRQYPMSKEAREGIRPHIQRFLDLGILVPCQSPWNTPLLPVKKPGTNDYRPVQDLREVNKRVQDIHPTVPNPYNLLSSLPPSHTWYSVLDLKDAFFCLKLHPNSQPLFAFEWRDPEKGNTGQLTWTRLPQGFKNSPTLFNEALHRDLASFRALNPQVVMLQYVDDLLVAAPTYRDCKEGTRRLLQELSKLGYRVSAKKAQLCREEVTYLGYLLKGGKRWLTPARKATVMKIPTPTTPRQVREFLGTAGFCRLWIPGFASLAAPLYPLTRPKVPFTWTEAHQEAFGRIKEALLSAPALALPDLTKPFALYVDEKEGVARGVLTQTLGPWRRPVAYLSKKLDPVASGWPTCLKAIAAVALLLKDADKLTLGQNVLVIAPHNLESIVRQPPDRWMTNARMTHYQSLLLNERVSFAPPAILNPATLLPVESDDTPIHICSEILAEETGTRPDLRDQPLPGVPAWYTDGSSFIMDGRRQAGAAIVDNKRTVWASNLPEGTSAQKAELIALTQALRLAEGKSINIYTDSRYAFATAHVHGAIYKQRGWLTSAGKDIKNKEEILALLEAIHLPKRVAIIHCPGHQRGTDPVATGNRKADEAAKQAAQSTRILTETTKNAGKRTADGSEFEKRTADGSEFESPKKKAKVE

SEQ ID NO: 1617 - protein, 2131 aa, synthetic construct
MPAAKRVKLDGGDKKYSIGLDIGTNSVGWAVITDEYKVPSKKFKVLGNTDRHSIKKNLIGALLFDSGETAEATRLKRTARRRYTRRKNRICYLQEIFSNEMAKVDDSFFHRLEESFLVEEDKKHERHPIFGNIVDEVAYHEKYPTIYHLRKKLVDSTDKADLRLIYLALAHMIKFRGHFLIEGDLNPDNSDVDKLFIQLVQTYNQLFEENPINASGVDAKAILSARLSKSRRLENLIAQLPGEKKNGLFGNLIALSLGLTPNFKSNFDLAEDAKLQLSKDTYDDDLDNLLAQIGDQYADLFLAAKNLSDAILLSDILRVNTEITKAPLSASMIKRYDEHHQDLTLLKALVRQQLPEKYKEIFFDQSKNGYAGYIDGGASQEEFYKFIKPILEKMDGTEELLVKLNREDLLRKQRTFDNGSIPHQIHLGELHAILRRQEDFYPFLKDNREKIEKILTFRIPYYVGPLARGNSRFAWMTRKSEETITPWNFEEVVDKGASAQSFIERMTNFDKNLPNEKVLPKHSLLYEYFTVYNELTKVKYVTEGMRKPAFLSGEQKKAIVDLLFKTNRKVTVKQLKEDYFKKIECFDSVEISGVEDRFNASLGTYHDLLKIIKDKDFLDNEENEDILEDIVLTLTLFEDREMIEERLKTYAHLFDDKVMKQLKRRRYTGWGRLSRKLINGIRDKQSGKTILDFLKSDGFANRNFMQLIHDDSLTFKEDIQKAQVSGQGDSLHEHIANLAGSPAIKKGILQTVKVVDELVKVMGRHKPENIVIEMARENQTTQKGQKNSRERMKRIEEGIKELGSQILKEHPVENTQLQNEKLYLYYLQNGRDMYVDQELDINRLSDYDVDHIVPQSFLKDDSIDNKVLTRSDKARGKSDNVPSEEVVKKMKNYWRQLLNAKLITQRKFDNLTKAERGGLSELDKAGFIKRQLVETRQITKHVAQILDSRMNTKYDENDKLIREVKVITLKSKLVSDFRKDFQFYKVREINNYHHAHDAYLNAVVGTALIKKYPKLESEFVYGDYKVYDVRKMIAKSEQEIGKATAKYFFYSNIMNFFKTEITLANGEIRKRPLIETNGETGEIVWDKGRDFATVRKVLSMPQVNIVKKTEVQTGGFSKESILPKRNSDKLIARKKDWDPKKYGGFDSPTVAYSVLVVAKVEKGKSKKLKSVKELLGITIMERSSFEKNPIDFLEAKGYKEVKKDLIIKLPKYSLFELENGRKRMLASAGELQKGNELALPSKYVNFLYLASHYEKLKGSPEDNEQKQLFVEQHKHYLDEIIEQISEFSKRVILADANLDKVLSAYNKHRDKPIREQAENIIHLFTLTNLGAPAAFKYFDTTIDRKRYTSTKEVLDATLIHQSITGLYETRIDLSQLGGDGGGSSGSSGSSGSSGSSGGLLGRDLLTKLKAQIQFSTEGPQVTWEDRPAMCLVLNLEEEYRLHEKPVPPSIDPSWLQLFPMVWAEKAGMGLANQVPPVVVELKSDASPVAVRQYPMSKEAREGIRPHIQRFLDLGILVPCQSPWNTPLLPVKKPGTNDYRPVQDLREVNKRVQDIHPTVPNPYNLLSSLPPSHTWYSVLDLKDAFFCLKLHPNSQPLFAFEWRDPEKGNTGQLTWTRLPQGFKNSPTLFNEALHRDLASFRALNPQVVMLQYVDDLLVAAPTYRDCKEGTRRLLQELSKLGYRVSAKKAQLCREEVTYLGYLLKGGKRWLTPARKATVMKIPTPTTPRQVREFLGTAGFCRLWIPGFASLAAPLYPLTRPKVPFTWTEAHQEAFGRIKEALLSAPALALPDLTKPFALYVDEKEGVARGVLTQTLGPWRRPVAYLSKKLDPVASGWPTCLKAIAAVALLLKDADKLTLGQNVLVIAPHNLESIVRQPPDRWMTNARMTHYQSLLLNERVSFAPPAILNPATLLPVESDDTPIHICSEILAEETGTRPDLRDQPLPGVPAWYTDGSSFIMDGRRQAGAAIVDNKRTVWASNLPEGTSAQKAELIALTQALRLAEGKSINIYTDSRYAFATAHVHGAIYKQRGWLTSAGKDIKNKEEILALLEAIHLPKRVAIIHCPGHQRGTDPVATGNRKADEAAKQAAQSTRILTETTKNAGKRTADGSEFEKRTADGSEFESPKKKAKVE

SEQ ID NO: 1618 - protein, 2127 aa, synthetic construct
MPAAKRVKLDGGDKKYSIGLDIGTNSVGWAVITDEYKVPSKKFKVLGNTDRHSIKKNLIGALLFDSGETAEATRLKRTARRRYTRRKNRICYLQEIFSNEMAKVDDSFFHRLEESFLVEEDKKHERHPIFGNIVDEVAYHEKYPTIYHLRKKLVDSTDKADLRLIYLALAHMIKFRGHFLIEGDLNPDNSDVDKLFIQLVQTYNQLFEENPINASGVDAKAILSARLSKSRRLENLIAQLPGEKKNGLFGNLIALSLGLTPNFKSNFDLAEDAKLQLSKDTYDDDLDNLLAQIGDQYADLFLAAKNLSDAILLSDILRVNTEITKAPLSASMIKRYDEHHQDLTLLKALVRQQLPEKYKEIFFDQSKNGYAGYIDGGASQEEFYKFIKPILEKMDGTEELLVKLNREDLLRKQRTFDNGSIPHQIHLGELHAILRRQEDFYPFLKDNREKIEKILTFRIPYYVGPLARGNSRFAWMTRKSEETITPWNFEEVVDKGASAQSFIERMTNFDKNLPNEKVLPKHSLLYEYFTVYNELTKVKYVTEGMRKPAFLSGEQKKAIVDLLFKTNRKVTVKQLKEDYFKKIECFDSVEISGVEDRFNASLGTYHDLLKIIKDKDFLDNEENEDILEDIVLTLTLFEDREMIEERLKTYAHLFDDKVMKQLKRRRYTGWGRLSRKLINGIRDKQSGKTILDFLKSDGFANRNFMQLIHDDSLTFKEDIQKAQVSGQGDSLHEHIANLAGSPAIKKGILQTVKVVDELVKVMGRHKPENIVIEMARENQTTQKGQKNSRERMKRIEEGIKELGSQILKEHPVENTQLQNEKLYLYYLQNGRDMYVDQELDINRLSDYDVDHIVPQSFLKDDSIDNKVLTRSDKARGKSDNVPSEEVVKKMKNYWRQLLNAKLITQRKFDNLTKAERGGLSELDKAGFIKRQLVETRQITKHVAQILDSRMNTKYDENDKLIREVKVITLKSKLVSDFRKDFQFYKVREINNYHHAHDAYLNAVVGTALIKKYPKLESEFVYGDYKVYDVRKMIAKSEQEIGKATAKYFFYSNIMNFFKTEITLANGEIRKRPLIETNGETGEIVWDKGRDFATVRKVLSMPQVNIVKKTEVQTGGFSKESILPKRNSDKLIARKKDWDPKKYGGFDSPTVAYSVLVVAKVEKGKSKKLKSVKELLGITIMERSSFEKNPIDFLEAKGYKEVKKDLIIKLPKYSLFELENGRKRMLASAGELQKGNELALPSKYVNFLYLASHYEKLKGSPEDNEQKQLFVEQHKHYLDEIIEQISEFSKRVILADANLDKVLSAYNKHRDKPIREQAENIIHLFTLTNLGAPAAFKYFDTTIDRKRYTSTKEVLDATLIHQSITGLYETRIDLSQLGGDGGEAAAKPAPGSSGGLLGRDLLTKLKAQIQFSTEGPQVTWEDRPAMCLVLNLEEEYRLHEKPVPPSIDPSWLQLFPMVWAEKAGMGLANQVPPVVVELKSDASPVAVRQYPMSKEAREGIRPHIQRFLDLGILVPCQSPWNTPLLPVKKPGTNDYRPVQDLREVNKRVQDIHPTVPNPYNLLSSLPPSHTWYSVLDLKDAFFCLKLHPNSQPLFAFEWRDPEKGNTGQLTWTRLPQGFKNSPTLFNEALHRDLASFRALNPQVVMLQYVDDLLVAAPTYRDCKEGTRRLLQELSKLGYRVSAKKAQLCREEVTYLGYLLKGGKRWLTPARKATVMKIPTPTTPRQVREFLGTAGFCRLWIPGFASLAAPLYPLTRPKVPFTWTEAHQEAFGRIKEALLSAPALALPDLTKPFALYVDEKEGVARGVLTQTLGPWRRPVAYLSKKLDPVASGWPTCLKAIAAVALLLKDADKLTLGQNVLVIAPHNLESIVRQPPDRWMTNARMTHYQSLLLNERVSFAPPAILNPATLLPVESDDTPIHICSEILAEETGTRPDLRDQPLPGVPAWYTDGSSFIMDGRRQAGAAIVDNKRTVWASNLPEGTSAQKAELIALTQALRLAEGKSINIYTDSRYAFATAHVHGAIYKQRGWLTSAGKDIKNKEEILALLEAIHLPKRVAIIHCPGHQRGTDPVATGNRKADEAAKQAAQSTRILTETTKNAGKRTADGSEFEKRTADGSEFESPKKKAKVE

SEQ ID NO: 1619 - protein, 2127 aa, synthetic construct
MPAAKRVKLDGGDKKYSIGLDIGTNSVGWAVITDEYKVPSKKFKVLGNTDRHSIKKNLIGALLFDSGETAEATRLKRTARRRYTRRKNRICYLQEIFSNEMAKVDDSFFHRLEESFLVEEDKKHERHPIFGNIVDEVAYHEKYPTIYHLRKKLVDSTDKADLRLIYLALAHMIKFRGHFLIEGDLNPDNSDVDKLFIQLVQTYNQLFEENPINASGVDAKAILSARLSKSRRLENLIAQLPGEKKNGLFGNLIALSLGLTPNFKSNFDLAEDAKLQLSKDTYDDDLDNLLAQIGDQYADLFLAAKNLSDAILLSDILRVNTEITKAPLSASMIKRYDEHHQDLTLLKALVRQQLPEKYKEIFFDQSKNGYAGYIDGGASQEEFYKFIKPILEKMDGTEELLVKLNREDLLRKQRTFDNGSIPHQIHLGELHAILRRQEDFYPFLKDNREKIEKILTFRIPYYVGPLARGNSRFAWMTRKSEETITPWNFEEVVDKGASAQSFIERMTNFDKNLPNEKVLPKHSLLYEYFTVYNELTKVKYVTEGMRKPAFLSGEQKKAIVDLLFKTNRKVTVKQLKEDYFKKIECFDSVEISGVEDRFNASLGTYHDLLKIIKDKDFLDNEENEDILEDIVLTLTLFEDREMIEERLKTYAHLFDDKVMKQLKRRRYTGWGRLSRKLINGIRDKQSGKTILDFLKSDGFANRNFMQLIHDDSLTFKEDIQKAQVSGQGDSLHEHIANLAGSPAIKKGILQTVKVVDELVKVMGRHKPENIVIEMARENQTTQKGQKNSRERMKRIEEGIKELGSQILKEHPVENTQLQNEKLYLYYLQNGRDMYVDQELDINRLSDYDVDHIVPQSFLKDDSIDNKVLTRSDKARGKSDNVPSEEVVKKMKNYWRQLLNAKLITQRKFDNLTKAERGGLSELDKAGFIKRQLVETRQITKHVAQILDSRMNTKYDENDKLIREVKVITLKSKLVSDFRKDFQFYKVREINNYHHAHDAYLNAVVGTALIKKYPKLESEFVYGDYKVYDVRKMIAKSEQEIGKATAKYFFYSNIMNFFKTEITLANGEIRKRPLIETNGETGEIVWDKGRDFATVRKVLSMPQVNIVKKTEVQTGGFSKESILPKRNSDKLIARKKDWDPKKYGGFDSPTVAYSVLVVAKVEKGKSKKLKSVKELLGITIMERSSFEKNPIDFLEAKGYKEVKKDLIIKLPKYSLFELENGRKRMLASAGELQKGNELALPSKYVNFLYLASHYEKLKGSPEDNEQKQLFVEQHKHYLDEIIEQISEFSKRVILADANLDKVLSAYNKHRDKPIREQAENIIHLFTLTNLGAPAAFKYFDTTIDRKRYTSTKEVLDATLIHQSITGLYETRIDLSQLGGDGGPAPAPAPAPAPGGLLGRDLLTKLKAQIQFSTEGPQVTWEDRPAMCLVLNLEEEYRLHEKPVPPSIDPSWLQLFPMVWAEKAGMGLANQVPPVVVELKSDASPVAVRQYPMSKEAREGIRPHIQRFLDLGILVPCQSPWNTPLLPVKKPGTNDYRPVQDLREVNKRVQDIHPTVPNPYNLLSSLPPSHTWYSVLDLKDAFFCLKLHPNSQPLFAFEWRDPEKGNTGQLTWTRLPQGFKNSPTLFNEALHRDLASFRALNPQVVMLQYVDDLLVAAPTYRDCKEGTRRLLQELSKLGYRVSAKKAQLCREEVTYLGYLLKGGKRWLTPARKATVMKIPTPTTPRQVREFLGTAGFCRLWIPGFASLAAPLYPLTRPKVPFTWTEAHQEAFGRIKEALLSAPALALPDLTKPFALYVDEKEGVARGVLTQTLGPWRRPVAYLSKKLDPVASGWPTCLKAIAAVALLLKDADKLTLGQNVLVIAPHNLESIVRQPPDRWMTNARMTHYQSLLLNERVSFAPPAILNPATLLPVESDDTPIHICSEILAEETGTRPDLRDQPLPGVPAWYTDGSSFIMDGRRQAGAAIVDNKRTVWASNLPEGTSAQKAELIALTQALRLAEGKSINIYTDSRYAFATAHVHGAIYKQRGWLTSAGKDIKNKEEILALLEAIHLPKRVAIIHCPGHQRGTDPVATGNRKADEAAKQAAQSTRILTETTKNAGKRTADGSEFEKRTADGSEFESPKKKAKVE

SEQ ID NO: 1620 - protein, 2127 aa, synthetic construct
MPAAKRVKLDGGDKKYSIGLDIGTNSVGWAVITDEYKVPSKKFKVLGNTDRHSIKKNLIGALLFDSGETAEATRLKRTARRRYTRRKNRICYLQEIFSNEMAKVDDSFFHRLEESFLVEEDKKHERHPIFGNIVDEVAYHEKYPTIYHLRKKLVDSTDKADLRLIYLALAHMIKFRGHFLIEGDLNPDNSDVDKLFIQLVQTYNQLFEENPINASGVDAKAILSARLSKSRRLENLIAQLPGEKKNGLFGNLIALSLGLTPNFKSNFDLAEDAKLQLSKDTYDDDLDNLLAQIGDQYADLFLAAKNLSDAILLSDILRVNTEITKAPLSASMIKRYDEHHQDLTLLKALVRQQLPEKYKEIFFDQSKNGYAGYIDGGASQEEFYKFIKPILEKMDGTEELLVKLNREDLLRKQRTFDNGSIPHQIHLGELHAILRRQEDFYPFLKDNREKIEKILTFRIPYYVGPLARGNSRFAWMTRKSEETITPWNFEEVVDKGASAQSFIERMTNFDKNLPNEKVLPKHSLLYEYFTVYNELTKVKYVTEGMRKPAFLSGEQKKAIVDLLFKTNRKVTVKQLKEDYFKKIECFDSVEISGVEDRFNASLGTYHDLLKIIKDKDFLDNEENEDILEDIVLTLTLFEDREMIEERLKTYAHLFDDKVMKQLKRRRYTGWGRLSRKLINGIRDKQSGKTILDFLKSDGFANRNFMQLIHDDSLTFKEDIQKAQVSGQGDSLHEHIANLAGSPAIKKGILQTVKVVDELVKVMGRHKPENIVIEMARENQTTQKGQKNSRERMKRIEEGIKELGSQILKEHPVENTQLQNEKLYLYYLQNGRDMYVDQELDINRLSDYDVDHIVPQSFLKDDSIDNKVLTRSDKARGKSDNVPSEEVVKKMKNYWRQLLNAKLITQRKFDNLTKAERGGLSELDKAGFIKRQLVETRQITKHVAQILDSRMNTKYDENDKLIREVKVITLKSKLVSDFRKDFQFYKVREINNYHHAHDAYLNAVVGTALIKKYPKLESEFVYGDYKVYDVRKMIAKSEQEIGKATAKYFFYSNIMNFFKTEITLANGEIRKRPLIETNGETGEIVWDKGRDFATVRKVLSMPQVNIVKKTEVQTGGFSKESILPKRNSDKLIARKKDWDPKKYGGFDSPTVAYSVLVVAKVEKGKSKKLKSVKELLGITIMERSSFEKNPIDFLEAKGYKEVKKDLIIKLPKYSLFELENGRKRMLASAGELQKGNELALPSKYVNFLYLASHYEKLKGSPEDNEQKQLFVEQHKHYLDEIIEQISEFSKRVILADANLDKVLSAYNKHRDKPIREQAENIIHLFTLTNLGAPAAFKYFDTTIDRKRYTSTKEVLDATLIHQSITGLYETRIDLSQLGGDGGGGSPAPEAAAKGGLLGRDLLTKLKAQIQFSTEGPQVTWEDRPAMCLVLNLEEEYRLHEKPVPPSIDPSWLQLFPMVWAEKAGMGLANQVPPVVVELKSDASPVAVRQYPMSKEAREGIRPHIQRFLDLGILVPCQSPWNTPLLPVKKPGTNDYRPVQDLREVNKRVQDIHPTVPNPYNLLSSLPPSHTWYSVLDLKDAFFCLKLHPNSQPLFAFEWRDPEKGNTGQLTWTRLPQGFKNSPTLFNEALHRDLASFRALNPQVVMLQYVDDLLVAAPTYRDCKEGTRRLLQELSKLGYRVSAKKAQLCREEVTYLGYLLKGGKRWLTPARKATVMKIPTPTTPRQVREFLGTAGFCRLWIPGFASLAAPLYPLTRPKVPFTWTEAHQEAFGRIKEALLSAPALALPDLTKPFALYVDEKEGVARGVLTQTLGPWRRPVAYLSKKLDPVASGWPTCLKAIAAVALLLKDADKLTLGQNVLVIAPHNLESIVRQPPDRWMTNARMTHYQSLLLNERVSFAPPAILNPATLLPVESDDTPIHICSEILAEETGTRPDLRDQPLPGVPAWYTDGSSFIMDGRRQAGAAIVDNKRTVWASNLPEGTSAQKAELIALTQALRLAEGKSINIYTDSRYAFATAHVHGAIYKQRGWLTSAGKDIKNKEEILALLEAIHLPKRVAIIHCPGHQRGTDPVATGNRKADEAAKQAAQSTRILTETTKNAGKRTADGSEFEKRTADGSEFESPKKKAKVE

SEQ ID NO: 1621 - protein, 2146 aa, synthetic construct
MPAAKRVKLDGGDKKYSIGLDIGTNSVGWAVITDEYKVPSKKFKVLGNTDRHSIKKNLIGALLFDSGETAEATRLKRTARRRYTRRKNRICYLQEIFSNEMAKVDDSFFHRLEESFLVEEDKKHERHPIFGNIVDEVAYHEKYPTIYHLRKKLVDSTDKADLRLIYLALAHMIKFRGHFLIEGDLNPDNSDVDKLFIQLVQTYNQLFEENPINASGVDAKAILSARLSKSRRLENLIAQLPGEKKNGLFGNLIALSLGLTPNFKSNFDLAEDAKLQLSKDTYDDDLDNLLAQIGDQYADLFLAAKNLSDAILLSDILRVNTEITKAPLSASMIKRYDEHHQDLTLLKALVRQQLPEKYKEIFFDQSKNGYAGYIDGGASQEEFYKFIKPILEKMDGTEELLVKLNREDLLRKQRTFDNGSIPHQIHLGELHAILRRQEDFYPFLKDNREKIEKILTFRIPYYVGPLARGNSRFAWMTRKSEETITPWNFEEVVDKGASAQSFIERMTNFDKNLPNEKVLPKHSLLYEYFTVYNELTKVKYVTEGMRKPAFLSGEQKKAIVDLLFKTNRKVTVKQLKEDYFKKIECFDSVEISGVEDRFNASLGTYHDLLKIIKDKDFLDNEENEDILEDIVLTLTLFEDREMIEERLKTYAHLFDDKVMKQLKRRRYTGWGRLSRKLINGIRDKQSGKTILDFLKSDGFANRNFMQLIHDDSLTFKEDIQKAQVSGQGDSLHEHIANLAGSPAIKKGILQTVKVVDELVKVMGRHKPENIVIEMARENQTTQKGQKNSRERMKRIEEGIKELGSQILKEHPVENTQLQNEKLYLYYLQNGRDMYVDQELDINRLSDYDVDHIVPQSFLKDDSIDNKVLTRSDKARGKSDNVPSEEVVKKMKNYWRQLLNAKLITQRKFDNLTKAERGGLSELDKAGFIKRQLVETRQITKHVAQILDSRMNTKYDENDKLIREVKVITLKSKLVSDFRKDFQFYKVREINNYHHAHDAYLNAVVGTALIKKYPKLESEFVYGDYKVYDVRKMIAKSEQEIGKATAKYFFYSNIMNFFKTEITLANGEIRKRPLIETNGETGEIVWDKGRDFATVRKVLSMPQVNIVKKTEVQTGGFSKESILPKRNSDKLIARKKDWDPKKYGGFDSPTVAYSVLVVAKVEKGKSKKLKSVKELLGITIMERSSFEKNPIDFLEAKGYKEVKKDLIIKLPKYSLFELENGRKRMLASAGELQKGNELALPSKYVNFLYLASHYEKLKGSPEDNEQKQLFVEQHKHYLDEIIEQISEFSKRVILADANLDKVLSAYNKHRDKPIREQAENIIHLFTLTNLGAPAAFKYFDTTIDRKRYTSTKEVLDATLIHQSITGLYETRIDLSQLGGDGGEAAAKEAAAKEAAAKEAAAKEAAAKEAAAKGGLLGRDLLTKLKAQIQFSTEGPQVTWEDRPAMCLVLNLEEEYRLHEKPVPPSIDPSWLQLFPMVWAEKAGMGLANQVPPVVVELKSDASPVAVRQYPMSKEAREGIRPHIQRFLDLGILVPCQSPWNTPLLPVKKPGTNDYRPVQDLREVNKRVQDIHPTVPNPYNLLSSLPPSHTWYSVLDLKDAFFCLKLHPNSQPLFAFEWRDPEKGNTGQLTWTRLPQGFKNSPTLFNEALHRDLASFRALNPQVVMLQYVDDLLVAAPTYRDCKEGTRRLLQELSKLGYRVSAKKAQLCREEVTYLGYLLKGGKRWLTPARKATVMKIPTPTTPRQVREFLGTAGFCRLWIPGFASLAAPLYPLTRPKVPFTWTEAHQEAFGRIKEALLSAPALALPDLTKPFALYVDEKEGVARGVLTQTLGPWRRPVAYLSKKLDPVASGWPTCLKAIAAVALLLKDADKLTLGQNVLVIAPHNLESIVRQPPDRWMTNARMTHYQSLLLNERVSFAPPAILNPATLLPVESDDTPIHICSEILAEETGTRPDLRDQPLPGVPAWYTDGSSFIMDGRRQAGAAIVDNKRTVWASNLPEGTSAQKAELIALTQALRLAEGKSINIYTDSRYAFATAHVHGAIYKQRGWLTSAGKDIKNKEEILALLEAIHLPKRVAIIHCPGHQRGTDPVATGNRKADEAAKQAAQSTRILTETTKNAGKRTADGSEFEKRTADGSEFESPKKKAKVE

SEQ ID NO: 1622 - protein, 2162 aa, synthetic construct
MPAAKRVKLDGGDKKYSIGLDIGTNSVGWAVITDEYKVPSKKFKVLGNTDRHSIKKNLIGALLFDSGETAEATRLKRTARRRYTRRKNRICYLQEIFSNEMAKVDDSFFHRLEESFLVEEDKKHERHPIFGNIVDEVAYHEKYPTIYHLRKKLVDSTDKADLRLIYLALAHMIKFRGHFLIEGDLNPDNSDVDKLFIQLVQTYNQLFEENPINASGVDAKAILSARLSKSRRLENLIAQLPGEKKNGLFGNLIALSLGLTPNFKSNFDLAEDAKLQLSKDTYDDDLDNLLAQIGDQYADLFLAAKNLSDAILLSDILRVNTEITKAPLSASMIKRYDEHHQDLTLLKALVRQQLPEKYKEIFFDQSKNGYAGYIDGGASQEEFYKFIKPILEKMDGTEELLVKLNREDLLRKQRTFDNGSIPHQIHLGELHAILRRQEDFYPFLKDNREKIEKILTFRIPYYVGPLARGNSRFAWMTRKSEETITPWNFEEVVDKGASAQSFIERMTNFDKNLPNEKVLPKHSLLYEYFTVYNELTKVKYVTEGMRKPAFLSGEQKKAIVDLLFKTNRKVTVKQLKEDYFKKIECFDSVEISGVEDRFNASLGTYHDLLKIIKDKDFLDNEENEDILEDIVLTLTLFEDREMIEERLKTYAHLFDDKVMKQLKRRRYTGWGRLSRKLINGIRDKQSGKTILDFLKSDGFANRNFMQLIHDDSLTFKEDIQKAQVSGQGDSLHEHIANLAGSPAIKKGILQTVKVVDELVKVMGRHKPENIVIEMARENQTTQKGQKNSRERMKRIEEGIKELGSQILKEHPVENTQLQNEKLYLYYLQNGRDMYVDQELDINRLSDYDVDHIVPQSFLKDDSIDNKVLTRSDKARGKSDNVPSEEVVKKMKNYWRQLLNAKLITQRKFDNLTKAERGGLSELDKAGFIKRQLVETRQITKHVAQILDSRMNTKYDENDKLIREVKVITLKSKLVSDFRKDFQFYKVREINNYHHAHDAYLNAVVGTALIKKYPKLESEFVYGDYKVYDVRKMIAKSEQEIGKATAKYFFYSNIMNFFKTEITLANGEIRKRPLIETNGETGEIVWDKGRDFATVRKVLSMPQVNIVKKTEVQTGGFSKESILPKRNSDKLIARKKDWDPKKYGGFDSPTVAYSVLVVAKVEKGKSKKLKSVKELLGITIMERSSFEKNPIDFLEAKGYKEVKKDLIIKLPKYSLFELENGRKRMLASAGELQKGNELALPSKYVNFLYLASHYEKLKGSPEDNEQKQLFVEQHKHYLDEIIEQISEFSKRVILADANLDKVLSAYNKHRDKPIREQAENIIHLFTLTNLGAPAAFKYFDTTIDRKRYTSTKEVLDATLIHQSITGLYETRIDLSQLGGDGGAEAAAKEAAAKEAAAKEAAAKALEAEAAAKEAAAKEAAAKEAAAKAGGLLGRDLLTKLKAQIQFSTEGPQVTWEDRPAMCLVLNLEEEYRLHEKPVPPSIDPSWLQLFPMVWAEKAGMGLANQVPPVVVELKSDASPVAVRQYPMSKEAREGIRPHIQRFLDLGILVPCQSPWNTPLLPVKKPGTNDYRPVQDLREVNKRVQDIHPTVPNPYNLLSSLPPSHTWYSVLDLKDAFFCLKLHPNSQPLFAFEWRDPEKGNTGQLTWTRLPQGFKNSPTLFNEALHRDLASFRALNPQVVMLQYVDDLLVAAPTYRDCKEGTRRLLQELSKLGYRVSAKKAQLCREEVTYLGYLLKGGKRWLTPARKATVMKIPTPTTPRQVREFLGTAGFCRLWIPGFASLAAPLYPLTRPKVPFTWTEAHQEAFGRIKEALLSAPALALPDLTKPFALYVDEKEGVARGVLTQTLGPWRRPVAYLSKKLDPVASGWPTCLKAIAAVALLLKDADKLTLGQNVLVIAPHNLESIVRQPPDRWMTNARMTHYQSLLLNERVSFAPPAILNPATLLPVESDDTPIHICSEILAEETGTRPDLRDQPLPGVPAWYTDGSSFIMDGRRQAGAAIVDNKRTVWASNLPEGTSAQKAELIALTQALRLAEGKSINIYTDSRYAFATAHVHGAIYKQRGWLTSAGKDIKNKEEILALLEAIHLPKRVAIIHCPGHQRGTDPVATGNRKADEAAKQAAQSTRILTETTKNAGKRTADGSEFEKRTADGSEFESPKKKAKVE

SEQ ID NO: 1623 - protein, 2127 aa, synthetic construct
MPAAKRVKLDGGDKKYSIGLDIGTNSVGWAVITDEYKVPSKKFKVLGNTDRHSIKKNLIGALLFDSGETAEATRLKRTARRRYTRRKNRICYLQEIFSNEMAKVDDSFFHRLEESFLVEEDKKHERHPIFGNIVDEVAYHEKYPTIYHLRKKLVDSTDKADLRLIYLALAHMIKFRGHFLIEGDLNPDNSDVDKLFIQLVQTYNQLFEENPINASGVDAKAILSARLSKSRRLENLIAQLPGEKKNGLFGNLIALSLGLTPNFKSNFDLAEDAKLQLSKDTYDDDLDNLLAQIGDQYADLFLAAKNLSDAILLSDILRVNTEITKAPLSASMIKRYDEHHQDLTLLKALVRQQLPEKYKEIFFDQSKNGYAGYIDGGASQEEFYKFIKPILEKMDGTEELLVKLNREDLLRKQRTFDNGSIPHQIHLGELHAILRRQEDFYPFLKDNREKIEKILTFRIPYYVGPLARGNSRFAWMTRKSEETITPWNFEEVVDKGASAQSFIERMTNFDKNLPNEKVLPKHSLLYEYFTVYNELTKVKYVTEGMRKPAFLSGEQKKAIVDLLFKTNRKVTVKQLKEDYFKKIECFDSVEISGVEDRFNASLGTYHDLLKIIKDKDFLDNEENEDILEDIVLTLTLFEDREMIEERLKTYAHLFDDKVMKQLKRRRYTGWGRLSRKLINGIRDKQSGKTILDFLKSDGFANRNFMQLIHDDSLTFKEDIQKAQVSGQGDSLHEHIANLAGSPAIKKGILQTVKVVDELVKVMGRHKPENIVIEMARENQTTQKGQKNSRERMKRIEEGIKELGSQILKEHPVENTQLQNEKLYLYYLQNGRDMYVDQELDINRLSDYDVDHIVPQSFLKDDSIDNKVLTRSDKARGKSDNVPSEEVVKKMKNYWRQLLNAKLITQRKFDNLTKAERGGLSELDKAGFIKRQLVETRQITKHVAQILDSRMNTKYDENDKLIREVKVITLKSKLVSDFRKDFQFYKVREINNYHHAHDAYLNAVVGTALIKKYPKLESEFVYGDYKVYDVRKMIAKSEQEIGKATAKYFFYSNIMNFFKTEITLANGEIRKRPLIETNGETGEIVWDKGRDFATVRKVLSMPQVNIVKKTEVQTGGFSKESILPKRNSDKLIARKKDWDPKKYGGFDSPTVAYSVLVVAKVEKGKSKKLKSVKELLGITIMERSSFEKNPIDFLEAKGYKEVKKDLIIKLPKYSLFELENGRKRMLASAGELQKGNELALPSKYVNFLYLASHYEKLKGSPEDNEQKQLFVEQHKHYLDEIIEQISEFSKRVILADANLDKVLSAYNKHRDKPIREQAENIIHLFTLTNLGAPAAFKYFDTTIDRKRYTSTKEVLDATLIHQSITGLYETRIDLSQLGGDGGGSSEAAAKGGSGGLLGRDLLTKLKAQIQFSTEGPQVTWEDRPAMCLVLNLEEEYRLHEKPVPPSIDPSWLQLFPMVWAEKAGMGLANQVPPVVVELKSDASPVAVRQYPMSKEAREGIRPHIQRFLDLGILVPCQSPWNTPLLPVKKPGTNDYRPVQDLREVNKRVQDIHPTVPNPYNLLSSLPPSHTWYSVLDLKDAFFCLKLHPNSQPLFAFEWRDPEKGNTGQLTWTRLPQGFKNSPTLFNEALHRDLASFRALNPQVVMLQYVDDLLVAAPTYRDCKEGTRRLLQELSKLGYRVSAKKAQLCREEVTYLGYLLKGGKRWLTPARKATVMKIPTPTTPRQVREFLGTAGFCRLWIPGFASLAAPLYPLTRPKVPFTWTEAHQEAFGRIKEALLSAPALALPDLTKPFALYVDEKEGVARGVLTQTLGPWRRPVAYLSKKLDPVASGWPTCLKAIAAVALLLKDADKLTLGQNVLVIAPHNLESIVRQPPDRWMTNARMTHYQSLLLNERVSFAPPAILNPATLLPVESDDTPIHICSEILAEETGTRPDLRDQPLPGVPAWYTDGSSFIMDGRRQAGAAIVDNKRTVWASNLPEGTSAQKAELIALTQALRLAEGKSINIYTDSRYAFATAHVHGAIYKQRGWLTSAGKDIKNKEEILALLEAIHLPKRVAIIHCPGHQRGTDPVATGNRKADEAAKQAAQSTRILTETTKNAGKRTADGSEFEKRTADGSEFESPKKKAKVE

SEQ ID NO: 1624 - protein, 2127 aa, synthetic construct
MPAAKRVKLDGGDKKYSIGLDIGTNSVGWAVITDEYKVPSKKFKVLGNTDRHSIKKNLIGALLFDSGETAEATRLKRTARRRYTRRKNRICYLQEIFSNEMAKVDDSFFHRLEESFLVEEDKKHERHPIFGNIVDEVAYHEKYPTIYHLRKKLVDSTDKADLRLIYLALAHMIKFRGHFLIEGDLNPDNSDVDKLFIQLVQTYNQLFEENPINASGVDAKAILSARLSKSRRLENLIAQLPGEKKNGLFGNLIALSLGLTPNFKSNFDLAEDAKLQLSKDTYDDDLDNLLAQIGDQYADLFLAAKNLSDAILLSDILRVNTEITKAPLSASMIKRYDEHHQDLTLLKALVRQQLPEKYKEIFFDQSKNGYAGYIDGGASQEEFYKFIKPILEKMDGTEELLVKLNREDLLRKQRTFDNGSIPHQIHLGELHAILRRQEDFYPFLKDNREKIEKILTFRIPYYVGPLARGNSRFAWMTRKSEETITPWNFEEVVDKGASAQSFIERMTNFDKNLPNEKVLPKHSLLYEYFTVYNELTKVKYVTEGMRKPAFLSGEQKKAIVDLLFKTNRKVTVKQLKEDYFKKIECFDSVEISGVEDRFNASLGTYHDLLKIIKDKDFLDNEENEDILEDIVLTLTLFEDREMIEERLKTYAHLFDDKVMKQLKRRRYTGWGRLSRKLINGIRDKQSGKTILDFLKSDGFANRNFMQLIHDDSLTFKEDIQKAQVSGQGDSLHEHIANLAGSPAIKKGILQTVKVVDELVKVMGRHKPENIVIEMARENQTTQKGQKNSRERMKRIEEGIKELGSQILKEHPVENTQLQNEKLYLYYLQNGRDMYVDQELDINRLSDYDVDHIVPQSFLKDDSIDNKVLTRSDKARGKSDNVPSEEVVKKMKNYWRQLLNAKLITQRKFDNLTKAERGGLSELDKAGFIKRQLVETRQITKHVAQILDSRMNTKYDENDKLIREVKVITLKSKLVSDFRKDFQFYKVREINNYHHAHDAYLNAVVGTALIKKYPKLESEFVYGDYKVYDVRKMIAKSEQEIGKATAKYFFYSNIMNFFKTEITLANGEIRKRPLIETNGETGEIVWDKGRDFATVRKVLSMPQVNIVKKTEVQTGGFSKESILPKRNSDKLIARKKDWDPKKYGGFDSPTVAYSVLVVAKVEKGKSKKLKSVKELLGITIMERSSFEKNPIDFLEAKGYKEVKKDLIIKLPKYSLFELENGRKRMLASAGELQKGNELALPSKYVNFLYLASHYEKLKGSPEDNEQKQLFVEQHKHYLDEIIEQISEFSKRVILADANLDKVLSAYNKHRDKPIREQAENIIHLFTLTNLGAPAAFKYFDTTIDRKRYTSTKEVLDATLIHQSITGLYETRIDLSQLGGDGGEAAAKGSSPAPGGLLGRDLLTKLKAQIQFSTEGPQVTWEDRPAMCLVLNLEEEYRLHEKPVPPSIDPSWLQLFPMVWAEKAGMGLANQVPPVVVELKSDASPVAVRQYPMSKEAREGIRPHIQRFLDLGILVPCQSPWNTPLLPVKKPGTNDYRPVQDLREVNKRVQDIHPTVPNPYNLLSSLPPSHTWYSVLDLKDAFFCLKLHPNSQPLFAFEWRDPEKGNTGQLTWTRLPQGFKNSPTLFNEALHRDLASFRALNPQVVMLQYVDDLLVAAPTYRDCKEGTRRLLQELSKLGYRVSAKKAQLCREEVTYLGYLLKGGKRWLTPARKATVMKIPTPTTPRQVREFLGTAGFCRLWIPGFASLAAPLYPLTRPKVPFTWTEAHQEAFGRIKEALLSAPALALPDLTKPFALYVDEKEGVARGVLTQTLGPWRRPVAYLSKKLDPVASGWPTCLKAIAAVALLLKDADKLTLGQNVLVIAPHNLESIVRQPPDRWMTNARMTHYQSLLLNERVSFAPPAILNPATLLPVESDDTPIHICSEILAEETGTRPDLRDQPLPGVPAWYTDGSSFIMDGRRQAGAAIVDNKRTVWASNLPEGTSAQKAELIALTQALRLAEGKSINIYTDSRYAFATAHVHGAIYKQRGWLTSAGKDIKNKEEILALLEAIHLPKRVAIIHCPGHQRGTDPVATGNRKADEAAKQAAQSTRILTETTKNAGKRTADGSEFEKRTADGSEFESPKKKAKVE

SEQ ID NO: 1625 - protein, 2122 aa, synthetic construct
MPAAKRVKLDGGDKKYSIGLDIGTNSVGWAVITDEYKVPSKKFKVLGNTDRHSIKKNLIGALLFDSGETAEATRLKRTARRRYTRRKNRICYLQEIFSNEMAKVDDSFFHRLEESFLVEEDKKHERHPIFGNIVDEVAYHEKYPTIYHLRKKLVDSTDKADLRLIYLALAHMIKFRGHFLIEGDLNPDNSDVDKLFIQLVQTYNQLFEENPINASGVDAKAILSARLSKSRRLENLIAQLPGEKKNGLFGNLIALSLGLTPNFKSNFDLAEDAKLQLSKDTYDDDLDNLLAQIGDQYADLFLAAKNLSDAILLSDILRVNTEITKAPLSASMIKRYDEHHQDLTLLKALVRQQLPEKYKEIFFDQSKNGYAGYIDGGASQEEFYKFIKPILEKMDGTEELLVKLNREDLLRKQRTFDNGSIPHQIHLGELHAILRRQEDFYPFLKDNREKIEKILTFRIPYYVGPLARGNSRFAWMTRKSEETITPWNFEEVVDKGASAQSFIERMTNFDKNLPNEKVLPKHSLLYEYFTVYNELTKVKYVTEGMRKPAFLSGEQKKAIVDLLFKTNRKVTVKQLKEDYFKKIECFDSVEISGVEDRFNASLGTYHDLLKIIKDKDFLDNEENEDILEDIVLTLTLFEDREMIEERLKTYAHLFDDKVMKQLKRRRYTGWGRLSRKLINGIRDKQSGKTILDFLKSDGFANRNFMQLIHDDSLTFKEDIQKAQVSGQGDSLHEHIANLAGSPAIKKGILQTVKVVDELVKVMGRHKPENIVIEMARENQTTQKGQKNSRERMKRIEEGIKELGSQILKEHPVENTQLQNEKLYLYYLQNGRDMYVDQELDINRLSDYDVDHIVPQSFLKDDSIDNKVLTRSDKARGKSDNVPSEEVVKKMKNYWRQLLNAKLITQRKFDNLTKAERGGLSELDKAGFIKRQLVETRQITKHVAQILDSRMNTKYDENDKLIREVKVITLKSKLVSDFRKDFQFYKVREINNYHHAHDAYLNAVVGTALIKKYPKLESEFVYGDYKVYDVRKMIAKSEQEIGKATAKYFFYSNIMNFFKTEITLANGEIRKRPLIETNGETGEIVWDKGRDFATVRKVLSMPQVNIVKKTEVQTGGFSKESILPKRNSDKLIARKKDWDPKKYGGFDSPTVAYSVLVVAKVEKGKSKKLKSVKELLGITIMERSSFEKNPIDFLEAKGYKEVKKDLIIKLPKYSLFELENGRKRMLASAGELQKGNELALPSKYVNFLYLASHYEKLKGSPEDNEQKQLFVEQHKHYLDEIIEQISEFSKRVILADANLDKVLSAYNKHRDKPIREQAENIIHLFTLTNLGAPAAFKYFDTTIDRKRYTSTKEVLDATLIHQSITGLYETRIDLSQLGGDGGGSSGSSGGLLGRDLLTKLKAQIQFSTEGPQVTWEDRPAMCLVLNLEEEYRLHEKPVPPSIDPSWLQLFPMVWAEKAGMGLANQVPPVVVELKSDASPVAVRQYPMSKEAREGIRPHIQRFLDLGILVPCQSPWNTPLLPVKKPGTNDYRPVQDLREVNKRVQDIHPTVPNPYNLLSSLPPSHTWYSVLDLKDAFFCLKLHPNSQPLFAFEWRDPEKGNTGQLTWTRLPQGFKNSPTLFNEALHRDLASFRALNPQVVMLQYVDDLLVAAPTYRDCKEGTRRLLQELSKLGYRVSAKKAQLCREEVTYLGYLLKGGKRWLTPARKATVMKIPTPTTPRQVREFLGTAGFCRLWIPGFASLAAPLYPLTRPKVPFTWTEAHQEAFGRIKEALLSAPALALPDLTKPFALYVDEKEGVARGVLTQTLGPWRRPVAYLSKKLDPVASGWPTCLKAIAAVALLLKDADKLTLGQNVLVIAPHNLESIVRQPPDRWMTNARMTHYQSLLLNERVSFAPPAILNPATLLPVESDDTPIHICSEILAEETGTRPDLRDQPLPGVPAWYTDGSSFIMDGRRQAGAAIVDNKRTVWASNLPEGTSAQKAELIALTQALRLAEGKSINIYTDSRYAFATAHVHGAIYKQRGWLTSAGKDIKNKEEILALLEAIHLPKRVAIIHCPGHQRGTDPVATGNRKADEAAKQAAQSTRILTETTKNAGKRTADGSEFEKRTADGSEFESPKKKAKVE

SEQ ID NO: 1626 - protein, 2122 aa, synthetic construct
MPAAKRVKLDGGDKKYSIGLDIGTNSVGWAVITDEYKVPSKKFKVLGNTDRHSIKKNLIGALLFDSGETAEATRLKRTARRRYTRRKNRICYLQEIFSNEMAKVDDSFFHRLEESFLVEEDKKHERHPIFGNIVDEVAYHEKYPTIYHLRKKLVDSTDKADLRLIYLALAHMIKFRGHFLIEGDLNPDNSDVDKLFIQLVQTYNQLFEENPINASGVDAKAILSARLSKSRRLENLIAQLPGEKKNGLFGNLIALSLGLTPNFKSNFDLAEDAKLQLSKDTYDDDLDNLLAQIGDQYADLFLAAKNLSDAILLSDILRVNTEITKAPLSASMIKRYDEHHQDLTLLKALVRQQLPEKYKEIFFDQSKNGYAGYIDGGASQEEFYKFIKPILEKMDGTEELLVKLNREDLLRKQRTFDNGSIPHQIHLGELHAILRRQEDFYPFLKDNREKIEKILTFRIPYYVGPLARGNSRFAWMTRKSEETITPWNFEEVVDKGASAQSFIERMTNFDKNLPNEKVLPKHSLLYEYFTVYNELTKVKYVTEGMRKPAFLSGEQKKAIVDLLFKTNRKVTVKQLKEDYFKKIECFDSVEISGVEDRFNASLGTYHDLLKIIKDKDFLDNEENEDILEDIVLTLTLFEDREMIEERLKTYAHLFDDKVMKQLKRRRYTGWGRLSRKLINGIRDKQSGKTILDFLKSDGFANRNFMQLIHDDSLTFKEDIQKAQVSGQGDSLHEHIANLAGSPAIKKGILQTVKVVDELVKVMGRHKPENIVIEMARENQTTQKGQKNSRERMKRIEEGIKELGSQILKEHPVENTQLQNEKLYLYYLQNGRDMYVDQELDINRLSDYDVDHIVPQSFLKDDSIDNKVLTRSDKARGKSDNVPSEEVVKKMKNYWRQLLNAKLITQRKFDNLTKAERGGLSELDKAGFIKRQLVETRQITKHVAQILDSRMNTKYDENDKLIREVKVITLKSKLVSDFRKDFQFYKVREINNYHHAHDAYLNAVVGTALIKKYPKLESEFVYGDYKVYDVRKMIAKSEQEIGKATAKYFFYSNIMNFFKTEITLANGEIRKRPLIETNGETGEIVWDKGRDFATVRKVLSMPQVNIVKKTEVQTGGFSKESILPKRNSDKLIARKKDWDPKKYGGFDSPTVAYSVLVVAKVEKGKSKKLKSVKELLGITIMERSSFEKNPIDFLEAKGYKEVKKDLIIKLPKYSLFELENGRKRMLASAGELQKGNELALPSKYVNFLYLASHYEKLKGSPEDNEQKQLFVEQHKHYLDEIIEQISEFSKRVILADANLDKVLSAYNKHRDKPIREQAENIIHLFTLTNLGAPAAFKYFDTTIDRKRYTSTKEVLDATLIHQSITGLYETRIDLSQLGGDGGGGSGGGGGLLGRDLLTKLKAQIQFSTEGPQVTWEDRPAMCLVLNLEEEYRLHEKPVPPSIDPSWLQLFPMVWAEKAGMGLANQVPPVVVELKSDASPVAVRQYPMSKEAREGIRPHIQRFLDLGILVPCQSPWNTPLLPVKKPGTNDYRPVQDLREVNKRVQDIHPTVPNPYNLLSSLPPSHTWYSVLDLKDAFFCLKLHPNSQPLFAFEWRDPEKGNTGQLTWTRLPQGFKNSPTLFNEALHRDLASFRALNPQVVMLQYVDDLLVAAPTYRDCKEGTRRLLQELSKLGYRVSAKKAQLCREEVTYLGYLLKGGKRWLTPARKATVMKIPTPTTPRQVREFLGTAGFCRLWIPGFASLAAPLYPLTRPKVPFTWTEAHQEAFGRIKEALLSAPALALPDLTKPFALYVDEKEGVARGVLTQTLGPWRRPVAYLSKKLDPVASGWPTCLKAIAAVALLLKDADKLTLGQNVLVIAPHNLESIVRQPPDRWMTNARMTHYQSLLLNERVSFAPPAILNPATLLPVESDDTPIHICSEILAEETGTRPDLRDQPLPGVPAWYTDGSSFIMDGRRQAGAAIVDNKRTVWASNLPEGTSAQKAELIALTQALRLAEGKSINIYTDSRYAFATAHVHGAIYKQRGWLTSAGKDIKNKEEILALLEAIHLPKRVAIIHCPGHQRGTDPVATGNRKADEAAKQAAQSTRILTETTKNAGKRTADGSEFEKRTADGSEFESPKKKAKVE

SEQ ID NO: 1627 - protein, 2122 aa, synthetic construct
MPAAKRVKLDGGDKKYSIGLDIGTNSVGWAVITDEYKVPSKKFKVLGNTDRHSIKKNLIGALLFDSGETAEATRLKRTARRRYTRRKNRICYLQEIFSNEMAKVDDSFFHRLEESFLVEEDKKHERHPIFGNIVDEVAYHEKYPTIYHLRKKLVDSTDKADLRLIYLALAHMIKFRGHFLIEGDLNPDNSDVDKLFIQLVQTYNQLFEENPINASGVDAKAILSARLSKSRRLENLIAQLPGEKKNGLFGNLIALSLGLTPNFKSNFDLAEDAKLQLSKDTYDDDLDNLLAQIGDQYADLFLAAKNLSDAILLSDILRVNTEITKAPLSASMIKRYDEHHQDLTLLKALVRQQLPEKYKEIFFDQSKNGYAGYIDGGASQEEFYKFIKPILEKMDGTEELLVKLNREDLLRKQRTFDNGSIPHQIHLGELHAILRRQEDFYPFLKDNREKIEKILTFRIPYYVGPLARGNSRFAWMTRKSEETITPWNFEEVVDKGASAQSFIERMTNFDKNLPNEKVLPKHSLLYEYFTVYNELTKVKYVTEGMRKPAFLSGEQKKAIVDLLFKTNRKVTVKQLKEDYFKKIECFDSVEISGVEDRFNASLGTYHDLLKIIKDKDFLDNEENEDILEDIVLTLTLFEDREMIEERLKTYAHLFDDKVMKQLKRRRYTGWGRLSRKLINGIRDKQSGKTILDFLKSDGFANRNFMQLIHDDSLTFKEDIQKAQVSGQGDSLHEHIANLAGSPAIKKGILQTVKVVDELVKVMGRHKPENIVIEMARENQTTQKGQKNSRERMKRIEEGIKELGSQILKEHPVENTQLQNEKLYLYYLQNGRDMYVDQELDINRLSDYDVDHIVPQSFLKDDSIDNKVLTRSDKARGKSDNVPSEEVVKKMKNYWRQLLNAKLITQRKFDNLTKAERGGLSELDKAGFIKRQLVETRQITKHVAQILDSRMNTKYDENDKLIREVKVITLKSKLVSDFRKDFQFYKVREINNYHHAHDAYLNAVVGTALIKKYPKLESEFVYGDYKVYDVRKMIAKSEQEIGKATAKYFFYSNIMNFFKTEITLANGEIRKRPLIETNGETGEIVWDKGRDFATVRKVLSMPQVNIVKKTEVQTGGFSKESILPKRNSDKLIARKKDWDPKKYGGFDSPTVAYSVLVVAKVEKGKSKKLKSVKELLGITIMERSSFEKNPIDFLEAKGYKEVKKDLIIKLPKYSLFELENGRKRMLASAGELQKGNELALPSKYVNFLYLASHYEKLKGSPEDNEQKQLFVEQHKHYLDEIIEQISEFSKRVILADANLDKVLSAYNKHRDKPIREQAENIIHLFTLTNLGAPAAFKYFDTTIDRKRYTSTKEVLDATLIHQSITGLYETRIDLSQLGGDGGPAPGSSGGLLGRDLLTKLKAQIQFSTEGPQVTWEDRPAMCLVLNLEEEYRLHEKPVPPSIDPSWLQLFPMVWAEKAGMGLANQVPPVVVELKSDASPVAVRQYPMSKEAREGIRPHIQRFLDLGILVPCQSPWNTPLLPVKKPGTNDYRPVQDLREVNKRVQDIHPTVPNPYNLLSSLPPSHTWYSVLDLKDAFFCLKLHPNSQPLFAFEWRDPEKGNTGQLTWTRLPQGFKNSPTLFNEALHRDLASFRALNPQVVMLQYVDDLLVAAPTYRDCKEGTRRLLQELSKLGYRVSAKKAQLCREEVTYLGYLLKGGKRWLTPARKATVMKIPTPTTPRQVREFLGTAGFCRLWIPGFASLAAPLYPLTRPKVPFTWTEAHQEAFGRIKEALLSAPALALPDLTKPFALYVDEKEGVARGVLTQTLGPWRRPVAYLSKKLDPVASGWPTCLKAIAAVALLLKDADKLTLGQNVLVIAPHNLESIVRQPPDRWMTNARMTHYQSLLLNERVSFAPPAILNPATLLPVESDDTPIHICSEILAEETGTRPDLRDQPLPGVPAWYTDGSSFIMDGRRQAGAAIVDNKRTVWASNLPEGTSAQKAELIALTQALRLAEGKSINIYTDSRYAFATAHVHGAIYKQRGWLTSAGKDIKNKEEILALLEAIHLPKRVAIIHCPGHQRGTDPVATGNRKADEAAKQAAQSTRILTETTKNAGKRTADGSEFEKRTADGSEFESPKKKAKVE

SEQ ID NO: 1628 - protein, 2122 aa, synthetic construct
MPAAKRVKLDGGDKKYSIGLDIGTNSVGWAVITDEYKVPSKKFKVLGNTDRHSIKKNLIGALLFDSGETAEATRLKRTARRRYTRRKNRICYLQEIFSNEMAKVDDSFFHRLEESFLVEEDKKHERHPIFGNIVDEVAYHEKYPTIYHLRKKLVDSTDKADLRLIYLALAHMIKFRGHFLIEGDLNPDNSDVDKLFIQLVQTYNQLFEENPINASGVDAKAILSARLSKSRRLENLIAQLPGEKKNGLFGNLIALSLGLTPNFKSNFDLAEDAKLQLSKDTYDDDLDNLLAQIGDQYADLFLAAKNLSDAILLSDILRVNTEITKAPLSASMIKRYDEHHQDLTLLKALVRQQLPEKYKEIFFDQSKNGYAGYIDGGASQEEFYKFIKPILEKMDGTEELLVKLNREDLLRKQRTFDNGSIPHQIHLGELHAILRRQEDFYPFLKDNREKIEKILTFRIPYYVGPLARGNSRFAWMTRKSEETITPWNFEEVVDKGASAQSFIERMTNFDKNLPNEKVLPKHSLLYEYFTVYNELTKVKYVTEGMRKPAFLSGEQKKAIVDLLFKTNRKVTVKQLKEDYFKKIECFDSVEISGVEDRFNASLGTYHDLLKIIKDKDFLDNEENEDILEDIVLTLTLFEDREMIEERLKTYAHLFDDKVMKQLKRRRYTGWGRLSRKLINGIRDKQSGKTILDFLKSDGFANRNFMQLIHDDSLTFKEDIQKAQVSGQGDSLHEHIANLAGSPAIKKGILQTVKVVDELVKVMGRHKPENIVIEMARENQTTQKGQKNSRERMKRIEEGIKELGSQILKEHPVENTQLQNEKLYLYYLQNGRDMYVDQELDINRLSDYDVDHIVPQSFLKDDSIDNKVLTRSDKARGKSDNVPSEEVVKKMKNYWRQLLNAKLITQRKFDNLTKAERGGLSELDKAGFIKRQLVETRQITKHVAQILDSRMNTKYDENDKLIREVKVITLKSKLVSDFRKDFQFYKVREINNYHHAHDAYLNAVVGTALIKKYPKLESEFVYGDYKVYDVRKMIAKSEQEIGKATAKYFFYSNIMNFFKTEITLANGEIRKRPLIETNGETGEIVWDKGRDFATVRKVLSMPQVNIVKKTEVQTGGFSKESILPKRNSDKLIARKKDWDPKKYGGFDSPTVAYSVLVVAKVEKGKSKKLKSVKELLGITIMERSSFEKNPIDFLEAKGYKEVKKDLIIKLPKYSLFELENGRKRMLASAGELQKGNELALPSKYVNFLYLASHYEKLKGSPEDNEQKQLFVEQHKHYLDEIIEQISEFSKRVILADANLDKVLSAYNKHRDKPIREQAENIIHLFTLTNLGAPAAFKYFDTTIDRKRYTSTKEVLDATLIHQSITGLYETRIDLSQLGGDGGGGGGGGGGLLGRDLLTKLKAQIQFSTEGPQVTWEDRPAMCLVLNLEEEYRLHEKPVPPSIDPSWLQLFPMVWAEKAGMGLANQVPPVVVELKSDASPVAVRQYPMSKEAREGIRPHIQRFLDLGILVPCQSPWNTPLLPVKKPGTNDYRPVQDLREVNKRVQDIHPTVPNPYNLLSSLPPSHTWYSVLDLKDAFFCLKLHPNSQPLFAFEWRDPEKGNTGQLTWTRLPQGFKNSPTLFNEALHRDLASFRALNPQVVMLQYVDDLLVAAPTYRDCKEGTRRLLQELSKLGYRVSAKKAQLCREEVTYLGYLLKGGKRWLTPARKATVMKIPTPTTPRQVREFLGTAGFCRLWIPGFASLAAPLYPLTRPKVPFTWTEAHQEAFGRIKEALLSAPALALPDLTKPFALYVDEKEGVARGVLTQTLGPWRRPVAYLSKKLDPVASGWPTCLKAIAAVALLLKDADKLTLGQNVLVIAPHNLESIVRQPPDRWMTNARMTHYQSLLLNERVSFAPPAILNPATLLPVESDDTPIHICSEILAEETGTRPDLRDQPLPGVPAWYTDGSSFIMDGRRQAGAAIVDNKRTVWASNLPEGTSAQKAELIALTQALRLAEGKSINIYTDSRYAFATAHVHGAIYKQRGWLTSAGKDIKNKEEILALLEAIHLPKRVAIIHCPGHQRGTDPVATGNRKADEAAKQAAQSTRILTETTKNAGKRTADGSEFEKRTADGSEFESPKKKAKVE

SEQ ID NO: 1629 - protein, 2124 aa, synthetic construct
MPAAKRVKLDGGDKKYSIGLDIGTNSVGWAVITDEYKVPSKKFKVLGNTDRHSIKKNLIGALLFDSGETAEATRLKRTARRRYTRRKNRICYLQEIFSNEMAKVDDSFFHRLEESFLVEEDKKHERHPIFGNIVDEVAYHEKYPTIYHLRKKLVDSTDKADLRLIYLALAHMIKFRGHFLIEGDLNPDNSDVDKLFIQLVQTYNQLFEENPINASGVDAKAILSARLSKSRRLENLIAQLPGEKKNGLFGNLIALSLGLTPNFKSNFDLAEDAKLQLSKDTYDDDLDNLLAQIGDQYADLFLAAKNLSDAILLSDILRVNTEITKAPLSASMIKRYDEHHQDLTLLKALVRQQLPEKYKEIFFDQSKNGYAGYIDGGASQEEFYKFIKPILEKMDGTEELLVKLNREDLLRKQRTFDNGSIPHQIHLGELHAILRRQEDFYPFLKDNREKIEKILTFRIPYYVGPLARGNSRFAWMTRKSEETITPWNFEEVVDKGASAQSFIERMTNFDKNLPNEKVLPKHSLLYEYFTVYNELTKVKYVTEGMRKPAFLSGEQKKAIVDLLFKTNRKVTVKQLKEDYFKKIECFDSVEISGVEDRFNASLGTYHDLLKIIKDKDFLDNEENEDILEDIVLTLTLFEDREMIEERLKTYAHLFDDKVMKQLKRRRYTGWGRLSRKLINGIRDKQSGKTILDFLKSDGFANRNFMQLIHDDSLTFKEDIQKAQVSGQGDSLHEHIANLAGSPAIKKGILQTVKVVDELVKVMGRHKPENIVIEMARENQTTQKGQKNSRERMKRIEEGIKELGSQILKEHPVENTQLQNEKLYLYYLQNGRDMYVDQELDINRLSDYDVDHIVPQSFLKDDSIDNKVLTRSDKARGKSDNVPSEEVVKKMKNYWRQLLNAKLITQRKFDNLTKAERGGLSELDKAGFIKRQLVETRQITKHVAQILDSRMNTKYDENDKLIREVKVITLKSKLVSDFRKDFQFYKVREINNYHHAHDAYLNAVVGTALIKKYPKLESEFVYGDYKVYDVRKMIAKSEQEIGKATAKYFFYSNIMNFFKTEITLANGEIRKRPLIETNGETGEIVWDKGRDFATVRKVLSMPQVNIVKKTEVQTGGFSKESILPKRNSDKLIARKKDWDPKKYGGFDSPTVAYSVLVVAKVEKGKSKKLKSVKELLGITIMERSSFEKNPIDFLEAKGYKEVKKDLIIKLPKYSLFELENGRKRMLASAGELQKGNELALPSKYVNFLYLASHYEKLKGSPEDNEQKQLFVEQHKHYLDEIIEQISEFSKRVILADANLDKVLSAYNKHRDKPIREQAENIIHLFTLTNLGAPAAFKYFDTTIDRKRYTSTKEVLDATLIHQSITGLYETRIDLSQLGGDGGGGGEAAAKGGLLGRDLLTKLKAQIQFSTEGPQVTWEDRPAMCLVLNLEEEYRLHEKPVPPSIDPSWLQLFPMVWAEKAGMGLANQVPPVVVELKSDASPVAVRQYPMSKEAREGIRPHIQRFLDLGILVPCQSPWNTPLLPVKKPGTNDYRPVQDLREVNKRVQDIHPTVPNPYNLLSSLPPSHTWYSVLDLKDAFFCLKLHPNSQPLFAFEWRDPEKGNTGQLTWTRLPQGFKNSPTLFNEALHRDLASFRALNPQVVMLQYVDDLLVAAPTYRDCKEGTRRLLQELSKLGYRVSAKKAQLCREEVTYLGYLLKGGKRWLTPARKATVMKIPTPTTPRQVREFLGTAGFCRLWIPGFASLAAPLYPLTRPKVPFTWTEAHQEAFGRIKEALLSAPALALPDLTKPFALYVDEKEGVARGVLTQTLGPWRRPVAYLSKKLDPVASGWPTCLKAIAAVALLLKDADKLTLGQNVLVIAPHNLESIVRQPPDRWMTNARMTHYQSLLLNERVSFAPPAILNPATLLPVESDDTPIHICSEILAEETGTRPDLRDQPLPGVPAWYTDGSSFIMDGRRQAGAAIVDNKRTVWASNLPEGTSAQKAELIALTQALRLAEGKSINIYTDSRYAFATAHVHGAIYKQRGWLTSAGKDIKNKEEILALLEAIHLPKRVAIIHCPGHQRGTDPVATGNRKADEAAKQAAQSTRILTETTKNAGKRTADGSEFEKRTADGSEFESPKKKAKVE

SEQ ID NO: 1630 - protein, 2124 aa, synthetic construct
MPAAKRVKLDGGDKKYSIGLDIGTNSVGWAVITDEYKVPSKKFKVLGNTDRHSIKKNLIGALLFDSGETAEATRLKRTARRRYTRRKNRICYLQEIFSNEMAKVDDSFFHRLEESFLVEEDKKHERHPIFGNIVDEVAYHEKYPTIYHLRKKLVDSTDKADLRLIYLALAHMIKFRGHFLIEGDLNPDNSDVDKLFIQLVQTYNQLFEENPINASGVDAKAILSARLSKSRRLENLIAQLPGEKKNGLFGNLIALSLGLTPNFKSNFDLAEDAKLQLSKDTYDDDLDNLLAQIGDQYADLFLAAKNLSDAILLSDILRVNTEITKAPLSASMIKRYDEHHQDLTLLKALVRQQLPEKYKEIFFDQSKNGYAGYIDGGASQEEFYKFIKPILEKMDGTEELLVKLNREDLLRKQRTFDNGSIPHQIHLGELHAILRRQEDFYPFLKDNREKIEKILTFRIPYYVGPLARGNSRFAWMTRKSEETITPWNFEEVVDKGASAQSFIERMTNFDKNLPNEKVLPKHSLLYEYFTVYNELTKVKYVTEGMRKPAFLSGEQKKAIVDLLFKTNRKVTVKQLKEDYFKKIECFDSVEISGVEDRFNASLGTYHDLLKIIKDKDFLDNEENEDILEDIVLTLTLFEDREMIEERLKTYAHLFDDKVMKQLKRRRYTGWGRLSRKLINGIRDKQSGKTILDFLKSDGFANRNFMQLIHDDSLTFKEDIQKAQVSGQGDSLHEHIANLAGSPAIKKGILQTVKVVDELVKVMGRHKPENIVIEMARENQTTQKGQKNSRERMKRIEEGIKELGSQILKEHPVENTQLQNEKLYLYYLQNGRDMYVDQELDINRLSDYDVDHIVPQSFLKDDSIDNKVLTRSDKARGKSDNVPSEEVVKKMKNYWRQLLNAKLITQRKFDNLTKAERGGLSELDKAGFIKRQLVETRQITKHVAQILDSRMNTKYDENDKLIREVKVITLKSKLVSDFRKDFQFYKVREINNYHHAHDAYLNAVVGTALIKKYPKLESEFVYGDYKVYDVRKMIAKSEQEIGKATAKYFFYSNIMNFFKTEITLANGEIRKRPLIETNGETGEIVWDKGRDFATVRKVLSMPQVNIVKKTEVQTGGFSKESILPKRNSDKLIARKKDWDPKKYGGFDSPTVAYSVLVVAKVEKGKSKKLKSVKELLGITIMERSSFEKNPIDFLEAKGYKEVKKDLIIKLPKYSLFELENGRKRMLASAGELQKGNELALPSKYVNFLYLASHYEKLKGSPEDNEQKQLFVEQHKHYLDEIIEQISEFSKRVILADANLDKVLSAYNKHRDKPIREQAENIIHLFTLTNLGAPAAFKYFDTTIDRKRYTSTKEVLDATLIHQSITGLYETRIDLSQLGGDGGEAAAKGSSGGLLGRDLLTKLKAQIQFSTEGPQVTWEDRPAMCLVLNLEEEYRLHEKPVPPSIDPSWLQLFPMVWAEKAGMGLANQVPPVVVELKSDASPVAVRQYPMSKEAREGIRPHIQRFLDLGILVPCQSPWNTPLLPVKKPGTNDYRPVQDLREVNKRVQDIHPTVPNPYNLLSSLPPSHTWYSVLDLKDAFFCLKLHPNSQPLFAFEWRDPEKGNTGQLTWTRLPQGFKNSPTLFNEALHRDLASFRALNPQVVMLQYVDDLLVAAPTYRDCKEGTRRLLQELSKLGYRVSAKKAQLCREEVTYLGYLLKGGKRWLTPARKATVMKIPTPTTPRQVREFLGTAGFCRLWIPGFASLAAPLYPLTRPKVPFTWTEAHQEAFGRIKEALLSAPALALPDLTKPFALYVDEKEGVARGVLTQTLGPWRRPVAYLSKKLDPVASGWPTCLKAIAAVALLLKDADKLTLGQNVLVIAPHNLESIVRQPPDRWMTNARMTHYQSLLLNERVSFAPPAILNPATLLPVESDDTPIHICSEILAEETGTRPDLRDQPLPGVPAWYTDGSSFIMDGRRQAGAAIVDNKRTVWASNLPEGTSAQKAELIALTQALRLAEGKSINIYTDSRYAFATAHVHGAIYKQRGWLTSAGKDIKNKEEILALLEAIHLPKRVAIIHCPGHQRGTDPVATGNRKADEAAKQAAQSTRILTETTKNAGKRTADGSEFEKRTADGSEFESPKKKAKVE

SEQ ID NO: 1631 - protein, 2119 aa, synthetic construct
MPAAKRVKLDGGDKKYSIGLDIGTNSVGWAVITDEYKVPSKKFKVLGNTDRHSIKKNLIGALLFDSGETAEATRLKRTARRRYTRRKNRICYLQEIFSNEMAKVDDSFFHRLEESFLVEEDKKHERHPIFGNIVDEVAYHEKYPTIYHLRKKLVDSTDKADLRLIYLALAHMIKFRGHFLIEGDLNPDNSDVDKLFIQLVQTYNQLFEENPINASGVDAKAILSARLSKSRRLENLIAQLPGEKKNGLFGNLIALSLGLTPNFKSNFDLAEDAKLQLSKDTYDDDLDNLLAQIGDQYADLFLAAKNLSDAILLSDILRVNTEITKAPLSASMIKRYDEHHQDLTLLKALVRQQLPEKYKEIFFDQSKNGYAGYIDGGASQEEFYKFIKPILEKMDGTEELLVKLNREDLLRKQRTFDNGSIPHQIHLGELHAILRRQEDFYPFLKDNREKIEKILTFRIPYYVGPLARGNSRFAWMTRKSEETITPWNFEEVVDKGASAQSFIERMTNFDKNLPNEKVLPKHSLLYEYFTVYNELTKVKYVTEGMRKPAFLSGEQKKAIVDLLFKTNRKVTVKQLKEDYFKKIECFDSVEISGVEDRFNASLGTYHDLLKIIKDKDFLDNEENEDILEDIVLTLTLFEDREMIEERLKTYAHLFDDKVMKQLKRRRYTGWGRLSRKLINGIRDKQSGKTILDFLKSDGFANRNFMQLIHDDSLTFKEDIQKAQVSGQGDSLHEHIANLAGSPAIKKGILQTVKVVDELVKVMGRHKPENIVIEMARENQTTQKGQKNSRERMKRIEEGIKELGSQILKEHPVENTQLQNEKLYLYYLQNGRDMYVDQELDINRLSDYDVDHIVPQSFLKDDSIDNKVLTRSDKARGKSDNVPSEEVVKKMKNYWRQLLNAKLITQRKFDNLTKAERGGLSELDKAGFIKRQLVETRQITKHVAQILDSRMNTKYDENDKLIREVKVITLKSKLVSDFRKDFQFYKVREINNYHHAHDAYLNAVVGTALIKKYPKLESEFVYGDYKVYDVRKMIAKSEQEIGKATAKYFFYSNIMNFFKTEITLANGEIRKRPLIETNGETGEIVWDKGRDFATVRKVLSMPQVNIVKKTEVQTGGFSKESILPKRNSDKLIARKKDWDPKKYGGFDSPTVAYSVLVVAKVEKGKSKKLKSVKELLGITIMERSSFEKNPIDFLEAKGYKEVKKDLIIKLPKYSLFELENGRKRMLASAGELQKGNELALPSKYVNFLYLASHYEKLKGSPEDNEQKQLFVEQHKHYLDEIIEQISEFSKRVILADANLDKVLSAYNKHRDKPIREQAENIIHLFTLTNLGAPAAFKYFDTTIDRKRYTSTKEVLDATLIHQSITGLYETRIDLSQLGGDGGPAPGGLLGRDLLTKLKAQIQFSTEGPQVTWEDRPAMCLVLNLEEEYRLHEKPVPPSIDPSWLQLFPMVWAEKAGMGLANQVPPVVVELKSDASPVAVRQYPMSKEAREGIRPHIQRFLDLGILVPCQSPWNTPLLPVKKPGTNDYRPVQDLREVNKRVQDIHPTVPNPYNLLSSLPPSHTWYSVLDLKDAFFCLKLHPNSQPLFAFEWRDPEKGNTGQLTWTRLPQGFKNSPTLFNEALHRDLASFRALNPQVVMLQYVDDLLVAAPTYRDCKEGTRRLLQELSKLGYRVSAKKAQLCREEVTYLGYLLKGGKRWLTPARKATVMKIPTPTTPRQVREFLGTAGFCRLWIPGFASLAAPLYPLTRPKVPFTWTEAHQEAFGRIKEALLSAPALALPDLTKPFALYVDEKEGVARGVLTQTLGPWRRPVAYLSKKLDPVASGWPTCLKAIAAVALLLKDADKLTLGQNVLVIAPHNLESIVRQPPDRWMTNARMTHYQSLLLNERVSFAPPAILNPATLLPVESDDTPIHICSEILAEETGTRPDLRDQPLPGVPAWYTDGSSFIMDGRRQAGAAIVDNKRTVWASNLPEGTSAQKAELIALTQALRLAEGKSINIYTDSRYAFATAHVHGAIYKQRGWLTSAGKDIKNKEEILALLEAIHLPKRVAIIHCPGHQRGTDPVATGNRKADEAAKQAAQSTRILTETTKNAGKRTADGSEFEKRTADGSEFESPKKKAKVE

SEQ ID NO: 1632 - protein, 2141 aa, synthetic construct
MPAAKRVKLDGGDKKYSIGLDIGTNSVGWAVITDEYKVPSKKFKVLGNTDRHSIKKNLIGALLFDSGETAEATRLKRTARRRYTRRKNRICYLQEIFSNEMAKVDDSFFHRLEESFLVEEDKKHERHPIFGNIVDEVAYHEKYPTIYHLRKKLVDSTDKADLRLIYLALAHMIKFRGHFLIEGDLNPDNSDVDKLFIQLVQTYNQLFEENPINASGVDAKAILSARLSKSRRLENLIAQLPGEKKNGLFGNLIALSLGLTPNFKSNFDLAEDAKLQLSKDTYDDDLDNLLAQIGDQYADLFLAAKNLSDAILLSDILRVNTEITKAPLSASMIKRYDEHHQDLTLLKALVRQQLPEKYKEIFFDQSKNGYAGYIDGGASQEEFYKFIKPILEKMDGTEELLVKLNREDLLRKQRTFDNGSIPHQIHLGELHAILRRQEDFYPFLKDNREKIEKILTFRIPYYVGPLARGNSRFAWMTRKSEETITPWNFEEVVDKGASAQSFIERMTNFDKNLPNEKVLPKHSLLYEYFTVYNELTKVKYVTEGMRKPAFLSGEQKKAIVDLLFKTNRKVTVKQLKEDYFKKIECFDSVEISGVEDRFNASLGTYHDLLKIIKDKDFLDNEENEDILEDIVLTLTLFEDREMIEERLKTYAHLFDDKVMKQLKRRRYTGWGRLSRKLINGIRDKQSGKTILDFLKSDGFANRNFMQLIHDDSLTFKEDIQKAQVSGQGDSLHEHIANLAGSPAIKKGILQTVKVVDELVKVMGRHKPENIVIEMARENQTTQKGQKNSRERMKRIEEGIKELGSQILKEHPVENTQLQNEKLYLYYLQNGRDMYVDQELDINRLSDYDVDHIVPQSFLKDDSIDNKVLTRSDKARGKSDNVPSEEVVKKMKNYWRQLLNAKLITQRKFDNLTKAERGGLSELDKAGFIKRQLVETRQITKHVAQILDSRMNTKYDENDKLIREVKVITLKSKLVSDFRKDFQFYKVREINNYHHAHDAYLNAVVGTALIKKYPKLESEFVYGDYKVYDVRKMIAKSEQEIGKATAKYFFYSNIMNFFKTEITLANGEIRKRPLIETNGETGEIVWDKGRDFATVRKVLSMPQVNIVKKTEVQTGGFSKESILPKRNSDKLIARKKDWDPKKYGGFDSPTVAYSVLVVAKVEKGKSKKLKSVKELLGITIMERSSFEKNPIDFLEAKGYKEVKKDLIIKLPKYSLFELENGRKRMLASAGELQKGNELALPSKYVNFLYLASHYEKLKGSPEDNEQKQLFVEQHKHYLDEIIEQISEFSKRVILADANLDKVLSAYNKHRDKPIREQAENIIHLFTLTNLGAPAAFKYFDTTIDRKRYTSTKEVLDATLIHQSITGLYETRIDLSQLGGDGGEAAAKEAAAKEAAAKEAAAKEAAAKGGLLGRDLLTKLKAQIQFSTEGPQVTWEDRPAMCLVLNLEEEYRLHEKPVPPSIDPSWLQLFPMVWAEKAGMGLANQVPPVVVELKSDASPVAVRQYPMSKEAREGIRPHIQRFLDLGILVPCQSPWNTPLLPVKKPGTNDYRPVQDLREVNKRVQDIHPTVPNPYNLLSSLPPSHTWYSVLDLKDAFFCLKLHPNSQPLFAFEWRDPEKGNTGQLTWTRLPQGFKNSPTLFNEALHRDLASFRALNPQVVMLQYVDDLLVAAPTYRDCKEGTRRLLQELSKLGYRVSAKKAQLCREEVTYLGYLLKGGKRWLTPARKATVMKIPTPTTPRQVREFLGTAGFCRLWIPGFASLAAPLYPLTRPKVPFTWTEAHQEAFGRIKEALLSAPALALPDLTKPFALYVDEKEGVARGVLTQTLGPWRRPVAYLSKKLDPVASGWPTCLKAIAAVALLLKDADKLTLGQNVLVIAPHNLESIVRQPPDRWMTNARMTHYQSLLLNERVSFAPPAILNPATLLPVESDDTPIHICSEILAEETGTRPDLRDQPLPGVPAWYTDGSSFIMDGRRQAGAAIVDNKRTVWASNLPEGTSAQKAELIALTQALRLAEGKSINIYTDSRYAFATAHVHGAIYKQRGWLTSAGKDIKNKEEILALLEAIHLPKRVAIIHCPGHQRGTDPVATGNRKADEAAKQAAQSTRILTETTKNAGKRTADGSEFEKRTADGSEFESPKKKAKVE

SEQ ID NO: 1633 - protein, 2122 aa, synthetic construct
MPAAKRVKLDGGDKKYSIGLDIGTNSVGWAVITDEYKVPSKKFKVLGNTDRHSIKKNLIGALLFDSGETAEATRLKRTARRRYTRRKNRICYLQEIFSNEMAKVDDSFFHRLEESFLVEEDKKHERHPIFGNIVDEVAYHEKYPTIYHLRKKLVDSTDKADLRLIYLALAHMIKFRGHFLIEGDLNPDNSDVDKLFIQLVQTYNQLFEENPINASGVDAKAILSARLSKSRRLENLIAQLPGEKKNGLFGNLIALSLGLTPNFKSNFDLAEDAKLQLSKDTYDDDLDNLLAQIGDQYADLFLAAKNLSDAILLSDILRVNTEITKAPLSASMIKRYDEHHQDLTLLKALVRQQLPEKYKEIFFDQSKNGYAGYIDGGASQEEFYKFIKPILEKMDGTEELLVKLNREDLLRKQRTFDNGSIPHQIHLGELHAILRRQEDFYPFLKDNREKIEKILTFRIPYYVGPLARGNSRFAWMTRKSEETITPWNFEEVVDKGASAQSFIERMTNFDKNLPNEKVLPKHSLLYEYFTVYNELTKVKYVTEGMRKPAFLSGEQKKAIVDLLFKTNRKVTVKQLKEDYFKKIECFDSVEISGVEDRFNASLGTYHDLLKIIKDKDFLDNEENEDILEDIVLTLTLFEDREMIEERLKTYAHLFDDKVMKQLKRRRYTGWGRLSRKLINGIRDKQSGKTILDFLKSDGFANRNFMQLIHDDSLTFKEDIQKAQVSGQGDSLHEHIANLAGSPAIKKGILQTVKVVDELVKVMGRHKPENIVIEMARENQTTQKGQKNSRERMKRIEEGIKELGSQILKEHPVENTQLQNEKLYLYYLQNGRDMYVDQELDINRLSDYDVDHIVPQSFLKDDSIDNKVLTRSDKARGKSDNVPSEEVVKKMKNYWRQLLNAKLITQRKFDNLTKAERGGLSELDKAGFIKRQLVETRQITKHVAQILDSRMNTKYDENDKLIREVKVITLKSKLVSDFRKDFQFYKVREINNYHHAHDAYLNAVVGTALIKKYPKLESEFVYGDYKVYDVRKMIAKSEQEIGKATAKYFFYSNIMNFFKTEITLANGEIRKRPLIETNGETGEIVWDKGRDFATVRKVLSMPQVNIVKKTEVQTGGFSKESILPKRNSDKLIARKKDWDPKKYGGFDSPTVAYSVLVVAKVEKGKSKKLKSVKELLGITIMERSSFEKNPIDFLEAKGYKEVKKDLIIKLPKYSLFELENGRKRMLASAGELQKGNELALPSKYVNFLYLASHYEKLKGSPEDNEQKQLFVEQHKHYLDEIIEQISEFSKRVILADANLDKVLSAYNKHRDKPIREQAENIIHLFTLTNLGAPAAFKYFDTTIDRKRYTSTKEVLDATLIHQSITGLYETRIDLSQLGGDGGGGGPAPGGLLGRDLLTKLKAQIQFSTEGPQVTWEDRPAMCLVLNLEEEYRLHEKPVPPSIDPSWLQLFPMVWAEKAGMGLANQVPPVVVELKSDASPVAVRQYPMSKEAREGIRPHIQRFLDLGILVPCQSPWNTPLLPVKKPGTNDYRPVQDLREVNKRVQDIHPTVPNPYNLLSSLPPSHTWYSVLDLKDAFFCLKLHPNSQPLFAFEWRDPEKGNTGQLTWTRLPQGFKNSPTLFNEALHRDLASFRALNPQVVMLQYVDDLLVAAPTYRDCKEGTRRLLQELSKLGYRVSAKKAQLCREEVTYLGYLLKGGKRWLTPARKATVMKIPTPTTPRQVREFLGTAGFCRLWIPGFASLAAPLYPLTRPKVPFTWTEAHQEAFGRIKEALLSAPALALPDLTKPFALYVDEKEGVARGVLTQTLGPWRRPVAYLSKKLDPVASGWPTCLKAIAAVALLLKDADKLTLGQNVLVIAPHNLESIVRQPPDRWMTNARMTHYQSLLLNERVSFAPPAILNPATLLPVESDDTPIHICSEILAEETGTRPDLRDQPLPGVPAWYTDGSSFIMDGRRQAGAAIVDNKRTVWASNLPEGTSAQKAELIALTQALRLAEGKSINIYTDSRYAFATAHVHGAIYKQRGWLTSAGKDIKNKEEILALLEAIHLPKRVAIIHCPGHQRGTDPVATGNRKADEAAKQAAQSTRILTETTKNAGKRTADGSEFEKRTADGSEFESPKKKAKVE

SEQ ID NO: 1634 - protein, 2127 aa, synthetic construct
MPAAKRVKLDGGDKKYSIGLDIGTNSVGWAVITDEYKVPSKKFKVLGNTDRHSIKKNLIGALLFDSGETAEATRLKRTARRRYTRRKNRICYLQEIFSNEMAKVDDSFFHRLEESFLVEEDKKHERHPIFGNIVDEVAYHEKYPTIYHLRKKLVDSTDKADLRLIYLALAHMIKFRGHFLIEGDLNPDNSDVDKLFIQLVQTYNQLFEENPINASGVDAKAILSARLSKSRRLENLIAQLPGEKKNGLFGNLIALSLGLTPNFKSNFDLAEDAKLQLSKDTYDDDLDNLLAQIGDQYADLFLAAKNLSDAILLSDILRVNTEITKAPLSASMIKRYDEHHQDLTLLKALVRQQLPEKYKEIFFDQSKNGYAGYIDGGASQEEFYKFIKPILEKMDGTEELLVKLNREDLLRKQRTFDNGSIPHQIHLGELHAILRRQEDFYPFLKDNREKIEKILTFRIPYYVGPLARGNSRFAWMTRKSEETITPWNFEEVVDKGASAQSFIERMTNFDKNLPNEKVLPKHSLLYEYFTVYNELTKVKYVTEGMRKPAFLSGEQKKAIVDLLFKTNRKVTVKQLKEDYFKKIECFDSVEISGVEDRFNASLGTYHDLLKIIKDKDFLDNEENEDILEDIVLTLTLFEDREMIEERLKTYAHLFDDKVMKQLKRRRYTGWGRLSRKLINGIRDKQSGKTILDFLKSDGFANRNFMQLIHDDSLTFKEDIQKAQVSGQGDSLHEHIANLAGSPAIKKGILQTVKVVDELVKVMGRHKPENIVIEMARENQTTQKGQKNSRERMKRIEEGIKELGSQILKEHPVENTQLQNEKLYLYYLQNGRDMYVDQELDINRLSDYDVDHIVPQSFLKDDSIDNKVLTRSDKARGKSDNVPSEEVVKKMKNYWRQLLNAKLITQRKFDNLTKAERGGLSELDKAGFIKRQLVETRQITKHVAQILDSRMNTKYDENDKLIREVKVITLKSKLVSDFRKDFQFYKVREINNYHHAHDAYLNAVVGTALIKKYPKLESEFVYGDYKVYDVRKMIAKSEQEIGKATAKYFFYSNIMNFFKTEITLANGEIRKRPLIETNGETGEIVWDKGRDFATVRKVLSMPQVNIVKKTEVQTGGFSKESILPKRNSDKLIARKKDWDPKKYGGFDSPTVAYSVLVVAKVEKGKSKKLKSVKELLGITIMERSSFEKNPIDFLEAKGYKEVKKDLIIKLPKYSLFELENGRKRMLASAGELQKGNELALPSKYVNFLYLASHYEKLKGSPEDNEQKQLFVEQHKHYLDEIIEQISEFSKRVILADANLDKVLSAYNKHRDKPIREQAENIIHLFTLTNLGAPAAFKYFDTTIDRKRYTSTKEVLDATLIHQSITGLYETRIDLSQLGGDGGGSSEAAAKGGGGGLLGRDLLTKLKAQIQFSTEGPQVTWEDRPAMCLVLNLEEEYRLHEKPVPPSIDPSWLQLFPMVWAEKAGMGLANQVPPVVVELKSDASPVAVRQYPMSKEAREGIRPHIQRFLDLGILVPCQSPWNTPLLPVKKPGTNDYRPVQDLREVNKRVQDIHPTVPNPYNLLSSLPPSHTWYSVLDLKDAFFCLKLHPNSQPLFAFEWRDPEKGNTGQLTWTRLPQGFKNSPTLFNEALHRDLASFRALNPQVVMLQYVDDLLVAAPTYRDCKEGTRRLLQELSKLGYRVSAKKAQLCREEVTYLGYLLKGGKRWLTPARKATVMKIPTPTTPRQVREFLGTAGFCRLWIPGFASLAAPLYPLTRPKVPFTWTEAHQEAFGRIKEALLSAPALALPDLTKPFALYVDEKEGVARGVLTQTLGPWRRPVAYLSKKLDPVASGWPTCLKAIAAVALLLKDADKLTLGQNVLVIAPHNLESIVRQPPDRWMTNARMTHYQSLLLNERVSFAPPAILNPATLLPVESDDTPIHICSEILAEETGTRPDLRDQPLPGVPAWYTDGSSFIMDGRRQAGAAIVDNKRTVWASNLPEGTSAQKAELIALTQALRLAEGKSINIYTDSRYAFATAHVHGAIYKQRGWLTSAGKDIKNKEEILALLEAIHLPKRVAIIHCPGHQRGTDPVATGNRKADEAAKQAAQSTRILTETTKNAGKRTADGSEFEKRTADGSEFESPKKKAKVE

SEQ ID NO: 1635 - protein, 2131 aa, synthetic construct
MPAAKRVKLDGGDKKYSIGLDIGTNSVGWAVITDEYKVPSKKFKVLGNTDRHSIKKNLIGALLFDSGETAEATRLKRTARRRYTRRKNRICYLQEIFSNEMAKVDDSFFHRLEESFLVEEDKKHERHPIFGNIVDEVAYHEKYPTIYHLRKKLVDSTDKADLRLIYLALAHMIKFRGHFLIEGDLNPDNSDVDKLFIQLVQTYNQLFEENPINASGVDAKAILSARLSKSRRLENLIAQLPGEKKNGLFGNLIALSLGLTPNFKSNFDLAEDAKLQLSKDTYDDDLDNLLAQIGDQYADLFLAAKNLSDAILLSDILRVNTEITKAPLSASMIKRYDEHHQDLTLLKALVRQQLPEKYKEIFFDQSKNGYAGYIDGGASQEEFYKFIKPILEKMDGTEELLVKLNREDLLRKQRTFDNGSIPHQIHLGELHAILRRQEDFYPFLKDNREKIEKILTFRIPYYVGPLARGNSRFAWMTRKSEETITPWNFEEVVDKGASAQSFIERMTNFDKNLPNEKVLPKHSLLYEYFTVYNELTKVKYVTEGMRKPAFLSGEQKKAIVDLLFKTNRKVTVKQLKEDYFKKIECFDSVEISGVEDRFNASLGTYHDLLKIIKDKDFLDNEENEDILEDIVLTLTLFEDREMIEERLKTYAHLFDDKVMKQLKRRRYTGWGRLSRKLINGIRDKQSGKTILDFLKSDGFANRNFMQLIHDDSLTFKEDIQKAQVSGQGDSLHEHIANLAGSPAIKKGILQTVKVVDELVKVMGRHKPENIVIEMARENQTTQKGQKNSRERMKRIEEGIKELGSQILKEHPVENTQLQNEKLYLYYLQNGRDMYVDQELDINRLSDYDVDHIVPQSFLKDDSIDNKVLTRSDKARGKSDNVPSEEVVKKMKNYWRQLLNAKLITQRKFDNLTKAERGGLSELDKAGFIKRQLVETRQITKHVAQILDSRMNTKYDENDKLIREVKVITLKSKLVSDFRKDFQFYKVREINNYHHAHDAYLNAVVGTALIKKYPKLESEFVYGDYKVYDVRKMIAKSEQEIGKATAKYFFYSNIMNFFKTEITLANGEIRKRPLIETNGETGEIVWDKGRDFATVRKVLSMPQVNIVKKTEVQTGGFSKESILPKRNSDKLIARKKDWDPKKYGGFDSPTVAYSVLVVAKVEKGKSKKLKSVKELLGITIMERSSFEKNPIDFLEAKGYKEVKKDLIIKLPKYSLFELENGRKRMLASAGELQKGNELALPSKYVNFLYLASHYEKLKGSPEDNEQKQLFVEQHKHYLDEIIEQISEFSKRVILADANLDKVLSAYNKHRDKPIREQAENIIHLFTLTNLGAPAAFKYFDTTIDRKRYTSTKEVLDATLIHQSITGLYETRIDLSQLGGDGGGGGGSEAAAKGGGGSGGLLGRDLLTKLKAQIQFSTEGPQVTWEDRPAMCLVLNLEEEYRLHEKPVPPSIDPSWLQLFPMVWAEKAGMGLANQVPPVVVELKSDASPVAVRQYPMSKEAREGIRPHIQRFLDLGILVPCQSPWNTPLLPVKKPGTNDYRPVQDLREVNKRVQDIHPTVPNPYNLLSSLPPSHTWYSVLDLKDAFFCLKLHPNSQPLFAFEWRDPEKGNTGQLTWTRLPQGFKNSPTLFNEALHRDLASFRALNPQVVMLQYVDDLLVAAPTYRDCKEGTRRLLQELSKLGYRVSAKKAQLCREEVTYLGYLLKGGKRWLTPARKATVMKIPTPTTPRQVREFLGTAGFCRLWIPGFASLAAPLYPLTRPKVPFTWTEAHQEAFGRIKEALLSAPALALPDLTKPFALYVDEKEGVARGVLTQTLGPWRRPVAYLSKKLDPVASGWPTCLKAIAAVALLLKDADKLTLGQNVLVIAPHNLESIVRQPPDRWMTNARMTHYQSLLLNERVSFAPPAILNPATLLPVESDDTPIHICSEILAEETGTRPDLRDQPLPGVPAWYTDGSSFIMDGRRQAGAAIVDNKRTVWASNLPEGTSAQKAELIALTQALRLAEGKSINIYTDSRYAFATAHVHGAIYKQRGWLTSAGKDIKNKEEILALLEAIHLPKRVAIIHCPGHQRGTDPVATGNRKADEAAKQAAQSTRILTETTKNAGKRTADGSEFEKRTADGSEFESPKKKAKVE

SEQ ID NO: 1636 - protein, 2122 aa, synthetic construct
MPAAKRVKLDGGDKKYSIGLDIGTNSVGWAVITDEYKVPSKKFKVLGNTDRHSIKKNLIGALLFDSGETAEATRLKRTARRRYTRRKNRICYLQEIFSNEMAKVDDSFFHRLEESFLVEEDKKHERHPIFGNIVDEVAYHEKYPTIYHLRKKLVDSTDKADLRLIYLALAHMIKFRGHFLIEGDLNPDNSDVDKLFIQLVQTYNQLFEENPINASGVDAKAILSARLSKSRRLENLIAQLPGEKKNGLFGNLIALSLGLTPNFKSNFDLAEDAKLQLSKDTYDDDLDNLLAQIGDQYADLFLAAKNLSDAILLSDILRVNTEITKAPLSASMIKRYDEHHQDLTLLKALVRQQLPEKYKEIFFDQSKNGYAGYIDGGASQEEFYKFIKPILEKMDGTEELLVKLNREDLLRKQRTFDNGSIPHQIHLGELHAILRRQEDFYPFLKDNREKIEKILTFRIPYYVGPLARGNSRFAWMTRKSEETITPWNFEEVVDKGASAQSFIERMTNFDKNLPNEKVLPKHSLLYEYFTVYNELTKVKYVTEGMRKPAFLSGEQKKAIVDLLFKTNRKVTVKQLKEDYFKKIECFDSVEISGVEDRFNASLGTYHDLLKIIKDKDFLDNEENEDILEDIVLTLTLFEDREMIEERLKTYAHLFDDKVMKQLKRRRYTGWGRLSRKLINGIRDKQSGKTILDFLKSDGFANRNFMQLIHDDSLTFKEDIQKAQVSGQGDSLHEHIANLAGSPAIKKGILQTVKVVDELVKVMGRHKPENIVIEMARENQTTQKGQKNSRERMKRIEEGIKELGSQILKEHPVENTQLQNEKLYLYYLQNGRDMYVDQELDINRLSDYDVDHIVPQSFLKDDSIDNKVLTRSDKARGKSDNVPSEEVVKKMKNYWRQLLNAKLITQRKFDNLTKAERGGLSELDKAGFIKRQLVETRQITKHVAQILDSRMNTKYDENDKLIREVKVITLKSKLVSDFRKDFQFYKVREINNYHHAHDAYLNAVVGTALIKKYPKLESEFVYGDYKVYDVRKMIAKSEQEIGKATAKYFFYSNIMNFFKTEITLANGEIRKRPLIETNGETGEIVWDKGRDFATVRKVLSMPQVNIVKKTEVQTGGFSKESILPKRNSDKLIARKKDWDPKKYGGFDSPTVAYSVLVVAKVEKGKSKKLKSVKELLGITIMERSSFEKNPIDFLEAKGYKEVKKDLIIKLPKYSLFELENGRKRMLASAGELQKGNELALPSKYVNFLYLASHYEKLKGSPEDNEQKQLFVEQHKHYLDEIIEQISEFSKRVILADANLDKVLSAYNKHRDKPIREQAENIIHLFTLTNLGAPAAFKYFDTTIDRKRYTSTKEVLDATLIHQSITGLYETRIDLSQLGGDGGPAPGGSGGLLGRDLLTKLKAQIQFSTEGPQVTWEDRPAMCLVLNLEEEYRLHEKPVPPSIDPSWLQLFPMVWAEKAGMGLANQVPPVVVELKSDASPVAVRQYPMSKEAREGIRPHIQRFLDLGILVPCQSPWNTPLLPVKKPGTNDYRPVQDLREVNKRVQDIHPTVPNPYNLLSSLPPSHTWYSVLDLKDAFFCLKLHPNSQPLFAFEWRDPEKGNTGQLTWTRLPQGFKNSPTLFNEALHRDLASFRALNPQVVMLQYVDDLLVAAPTYRDCKEGTRRLLQELSKLGYRVSAKKAQLCREEVTYLGYLLKGGKRWLTPARKATVMKIPTPTTPRQVREFLGTAGFCRLWIPGFASLAAPLYPLTRPKVPFTWTEAHQEAFGRIKEALLSAPALALPDLTKPFALYVDEKEGVARGVLTQTLGPWRRPVAYLSKKLDPVASGWPTCLKAIAAVALLLKDADKLTLGQNVLVIAPHNLESIVRQPPDRWMTNARMTHYQSLLLNERVSFAPPAILNPATLLPVESDDTPIHICSEILAEETGTRPDLRDQPLPGVPAWYTDGSSFIMDGRRQAGAAIVDNKRTVWASNLPEGTSAQKAELIALTQALRLAEGKSINIYTDSRYAFATAHVHGAIYKQRGWLTSAGKDIKNKEEILALLEAIHLPKRVAIIHCPGHQRGTDPVATGNRKADEAAKQAAQSTRILTETTKNAGKRTADGSEFEKRTADGSEFESPKKKAKVE

SEQ ID NO: 1637 - protein, 2122 aa, synthetic construct
MPAAKRVKLDGGDKKYSIGLDIGTNSVGWAVITDEYKVPSKKFKVLGNTDRHSIKKNLIGALLFDSGETAEATRLKRTARRRYTRRKNRICYLQEIFSNEMAKVDDSFFHRLEESFLVEEDKKHERHPIFGNIVDEVAYHEKYPTIYHLRKKLVDSTDKADLRLIYLALAHMIKFRGHFLIEGDLNPDNSDVDKLFIQLVQTYNQLFEENPINASGVDAKAILSARLSKSRRLENLIAQLPGEKKNGLFGNLIALSLGLTPNFKSNFDLAEDAKLQLSKDTYDDDLDNLLAQIGDQYADLFLAAKNLSDAILLSDILRVNTEITKAPLSASMIKRYDEHHQDLTLLKALVRQQLPEKYKEIFFDQSKNGYAGYIDGGASQEEFYKFIKPILEKMDGTEELLVKLNREDLLRKQRTFDNGSIPHQIHLGELHAILRRQEDFYPFLKDNREKIEKILTFRIPYYVGPLARGNSRFAWMTRKSEETITPWNFEEVVDKGASAQSFIERMTNFDKNLPNEKVLPKHSLLYEYFTVYNELTKVKYVTEGMRKPAFLSGEQKKAIVDLLFKTNRKVTVKQLKEDYFKKIECFDSVEISGVEDRFNASLGTYHDLLKIIKDKDFLDNEENEDILEDIVLTLTLFEDREMIEERLKTYAHLFDDKVMKQLKRRRYTGWGRLSRKLINGIRDKQSGKTILDFLKSDGFANRNFMQLIHDDSLTFKEDIQKAQVSGQGDSLHEHIANLAGSPAIKKGILQTVKVVDELVKVMGRHKPENIVIEMARENQTTQKGQKNSRERMKRIEEGIKELGSQILKEHPVENTQLQNEKLYLYYLQNGRDMYVDQELDINRLSDYDVDHIVPQSFLKDDSIDNKVLTRSDKARGKSDNVPSEEVVKKMKNYWRQLLNAKLITQRKFDNLTKAERGGLSELDKAGFIKRQLVETRQITKHVAQILDSRMNTKYDENDKLIREVKVITLKSKLVSDFRKDFQFYKVREINNYHHAHDAYLNAVVGTALIKKYPKLESEFVYGDYKVYDVRKMIAKSEQEIGKATAKYFFYSNIMNFFKTEITLANGEIRKRPLIETNGETGEIVWDKGRDFATVRKVLSMPQVNIVKKTEVQTGGFSKESILPKRNSDKLIARKKDWDPKKYGGFDSPTVAYSVLVVAKVEKGKSKKLKSVKELLGITIMERSSFEKNPIDFLEAKGYKEVKKDLIIKLPKYSLFELENGRKRMLASAGELQKGNELALPSKYVNFLYLASHYEKLKGSPEDNEQKQLFVEQHKHYLDEIIEQISEFSKRVILADANLDKVLSAYNKHRDKPIREQAENIIHLFTLTNLGAPAAFKYFDTTIDRKRYTSTKEVLDATLIHQSITGLYETRIDLSQLGGDGGGGSGSSGGLLGRDLLTKLKAQIQFSTEGPQVTWEDRPAMCLVLNLEEEYRLHEKPVPPSIDPSWLQLFPMVWAEKAGMGLANQVPPVVVELKSDASPVAVRQYPMSKEAREGIRPHIQRFLDLGILVPCQSPWNTPLLPVKKPGTNDYRPVQDLREVNKRVQDIHPTVPNPYNLLSSLPPSHTWYSVLDLKDAFFCLKLHPNSQPLFAFEWRDPEKGNTGQLTWTRLPQGFKNSPTLFNEALHRDLASFRALNPQVVMLQYVDDLLVAAPTYRDCKEGTRRLLQELSKLGYRVSAKKAQLCREEVTYLGYLLKGGKRWLTPARKATVMKIPTPTTPRQVREFLGTAGFCRLWIPGFASLAAPLYPLTRPKVPFTWTEAHQEAFGRIKEALLSAPALALPDLTKPFALYVDEKEGVARGVLTQTLGPWRRPVAYLSKKLDPVASGWPTCLKAIAAVALLLKDADKLTLGQNVLVIAPHNLESIVRQPPDRWMTNARMTHYQSLLLNERVSFAPPAILNPATLLPVESDDTPIHICSEILAEETGTRPDLRDQPLPGVPAWYTDGSSFIMDGRRQAGAAIVDNKRTVWASNLPEGTSAQKAELIALTQALRLAEGKSINIYTDSRYAFATAHVHGAIYKQRGWLTSAGKDIKNKEEILALLEAIHLPKRVAIIHCPGHQRGTDPVATGNRKADEAAKQAAQSTRILTETTKNAGKRTADGSEFEKRTADGSEFESPKKKAKVE

SEQ ID NO: 1638 - protein, 2131 aa, synthetic construct
MPAAKRVKLDGGDKKYSIGLDIGTNSVGWAVITDEYKVPSKKFKVLGNTDRHSIKKNLIGALLFDSGETAEATRLKRTARRRYTRRKNRICYLQEIFSNEMAKVDDSFFHRLEESFLVEEDKKHERHPIFGNIVDEVAYHEKYPTIYHLRKKLVDSTDKADLRLIYLALAHMIKFRGHFLIEGDLNPDNSDVDKLFIQLVQTYNQLFEENPINASGVDAKAILSARLSKSRRLENLIAQLPGEKKNGLFGNLIALSLGLTPNFKSNFDLAEDAKLQLSKDTYDDDLDNLLAQIGDQYADLFLAAKNLSDAILLSDILRVNTEITKAPLSASMIKRYDEHHQDLTLLKALVRQQLPEKYKEIFFDQSKNGYAGYIDGGASQEEFYKFIKPILEKMDGTEELLVKLNREDLLRKQRTFDNGSIPHQIHLGELHAILRRQEDFYPFLKDNREKIEKILTFRIPYYVGPLARGNSRFAWMTRKSEETITPWNFEEVVDKGASAQSFIERMTNFDKNLPNEKVLPKHSLLYEYFTVYNELTKVKYVTEGMRKPAFLSGEQKKAIVDLLFKTNRKVTVKQLKEDYFKKIECFDSVEISGVEDRFNASLGTYHDLLKIIKDKDFLDNEENEDILEDIVLTLTLFEDREMIEERLKTYAHLFDDKVMKQLKRRRYTGWGRLSRKLINGIRDKQSGKTILDFLKSDGFANRNFMQLIHDDSLTFKEDIQKAQVSGQGDSLHEHIANLAGSPAIKKGILQTVKVVDELVKVMGRHKPENIVIEMARENQTTQKGQKNSRERMKRIEEGIKELGSQILKEHPVENTQLQNEKLYLYYLQNGRDMYVDQELDINRLSDYDVDHIVPQSFLKDDSIDNKVLTRSDKARGKSDNVPSEEVVKKMKNYWRQLLNAKLITQRKFDNLTKAERGGLSELDKAGFIKRQLVETRQITKHVAQILDSRMNTKYDENDKLIREVKVITLKSKLVSDFRKDFQFYKVREINNYHHAHDAYLNAVVGTALIKKYPKLESEFVYGDYKVYDVRKMIAKSEQEIGKATAKYFFYSNIMNFFKTEITLANGEIRKRPLIETNGETGEIVWDKGRDFATVRKVLSMPQVNIVKKTEVQTGGFSKESILPKRNSDKLIARKKDWDPKKYGGFDSPTVAYSVLVVAKVEKGKSKKLKSVKELLGITIMERSSFEKNPIDFLEAKGYKEVKKDLIIKLPKYSLFELENGRKRMLASAGELQKGNELALPSKYVNFLYLASHYEKLKGSPEDNEQKQLFVEQHKHYLDEIIEQISEFSKRVILADANLDKVLSAYNKHRDKPIREQAENIIHLFTLTNLGAPAAFKYFDTTIDRKRYTSTKEVLDATLIHQSITGLYETRIDLSQLGGDGGEAAAKGGGGSEAAAKGGLLGRDLLTKLKAQIQFSTEGPQVTWEDRPAMCLVLNLEEEYRLHEKPVPPSIDPSWLQLFPMVWAEKAGMGLANQVPPVVVELKSDASPVAVRQYPMSKEAREGIRPHIQRFLDLGILVPCQSPWNTPLLPVKKPGTNDYRPVQDLREVNKRVQDIHPTVPNPYNLLSSLPPSHTWYSVLDLKDAFFCLKLHPNSQPLFAFEWRDPEKGNTGQLTWTRLPQGFKNSPTLFNEALHRDLASFRALNPQVVMLQYVDDLLVAAPTYRDCKEGTRRLLQELSKLGYRVSAKKAQLCREEVTYLGYLLKGGKRWLTPARKATVMKIPTPTTPRQVREFLGTAGFCRLWIPGFASLAAPLYPLTRPKVPFTWTEAHQEAFGRIKEALLSAPALALPDLTKPFALYVDEKEGVARGVLTQTLGPWRRPVAYLSKKLDPVASGWPTCLKAIAAVALLLKDADKLTLGQNVLVIAPHNLESIVRQPPDRWMTNARMTHYQSLLLNERVSFAPPAILNPATLLPVESDDTPIHICSEILAEETGTRPDLRDQPLPGVPAWYTDGSSFIMDGRRQAGAAIVDNKRTVWASNLPEGTSAQKAELIALTQALRLAEGKSINIYTDSRYAFATAHVHGAIYKQRGWLTSAGKDIKNKEEILALLEAIHLPKRVAIIHCPGHQRGTDPVATGNRKADEAAKQAAQSTRILTETTKNAGKRTADGSEFEKRTADGSEFESPKKKAKVE

SEQ ID NO: 1639 - protein, 2127 aa, synthetic construct
MPAAKRVKLDGGDKKYSIGLDIGTNSVGWAVITDEYKVPSKKFKVLGNTDRHSIKKNLIGALLFDSGETAEATRLKRTARRRYTRRKNRICYLQEIFSNEMAKVDDSFFHRLEESFLVEEDKKHERHPIFGNIVDEVAYHEKYPTIYHLRKKLVDSTDKADLRLIYLALAHMIKFRGHFLIEGDLNPDNSDVDKLFIQLVQTYNQLFEENPINASGVDAKAILSARLSKSRRLENLIAQLPGEKKNGLFGNLIALSLGLTPNFKSNFDLAEDAKLQLSKDTYDDDLDNLLAQIGDQYADLFLAAKNLSDAILLSDILRVNTEITKAPLSASMIKRYDEHHQDLTLLKALVRQQLPEKYKEIFFDQSKNGYAGYIDGGASQEEFYKFIKPILEKMDGTEELLVKLNREDLLRKQRTFDNGSIPHQIHLGELHAILRRQEDFYPFLKDNREKIEKILTFRIPYYVGPLARGNSRFAWMTRKSEETITPWNFEEVVDKGASAQSFIERMTNFDKNLPNEKVLPKHSLLYEYFTVYNELTKVKYVTEGMRKPAFLSGEQKKAIVDLLFKTNRKVTVKQLKEDYFKKIECFDSVEISGVEDRFNASLGTYHDLLKIIKDKDFLDNEENEDILEDIVLTLTLFEDREMIEERLKTYAHLFDDKVMKQLKRRRYTGWGRLSRKLINGIRDKQSGKTILDFLKSDGFANRNFMQLIHDDSLTFKEDIQKAQVSGQGDSLHEHIANLAGSPAIKKGILQTVKVVDELVKVMGRHKPENIVIEMARENQTTQKGQKNSRERMKRIEEGIKELGSQILKEHPVENTQLQNEKLYLYYLQNGRDMYVDQELDINRLSDYDVDHIVPQSFLKDDSIDNKVLTRSDKARGKSDNVPSEEVVKKMKNYWRQLLNAKLITQRKFDNLTKAERGGLSELDKAGFIKRQLVETRQITKHVAQILDSRMNTKYDENDKLIREVKVITLKSKLVSDFRKDFQFYKVREINNYHHAHDAYLNAVVGTALIKKYPKLESEFVYGDYKVYDVRKMIAKSEQEIGKATAKYFFYSNIMNFFKTEITLANGEIRKRPLIETNGETGEIVWDKGRDFATVRKVLSMPQVNIVKKTEVQTGGFSKESILPKRNSDKLIARKKDWDPKKYGGFDSPTVAYSVLVVAKVEKGKSKKLKSVKELLGITIMERSSFEKNPIDFLEAKGYKEVKKDLIIKLPKYSLFELENGRKRMLASAGELQKGNELALPSKYVNFLYLASHYEKLKGSPEDNEQKQLFVEQHKHYLDEIIEQISEFSKRVILADANLDKVLSAYNKHRDKPIREQAENIIHLFTLTNLGAPAAFKYFDTTIDRKRYTSTKEVLDATLIHQSITGLYETRIDLSQLGGDGGGGGGSSEAAAKGGLLGRDLLTKLKAQIQFSTEGPQVTWEDRPAMCLVLNLEEEYRLHEKPVPPSIDPSWLQLFPMVWAEKAGMGLANQVPPVVVELKSDASPVAVRQYPMSKEAREGIRPHIQRFLDLGILVPCQSPWNTPLLPVKKPGTNDYRPVQDLREVNKRVQDIHPTVPNPYNLLSSLPPSHTWYSVLDLKDAFFCLKLHPNSQPLFAFEWRDPEKGNTGQLTWTRLPQGFKNSPTLFNEALHRDLASFRALNPQVVMLQYVDDLLVAAPTYRDCKEGTRRLLQELSKLGYRVSAKKAQLCREEVTYLGYLLKGGKRWLTPARKATVMKIPTPTTPRQVREFLGTAGFCRLWIPGFASLAAPLYPLTRPKVPFTWTEAHQEAFGRIKEALLSAPALALPDLTKPFALYVDEKEGVARGVLTQTLGPWRRPVAYLSKKLDPVASGWPTCLKAIAAVALLLKDADKLTLGQNVLVIAPHNLESIVRQPPDRWMTNARMTHYQSLLLNERVSFAPPAILNPATLLPVESDDTPIHICSEILAEETGTRPDLRDQPLPGVPAWYTDGSSFIMDGRRQAGAAIVDNKRTVWASNLPEGTSAQKAELIALTQALRLAEGKSINIYTDSRYAFATAHVHGAIYKQRGWLTSAGKDIKNKEEILALLEAIHLPKRVAIIHCPGHQRGTDPVATGNRKADEAAKQAAQSTRILTETTKNAGKRTADGSEFEKRTADGSEFESPKKKAKVE

SEQ ID NO: 1640 - protein, 2127 aa, synthetic construct
MPAAKRVKLDGGDKKYSIGLDIGTNSVGWAVITDEYKVPSKKFKVLGNTDRHSIKKNLIGALLFDSGETAEATRLKRTARRRYTRRKNRICYLQEIFSNEMAKVDDSFFHRLEESFLVEEDKKHERHPIFGNIVDEVAYHEKYPTIYHLRKKLVDSTDKADLRLIYLALAHMIKFRGHFLIEGDLNPDNSDVDKLFIQLVQTYNQLFEENPINASGVDAKAILSARLSKSRRLENLIAQLPGEKKNGLFGNLIALSLGLTPNFKSNFDLAEDAKLQLSKDTYDDDLDNLLAQIGDQYADLFLAAKNLSDAILLSDILRVNTEITKAPLSASMIKRYDEHHQDLTLLKALVRQQLPEKYKEIFFDQSKNGYAGYIDGGASQEEFYKFIKPILEKMDGTEELLVKLNREDLLRKQRTFDNGSIPHQIHLGELHAILRRQEDFYPFLKDNREKIEKILTFRIPYYVGPLARGNSRFAWMTRKSEETITPWNFEEVVDKGASAQSFIERMTNFDKNLPNEKVLPKHSLLYEYFTVYNELTKVKYVTEGMRKPAFLSGEQKKAIVDLLFKTNRKVTVKQLKEDYFKKIECFDSVEISGVEDRFNASLGTYHDLLKIIKDKDFLDNEENEDILEDIVLTLTLFEDREMIEERLKTYAHLFDDKVMKQLKRRRYTGWGRLSRKLINGIRDKQSGKTILDFLKSDGFANRNFMQLIHDDSLTFKEDIQKAQVSGQGDSLHEHIANLAGSPAIKKGILQTVKVVDELVKVMGRHKPENIVIEMARENQTTQKGQKNSRERMKRIEEGIKELGSQILKEHPVENTQLQNEKLYLYYLQNGRDMYVDQELDINRLSDYDVDHIVPQSFLKDDSIDNKVLTRSDKARGKSDNVPSEEVVKKMKNYWRQLLNAKLITQRKFDNLTKAERGGLSELDKAGFIKRQLVETRQITKHVAQILDSRMNTKYDENDKLIREVKVITLKSKLVSDFRKDFQFYKVREINNYHHAHDAYLNAVVGTALIKKYPKLESEFVYGDYKVYDVRKMIAKSEQEIGKATAKYFFYSNIMNFFKTEITLANGEIRKRPLIETNGETGEIVWDKGRDFATVRKVLSMPQVNIVKKTEVQTGGFSKESILPKRNSDKLIARKKDWDPKKYGGFDSPTVAYSVLVVAKVEKGKSKKLKSVKELLGITIMERSSFEKNPIDFLEAKGYKEVKKDLIIKLPKYSLFELENGRKRMLASAGELQKGNELALPSKYVNFLYLASHYEKLKGSPEDNEQKQLFVEQHKHYLDEIIEQISEFSKRVILADANLDKVLSAYNKHRDKPIREQAENIIHLFTLTNLGAPAAFKYFDTTIDRKRYTSTKEVLDATLIHQSITGLYETRIDLSQLGGDGGPAPGGSEAAAKGGLLGRDLLTKLKAQIQFSTEGPQVTWEDRPAMCLVLNLEEEYRLHEKPVPPSIDPSWLQLFPMVWAEKAGMGLANQVPPVVVELKSDASPVAVRQYPMSKEAREGIRPHIQRFLDLGILVPCQSPWNTPLLPVKKPGTNDYRPVQDLREVNKRVQDIHPTVPNPYNLLSSLPPSHTWYSVLDLKDAFFCLKLHPNSQPLFAFEWRDPEKGNTGQLTWTRLPQGFKNSPTLFNEALHRDLASFRALNPQVVMLQYVDDLLVAAPTYRDCKEGTRRLLQELSKLGYRVSAKKAQLCREEVTYLGYLLKGGKRWLTPARKATVMKIPTPTTPRQVREFLGTAGFCRLWIPGFASLAAPLYPLTRPKVPFTWTEAHQEAFGRIKEALLSAPALALPDLTKPFALYVDEKEGVARGVLTQTLGPWRRPVAYLSKKLDPVASGWPTCLKAIAAVALLLKDADKLTLGQNVLVIAPHNLESIVRQPPDRWMTNARMTHYQSLLLNERVSFAPPAILNPATLLPVESDDTPIHICSEILAEETGTRPDLRDQPLPGVPAWYTDGSSFIMDGRRQAGAAIVDNKRTVWASNLPEGTSAQKAELIALTQALRLAEGKSINIYTDSRYAFATAHVHGAIYKQRGWLTSAGKDIKNKEEILALLEAIHLPKRVAIIHCPGHQRGTDPVATGNRKADEAAKQAAQSTRILTETTKNAGKRTADGSEFEKRTADGSEFESPKKKAKVE

SEQ ID NO: 1641 - protein, 2127 aa, synthetic construct
MPAAKRVKLDGGDKKYSIGLDIGTNSVGWAVITDEYKVPSKKFKVLGNTDRHSIKKNLIGALLFDSGETAEATRLKRTARRRYTRRKNRICYLQEIFSNEMAKVDDSFFHRLEESFLVEEDKKHERHPIFGNIVDEVAYHEKYPTIYHLRKKLVDSTDKADLRLIYLALAHMIKFRGHFLIEGDLNPDNSDVDKLFIQLVQTYNQLFEENPINASGVDAKAILSARLSKSRRLENLIAQLPGEKKNGLFGNLIALSLGLTPNFKSNFDLAEDAKLQLSKDTYDDDLDNLLAQIGDQYADLFLAAKNLSDAILLSDILRVNTEITKAPLSASMIKRYDEHHQDLTLLKALVRQQLPEKYKEIFFDQSKNGYAGYIDGGASQEEFYKFIKPILEKMDGTEELLVKLNREDLLRKQRTFDNGSIPHQIHLGELHAILRRQEDFYPFLKDNREKIEKILTFRIPYYVGPLARGNSRFAWMTRKSEETITPWNFEEVVDKGASAQSFIERMTNFDKNLPNEKVLPKHSLLYEYFTVYNELTKVKYVTEGMRKPAFLSGEQKKAIVDLLFKTNRKVTVKQLKEDYFKKIECFDSVEISGVEDRFNASLGTYHDLLKIIKDKDFLDNEENEDILEDIVLTLTLFEDREMIEERLKTYAHLFDDKVMKQLKRRRYTGWGRLSRKLINGIRDKQSGKTILDFLKSDGFANRNFMQLIHDDSLTFKEDIQKAQVSGQGDSLHEHIANLAGSPAIKKGILQTVKVVDELVKVMGRHKPENIVIEMARENQTTQKGQKNSRERMKRIEEGIKELGSQILKEHPVENTQLQNEKLYLYYLQNGRDMYVDQELDINRLSDYDVDHIVPQSFLKDDSIDNKVLTRSDKARGKSDNVPSEEVVKKMKNYWRQLLNAKLITQRKFDNLTKAERGGLSELDKAGFIKRQLVETRQITKHVAQILDSRMNTKYDENDKLIREVKVITLKSKLVSDFRKDFQFYKVREINNYHHAHDAYLNAVVGTALIKKYPKLESEFVYGDYKVYDVRKMIAKSEQEIGKATAKYFFYSNIMNFFKTEITLANGEIRKRPLIETNGETGEIVWDKGRDFATVRKVLSMPQVNIVKKTEVQTGGFSKESILPKRNSDKLIARKKDWDPKKYGGFDSPTVAYSVLVVAKVEKGKSKKLKSVKELLGITIMERSSFEKNPIDFLEAKGYKEVKKDLIIKLPKYSLFELENGRKRMLASAGELQKGNELALPSKYVNFLYLASHYEKLKGSPEDNEQKQLFVEQHKHYLDEIIEQISEFSKRVILADANLDKVLSAYNKHRDKPIREQAENIIHLFTLTNLGAPAAFKYFDTTIDRKRYTSTKEVLDATLIHQSITGLYETRIDLSQLGGDGGPAPEAAAKGGSGGLLGRDLLTKLKAQIQFSTEGPQVTWEDRPAMCLVLNLEEEYRLHEKPVPPSIDPSWLQLFPMVWAEKAGMGLANQVPPVVVELKSDASPVAVRQYPMSKEAREGIRPHIQRFLDLGILVPCQSPWNTPLLPVKKPGTNDYRPVQDLREVNKRVQDIHPTVPNPYNLLSSLPPSHTWYSVLDLKDAFFCLKLHPNSQPLFAFEWRDPEKGNTGQLTWTRLPQGFKNSPTLFNEALHRDLASFRALNPQVVMLQYVDDLLVAAPTYRDCKEGTRRLLQELSKLGYRVSAKKAQLCREEVTYLGYLLKGGKRWLTPARKATVMKIPTPTTPRQVREFLGTAGFCRLWIPGFASLAAPLYPLTRPKVPFTWTEAHQEAFGRIKEALLSAPALALPDLTKPFALYVDEKEGVARGVLTQTLGPWRRPVAYLSKKLDPVASGWPTCLKAIAAVALLLKDADKLTLGQNVLVIAPHNLESIVRQPPDRWMTNARMTHYQSLLLNERVSFAPPAILNPATLLPVESDDTPIHICSEILAEETGTRPDLRDQPLPGVPAWYTDGSSFIMDGRRQAGAAIVDNKRTVWASNLPEGTSAQKAELIALTQALRLAEGKSINIYTDSRYAFATAHVHGAIYKQRGWLTSAGKDIKNKEEILALLEAIHLPKRVAIIHCPGHQRGTDPVATGNRKADEAAKQAAQSTRILTETTKNAGKRTADGSEFEKRTADGSEFESPKKKAKVE

SEQ ID NO: 1642 - protein, 2122 aa, synthetic construct
MPAAKRVKLDGGDKKYSIGLDIGTNSVGWAVITDEYKVPSKKFKVLGNTDRHSIKKNLIGALLFDSGETAEATRLKRTARRRYTRRKNRICYLQEIFSNEMAKVDDSFFHRLEESFLVEEDKKHERHPIFGNIVDEVAYHEKYPTIYHLRKKLVDSTDKADLRLIYLALAHMIKFRGHFLIEGDLNPDNSDVDKLFIQLVQTYNQLFEENPINASGVDAKAILSARLSKSRRLENLIAQLPGEKKNGLFGNLIALSLGLTPNFKSNFDLAEDAKLQLSKDTYDDDLDNLLAQIGDQYADLFLAAKNLSDAILLSDILRVNTEITKAPLSASMIKRYDEHHQDLTLLKALVRQQLPEKYKEIFFDQSKNGYAGYIDGGASQEEFYKFIKPILEKMDGTEELLVKLNREDLLRKQRTFDNGSIPHQIHLGELHAILRRQEDFYPFLKDNREKIEKILTFRIPYYVGPLARGNSRFAWMTRKSEETITPWNFEEVVDKGASAQSFIERMTNFDKNLPNEKVLPKHSLLYEYFTVYNELTKVKYVTEGMRKPAFLSGEQKKAIVDLLFKTNRKVTVKQLKEDYFKKIECFDSVEISGVEDRFNASLGTYHDLLKIIKDKDFLDNEENEDILEDIVLTLTLFEDREMIEERLKTYAHLFDDKVMKQLKRRRYTGWGRLSRKLINGIRDKQSGKTILDFLKSDGFANRNFMQLIHDDSLTFKEDIQKAQVSGQGDSLHEHIANLAGSPAIKKGILQTVKVVDELVKVMGRHKPENIVIEMARENQTTQKGQKNSRERMKRIEEGIKELGSQILKEHPVENTQLQNEKLYLYYLQNGRDMYVDQELDINRLSDYDVDHIVPQSFLKDDSIDNKVLTRSDKARGKSDNVPSEEVVKKMKNYWRQLLNAKLITQRKFDNLTKAERGGLSELDKAGFIKRQLVETRQITKHVAQILDSRMNTKYDENDKLIREVKVITLKSKLVSDFRKDFQFYKVREINNYHHAHDAYLNAVVGTALIKKYPKLESEFVYGDYKVYDVRKMIAKSEQEIGKATAKYFFYSNIMNFFKTEITLANGEIRKRPLIETNGETGEIVWDKGRDFATVRKVLSMPQVNIVKKTEVQTGGFSKESILPKRNSDKLIARKKDWDPKKYGGFDSPTVAYSVLVVAKVEKGKSKKLKSVKELLGITIMERSSFEKNPIDFLEAKGYKEVKKDLIIKLPKYSLFELENGRKRMLASAGELQKGNELALPSKYVNFLYLASHYEKLKGSPEDNEQKQLFVEQHKHYLDEIIEQISEFSKRVILADANLDKVLSAYNKHRDKPIREQAENIIHLFTLTNLGAPAAFKYFDTTIDRKRYTSTKEVLDATLIHQSITGLYETRIDLSQLGGDGGGGGGGSGGLLGRDLLTKLKAQIQFSTEGPQVTWEDRPAMCLVLNLEEEYRLHEKPVPPSIDPSWLQLFPMVWAEKAGMGLANQVPPVVVELKSDASPVAVRQYPMSKEAREGIRPHIQRFLDLGILVPCQSPWNTPLLPVKKPGTNDYRPVQDLREVNKRVQDIHPTVPNPYNLLSSLPPSHTWYSVLDLKDAFFCLKLHPNSQPLFAFEWRDPEKGNTGQLTWTRLPQGFKNSPTLFNEALHRDLASFRALNPQVVMLQYVDDLLVAAPTYRDCKEGTRRLLQELSKLGYRVSAKKAQLCREEVTYLGYLLKGGKRWLTPARKATVMKIPTPTTPRQVREFLGTAGFCRLWIPGFASLAAPLYPLTRPKVPFTWTEAHQEAFGRIKEALLSAPALALPDLTKPFALYVDEKEGVARGVLTQTLGPWRRPVAYLSKKLDPVASGWPTCLKAIAAVALLLKDADKLTLGQNVLVIAPHNLESIVRQPPDRWMTNARMTHYQSLLLNERVSFAPPAILNPATLLPVESDDTPIHICSEILAEETGTRPDLRDQPLPGVPAWYTDGSSFIMDGRRQAGAAIVDNKRTVWASNLPEGTSAQKAELIALTQALRLAEGKSINIYTDSRYAFATAHVHGAIYKQRGWLTSAGKDIKNKEEILALLEAIHLPKRVAIIHCPGHQRGTDPVATGNRKADEAAKQAAQSTRILTETTKNAGKRTADGSEFEKRTADGSEFESPKKKAKVE

SEQ ID NO: 1643 - protein, 2121 aa, synthetic construct
MPAAKRVKLDGGDKKYSIGLDIGTNSVGWAVITDEYKVPSKKFKVLGNTDRHSIKKNLIGALLFDSGETAEATRLKRTARRRYTRRKNRICYLQEIFSNEMAKVDDSFFHRLEESFLVEEDKKHERHPIFGNIVDEVAYHEKYPTIYHLRKKLVDSTDKADLRLIYLALAHMIKFRGHFLIEGDLNPDNSDVDKLFIQLVQTYNQLFEENPINASGVDAKAILSARLSKSRRLENLIAQLPGEKKNGLFGNLIALSLGLTPNFKSNFDLAEDAKLQLSKDTYDDDLDNLLAQIGDQYADLFLAAKNLSDAILLSDILRVNTEITKAPLSASMIKRYDEHHQDLTLLKALVRQQLPEKYKEIFFDQSKNGYAGYIDGGASQEEFYKFIKPILEKMDGTEELLVKLNREDLLRKQRTFDNGSIPHQIHLGELHAILRRQEDFYPFLKDNREKIEKILTFRIPYYVGPLARGNSRFAWMTRKSEETITPWNFEEVVDKGASAQSFIERMTNFDKNLPNEKVLPKHSLLYEYFTVYNELTKVKYVTEGMRKPAFLSGEQKKAIVDLLFKTNRKVTVKQLKEDYFKKIECFDSVEISGVEDRFNASLGTYHDLLKIIKDKDFLDNEENEDILEDIVLTLTLFEDREMIEERLKTYAHLFDDKVMKQLKRRRYTGWGRLSRKLINGIRDKQSGKTILDFLKSDGFANRNFMQLIHDDSLTFKEDIQKAQVSGQGDSLHEHIANLAGSPAIKKGILQTVKVVDELVKVMGRHKPENIVIEMARENQTTQKGQKNSRERMKRIEEGIKELGSQILKEHPVENTQLQNEKLYLYYLQNGRDMYVDQELDINRLSDYDVDHIVPQSFLKDDSIDNKVLTRSDKARGKSDNVPSEEVVKKMKNYWRQLLNAKLITQRKFDNLTKAERGGLSELDKAGFIKRQLVETRQITKHVAQILDSRMNTKYDENDKLIREVKVITLKSKLVSDFRKDFQFYKVREINNYHHAHDAYLNAVVGTALIKKYPKLESEFVYGDYKVYDVRKMIAKSEQEIGKATAKYFFYSNIMNFFKTEITLANGEIRKRPLIETNGETGEIVWDKGRDFATVRKVLSMPQVNIVKKTEVQTGGFSKESILPKRNSDKLIARKKDWDPKKYGGFDSPTVAYSVLVVAKVEKGKSKKLKSVKELLGITIMERSSFEKNPIDFLEAKGYKEVKKDLIIKLPKYSLFELENGRKRMLASAGELQKGNELALPSKYVNFLYLASHYEKLKGSPEDNEQKQLFVEQHKHYLDEIIEQISEFSKRVILADANLDKVLSAYNKHRDKPIREQAENIIHLFTLTNLGAPAAFKYFDTTIDRKRYTSTKEVLDATLIHQSITGLYETRIDLSQLGGDGGGGGGGGGLLGRDLLTKLKAQIQFSTEGPQVTWEDRPAMCLVLNLEEEYRLHEKPVPPSIDPSWLQLFPMVWAEKAGMGLANQVPPVVVELKSDASPVAVRQYPMSKEAREGIRPHIQRFLDLGILVPCQSPWNTPLLPVKKPGTNDYRPVQDLREVNKRVQDIHPTVPNPYNLLSSLPPSHTWYSVLDLKDAFFCLKLHPNSQPLFAFEWRDPEKGNTGQLTWTRLPQGFKNSPTLFNEALHRDLASFRALNPQVVMLQYVDDLLVAAPTYRDCKEGTRRLLQELSKLGYRVSAKKAQLCREEVTYLGYLLKGGKRWLTPARKATVMKIPTPTTPRQVREFLGTAGFCRLWIPGFASLAAPLYPLTRPKVPFTWTEAHQEAFGRIKEALLSAPALALPDLTKPFALYVDEKEGVARGVLTQTLGPWRRPVAYLSKKLDPVASGWPTCLKAIAAVALLLKDADKLTLGQNVLVIAPHNLESIVRQPPDRWMTNARMTHYQSLLLNERVSFAPPAILNPATLLPVESDDTPIHICSEILAEETGTRPDLRDQPLPGVPAWYTDGSSFIMDGRRQAGAAIVDNKRTVWASNLPEGTSAQKAELIALTQALRLAEGKSINIYTDSRYAFATAHVHGAIYKQRGWLTSAGKDIKNKEEILALLEAIHLPKRVAIIHCPGHQRGTDPVATGNRKADEAAKQAAQSTRILTETTKNAGKRTADGSEFEKRTADGSEFESPKKKAKVE

SEQ ID NO: 1644 - protein, 2127 aa, synthetic construct
MPAAKRVKLDGGDKKYSIGLDIGTNSVGWAVITDEYKVPSKKFKVLGNTDRHSIKKNLIGALLFDSGETAEATRLKRTARRRYTRRKNRICYLQEIFSNEMAKVDDSFFHRLEESFLVEEDKKHERHPIFGNIVDEVAYHEKYPTIYHLRKKLVDSTDKADLRLIYLALAHMIKFRGHFLIEGDLNPDNSDVDKLFIQLVQTYNQLFEENPINASGVDAKAILSARLSKSRRLENLIAQLPGEKKNGLFGNLIALSLGLTPNFKSNFDLAEDAKLQLSKDTYDDDLDNLLAQIGDQYADLFLAAKNLSDAILLSDILRVNTEITKAPLSASMIKRYDEHHQDLTLLKALVRQQLPEKYKEIFFDQSKNGYAGYIDGGASQEEFYKFIKPILEKMDGTEELLVKLNREDLLRKQRTFDNGSIPHQIHLGELHAILRRQEDFYPFLKDNREKIEKILTFRIPYYVGPLARGNSRFAWMTRKSEETITPWNFEEVVDKGASAQSFIERMTNFDKNLPNEKVLPKHSLLYEYFTVYNELTKVKYVTEGMRKPAFLSGEQKKAIVDLLFKTNRKVTVKQLKEDYFKKIECFDSVEISGVEDRFNASLGTYHDLLKIIKDKDFLDNEENEDILEDIVLTLTLFEDREMIEERLKTYAHLFDDKVMKQLKRRRYTGWGRLSRKLINGIRDKQSGKTILDFLKSDGFANRNFMQLIHDDSLTFKEDIQKAQVSGQGDSLHEHIANLAGSPAIKKGILQTVKVVDELVKVMGRHKPENIVIEMARENQTTQKGQKNSRERMKRIEEGIKELGSQILKEHPVENTQLQNEKLYLYYLQNGRDMYVDQELDINRLSDYDVDHIVPQSFLKDDSIDNKVLTRSDKARGKSDNVPSEEVVKKMKNYWRQLLNAKLITQRKFDNLTKAERGGLSELDKAGFIKRQLVETRQITKHVAQILDSRMNTKYDENDKLIREVKVITLKSKLVSDFRKDFQFYKVREINNYHHAHDAYLNAVVGTALIKKYPKLESEFVYGDYKVYDVRKMIAKSEQEIGKATAKYFFYSNIMNFFKTEITLANGEIRKRPLIETNGETGEIVWDKGRDFATVRKVLSMPQVNIVKKTEVQTGGFSKESILPKRNSDKLIARKKDWDPKKYGGFDSPTVAYSVLVVAKVEKGKSKKLKSVKELLGITIMERSSFEKNPIDFLEAKGYKEVKKDLIIKLPKYSLFELENGRKRMLASAGELQKGNELALPSKYVNFLYLASHYEKLKGSPEDNEQKQLFVEQHKHYLDEIIEQISEFSKRVILADANLDKVLSAYNKHRDKPIREQAENIIHLFTLTNLGAPAAFKYFDTTIDRKRYTSTKEVLDATLIHQSITGLYETRIDLSQLGGDGGGGSGSSEAAAKGGLLGRDLLTKLKAQIQFSTEGPQVTWEDRPAMCLVLNLEEEYRLHEKPVPPSIDPSWLQLFPMVWAEKAGMGLANQVPPVVVELKSDASPVAVRQYPMSKEAREGIRPHIQRFLDLGILVPCQSPWNTPLLPVKKPGTNDYRPVQDLREVNKRVQDIHPTVPNPYNLLSSLPPSHTWYSVLDLKDAFFCLKLHPNSQPLFAFEWRDPEKGNTGQLTWTRLPQGFKNSPTLFNEALHRDLASFRALNPQVVMLQYVDDLLVAAPTYRDCKEGTRRLLQELSKLGYRVSAKKAQLCREEVTYLGYLLKGGKRWLTPARKATVMKIPTPTTPRQVREFLGTAGFCRLWIPGFASLAAPLYPLTRPKVPFTWTEAHQEAFGRIKEALLSAPALALPDLTKPFALYVDEKEGVARGVLTQTLGPWRRPVAYLSKKLDPVASGWPTCLKAIAAVALLLKDADKLTLGQNVLVIAPHNLESIVRQPPDRWMTNARMTHYQSLLLNERVSFAPPAILNPATLLPVESDDTPIHICSEILAEETGTRPDLRDQPLPGVPAWYTDGSSFIMDGRRQAGAAIVDNKRTVWASNLPEGTSAQKAELIALTQALRLAEGKSINIYTDSRYAFATAHVHGAIYKQRGWLTSAGKDIKNKEEILALLEAIHLPKRVAIIHCPGHQRGTDPVATGNRKADEAAKQAAQSTRILTETTKNAGKRTADGSEFEKRTADGSEFESPKKKAKVE

SEQ ID NO: 1645 - protein, 2127 aa, synthetic construct
MPAAKRVKLDGGDKKYSIGLDIGTNSVGWAVITDEYKVPSKKFKVLGNTDRHSIKKNLIGALLFDSGETAEATRLKRTARRRYTRRKNRICYLQEIFSNEMAKVDDSFFHRLEESFLVEEDKKHERHPIFGNIVDEVAYHEKYPTIYHLRKKLVDSTDKADLRLIYLALAHMIKFRGHFLIEGDLNPDNSDVDKLFIQLVQTYNQLFEENPINASGVDAKAILSARLSKSRRLENLIAQLPGEKKNGLFGNLIALSLGLTPNFKSNFDLAEDAKLQLSKDTYDDDLDNLLAQIGDQYADLFLAAKNLSDAILLSDILRVNTEITKAPLSASMIKRYDEHHQDLTLLKALVRQQLPEKYKEIFFDQSKNGYAGYIDGGASQEEFYKFIKPILEKMDGTEELLVKLNREDLLRKQRTFDNGSIPHQIHLGELHAILRRQEDFYPFLKDNREKIEKILTFRIPYYVGPLARGNSRFAWMTRKSEETITPWNFEEVVDKGASAQSFIERMTNFDKNLPNEKVLPKHSLLYEYFTVYNELTKVKYVTEGMRKPAFLSGEQKKAIVDLLFKTNRKVTVKQLKEDYFKKIECFDSVEISGVEDRFNASLGTYHDLLKIIKDKDFLDNEENEDILEDIVLTLTLFEDREMIEERLKTYAHLFDDKVMKQLKRRRYTGWGRLSRKLINGIRDKQSGKTILDFLKSDGFANRNFMQLIHDDSLTFKEDIQKAQVSGQGDSLHEHIANLAGSPAIKKGILQTVKVVDELVKVMGRHKPENIVIEMARENQTTQKGQKNSRERMKRIEEGIKELGSQILKEHPVENTQLQNEKLYLYYLQNGRDMYVDQELDINRLSDYDVDHIVPQSFLKDDSIDNKVLTRSDKARGKSDNVPSEEVVKKMKNYWRQLLNAKLITQRKFDNLTKAERGGLSELDKAGFIKRQLVETRQITKHVAQILDSRMNTKYDENDKLIREVKVITLKSKLVSDFRKDFQFYKVREINNYHHAHDAYLNAVVGTALIKKYPKLESEFVYGDYKVYDVRKMIAKSEQEIGKATAKYFFYSNIMNFFKTEITLANGEIRKRPLIETNGETGEIVWDKGRDFATVRKVLSMPQVNIVKKTEVQTGGFSKESILPKRNSDKLIARKKDWDPKKYGGFDSPTVAYSVLVVAKVEKGKSKKLKSVKELLGITIMERSSFEKNPIDFLEAKGYKEVKKDLIIKLPKYSLFELENGRKRMLASAGELQKGNELALPSKYVNFLYLASHYEKLKGSPEDNEQKQLFVEQHKHYLDEIIEQISEFSKRVILADANLDKVLSAYNKHRDKPIREQAENIIHLFTLTNLGAPAAFKYFDTTIDRKRYTSTKEVLDATLIHQSITGLYETRIDLSQLGGDGGEAAAKGGSGSSGGLLGRDLLTKLKAQIQFSTEGPQVTWEDRPAMCLVLNLEEEYRLHEKPVPPSIDPSWLQLFPMVWAEKAGMGLANQVPPVVVELKSDASPVAVRQYPMSKEAREGIRPHIQRFLDLGILVPCQSPWNTPLLPVKKPGTNDYRPVQDLREVNKRVQDIHPTVPNPYNLLSSLPPSHTWYSVLDLKDAFFCLKLHPNSQPLFAFEWRDPEKGNTGQLTWTRLPQGFKNSPTLFNEALHRDLASFRALNPQVVMLQYVDDLLVAAPTYRDCKEGTRRLLQELSKLGYRVSAKKAQLCREEVTYLGYLLKGGKRWLTPARKATVMKIPTPTTPRQVREFLGTAGFCRLWIPGFASLAAPLYPLTRPKVPFTWTEAHQEAFGRIKEALLSAPALALPDLTKPFALYVDEKEGVARGVLTQTLGPWRRPVAYLSKKLDPVASGWPTCLKAIAAVALLLKDADKLTLGQNVLVIAPHNLESIVRQPPDRWMTNARMTHYQSLLLNERVSFAPPAILNPATLLPVESDDTPIHICSEILAEETGTRPDLRDQPLPGVPAWYTDGSSFIMDGRRQAGAAIVDNKRTVWASNLPEGTSAQKAELIALTQALRLAEGKSINIYTDSRYAFATAHVHGAIYKQRGWLTSAGKDIKNKEEILALLEAIHLPKRVAIIHCPGHQRGTDPVATGNRKADEAAKQAAQSTRILTETTKNAGKRTADGSEFEKRTADGSEFESPKKKAKVE

SEQ ID NO: 1646 - protein, 2127 aa, synthetic construct
MPAAKRVKLDGGDKKYSIGLDIGTNSVGWAVITDEYKVPSKKFKVLGNTDRHSIKKNLIGALLFDSGETAEATRLKRTARRRYTRRKNRICYLQEIFSNEMAKVDDSFFHRLEESFLVEEDKKHERHPIFGNIVDEVAYHEKYPTIYHLRKKLVDSTDKADLRLIYLALAHMIKFRGHFLIEGDLNPDNSDVDKLFIQLVQTYNQLFEENPINASGVDAKAILSARLSKSRRLENLIAQLPGEKKNGLFGNLIALSLGLTPNFKSNFDLAEDAKLQLSKDTYDDDLDNLLAQIGDQYADLFLAAKNLSDAILLSDILRVNTEITKAPLSASMIKRYDEHHQDLTLLKALVRQQLPEKYKEIFFDQSKNGYAGYIDGGASQEEFYKFIKPILEKMDGTEELLVKLNREDLLRKQRTFDNGSIPHQIHLGELHAILRRQEDFYPFLKDNREKIEKILTFRIPYYVGPLARGNSRFAWMTRKSEETITPWNFEEVVDKGASAQSFIERMTNFDKNLPNEKVLPKHSLLYEYFTVYNELTKVKYVTEGMRKPAFLSGEQKKAIVDLLFKTNRKVTVKQLKEDYFKKIECFDSVEISGVEDRFNASLGTYHDLLKIIKDKDFLDNEENEDILEDIVLTLTLFEDREMIEERLKTYAHLFDDKVMKQLKRRRYTGWGRLSRKLINGIRDKQSGKTILDFLKSDGFANRNFMQLIHDDSLTFKEDIQKAQVSGQGDSLHEHIANLAGSPAIKKGILQTVKVVDELVKVMGRHKPENIVIEMARENQTTQKGQKNSRERMKRIEEGIKELGSQILKEHPVENTQLQNEKLYLYYLQNGRDMYVDQELDINRLSDYDVDHIVPQSFLKDDSIDNKVLTRSDKARGKSDNVPSEEVVKKMKNYWRQLLNAKLITQRKFDNLTKAERGGLSELDKAGFIKRQLVETRQITKHVAQILDSRMNTKYDENDKLIREVKVITLKSKLVSDFRKDFQFYKVREINNYHHAHDAYLNAVVGTALIKKYPKLESEFVYGDYKVYDVRKMIAKSEQEIGKATAKYFFYSNIMNFFKTEITLANGEIRKRPLIETNGETGEIVWDKGRDFATVRKVLSMPQVNIVKKTEVQTGGFSKESILPKRNSDKLIARKKDWDPKKYGGFDSPTVAYSVLVVAKVEKGKSKKLKSVKELLGITIMERSSFEKNPIDFLEAKGYKEVKKDLIIKLPKYSLFELENGRKRMLASAGELQKGNELALPSKYVNFLYLASHYEKLKGSPEDNEQKQLFVEQHKHYLDEIIEQISEFSKRVILADANLDKVLSAYNKHRDKPIREQAENIIHLFTLTNLGAPAAFKYFDTTIDRKRYTSTKEVLDATLIHQSITGLYETRIDLSQLGGDGGEAAAKGGGGGSGGLLGRDLLTKLKAQIQFSTEGPQVTWEDRPAMCLVLNLEEEYRLHEKPVPPSIDPSWLQLFPMVWAEKAGMGLANQVPPVVVELKSDASPVAVRQYPMSKEAREGIRPHIQRFLDLGILVPCQSPWNTPLLPVKKPGTNDYRPVQDLREVNKRVQDIHPTVPNPYNLLSSLPPSHTWYSVLDLKDAFFCLKLHPNSQPLFAFEWRDPEKGNTGQLTWTRLPQGFKNSPTLFNEALHRDLASFRALNPQVVMLQYVDDLLVAAPTYRDCKEGTRRLLQELSKLGYRVSAKKAQLCREEVTYLGYLLKGGKRWLTPARKATVMKIPTPTTPRQVREFLGTAGFCRLWIPGFASLAAPLYPLTRPKVPFTWTEAHQEAFGRIKEALLSAPALALPDLTKPFALYVDEKEGVARGVLTQTLGPWRRPVAYLSKKLDPVASGWPTCLKAIAAVALLLKDADKLTLGQNVLVIAPHNLESIVRQPPDRWMTNARMTHYQSLLLNERVSFAPPAILNPATLLPVESDDTPIHICSEILAEETGTRPDLRDQPLPGVPAWYTDGSSFIMDGRRQAGAAIVDNKRTVWASNLPEGTSAQKAELIALTQALRLAEGKSINIYTDSRYAFATAHVHGAIYKQRGWLTSAGKDIKNKEEILALLEAIHLPKRVAIIHCPGHQRGTDPVATGNRKADEAAKQAAQSTRILTETTKNAGKRTADGSEFEKRTADGSEFESPKKKAKVE

SEQ ID NO: 1647 - protein, 2127 aa, synthetic construct
MPAAKRVKLDGGDKKYSIGLDIGTNSVGWAVITDEYKVPSKKFKVLGNTDRHSIKKNLIGALLFDSGETAEATRLKRTARRRYTRRKNRICYLQEIFSNEMAKVDDSFFHRLEESFLVEEDKKHERHPIFGNIVDEVAYHEKYPTIYHLRKKLVDSTDKADLRLIYLALAHMIKFRGHFLIEGDLNPDNSDVDKLFIQLVQTYNQLFEENPINASGVDAKAILSARLSKSRRLENLIAQLPGEKKNGLFGNLIALSLGLTPNFKSNFDLAEDAKLQLSKDTYDDDLDNLLAQIGDQYADLFLAAKNLSDAILLSDILRVNTEITKAPLSASMIKRYDEHHQDLTLLKALVRQQLPEKYKEIFFDQSKNGYAGYIDGGASQEEFYKFIKPILEKMDGTEELLVKLNREDLLRKQRTFDNGSIPHQIHLGELHAILRRQEDFYPFLKDNREKIEKILTFRIPYYVGPLARGNSRFAWMTRKSEETITPWNFEEVVDKGASAQSFIERMTNFDKNLPNEKVLPKHSLLYEYFTVYNELTKVKYVTEGMRKPAFLSGEQKKAIVDLLFKTNRKVTVKQLKEDYFKKIECFDSVEISGVEDRFNASLGTYHDLLKIIKDKDFLDNEENEDILEDIVLTLTLFEDREMIEERLKTYAHLFDDKVMKQLKRRRYTGWGRLSRKLINGIRDKQSGKTILDFLKSDGFANRNFMQLIHDDSLTFKEDIQKAQVSGQGDSLHEHIANLAGSPAIKKGILQTVKVVDELVKVMGRHKPENIVIEMARENQTTQKGQKNSRERMKRIEEGIKELGSQILKEHPVENTQLQNEKLYLYYLQNGRDMYVDQELDINRLSDYDVDHIVPQSFLKDDSIDNKVLTRSDKARGKSDNVPSEEVVKKMKNYWRQLLNAKLITQRKFDNLTKAERGGLSELDKAGFIKRQLVETRQITKHVAQILDSRMNTKYDENDKLIREVKVITLKSKLVSDFRKDFQFYKVREINNYHHAHDAYLNAVVGTALIKKYPKLESEFVYGDYKVYDVRKMIAKSEQEIGKATAKYFFYSNIMNFFKTEITLANGEIRKRPLIETNGETGEIVWDKGRDFATVRKVLSMPQVNIVKKTEVQTGGFSKESILPKRNSDKLIARKKDWDPKKYGGFDSPTVAYSVLVVAKVEKGKSKKLKSVKELLGITIMERSSFEKNPIDFLEAKGYKEVKKDLIIKLPKYSLFELENGRKRMLASAGELQKGNELALPSKYVNFLYLASHYEKLKGSPEDNEQKQLFVEQHKHYLDEIIEQISEFSKRVILADANLDKVLSAYNKHRDKPIREQAENIIHLFTLTNLGAPAAFKYFDTTIDRKRYTSTKEVLDATLIHQSITGLYETRIDLSQLGGDGGGGSEAAAKGGGGGLLGRDLLTKLKAQIQFSTEGPQVTWEDRPAMCLVLNLEEEYRLHEKPVPPSIDPSWLQLFPMVWAEKAGMGLANQVPPVVVELKSDASPVAVRQYPMSKEAREGIRPHIQRFLDLGILVPCQSPWNTPLLPVKKPGTNDYRPVQDLREVNKRVQDIHPTVPNPYNLLSSLPPSHTWYSVLDLKDAFFCLKLHPNSQPLFAFEWRDPEKGNTGQLTWTRLPQGFKNSPTLFNEALHRDLASFRALNPQVVMLQYVDDLLVAAPTYRDCKEGTRRLLQELSKLGYRVSAKKAQLCREEVTYLGYLLKGGKRWLTPARKATVMKIPTPTTPRQVREFLGTAGFCRLWIPGFASLAAPLYPLTRPKVPFTWTEAHQEAFGRIKEALLSAPALALPDLTKPFALYVDEKEGVARGVLTQTLGPWRRPVAYLSKKLDPVASGWPTCLKAIAAVALLLKDADKLTLGQNVLVIAPHNLESIVRQPPDRWMTNARMTHYQSLLLNERVSFAPPAILNPATLLPVESDDTPIHICSEILAEETGTRPDLRDQPLPGVPAWYTDGSSFIMDGRRQAGAAIVDNKRTVWASNLPEGTSAQKAELIALTQALRLAEGKSINIYTDSRYAFATAHVHGAIYKQRGWLTSAGKDIKNKEEILALLEAIHLPKRVAIIHCPGHQRGTDPVATGNRKADEAAKQAAQSTRILTETTKNAGKRTADGSEFEKRTADGSEFESPKKKAKVE

SEQ ID NO: 1648 - protein, 2125 aa, synthetic construct
MPAAKRVKLDGGDKKYSIGLDIGTNSVGWAVITDEYKVPSKKFKVLGNTDRHSIKKNLIGALLFDSGETAEATRLKRTARRRYTRRKNRICYLQEIFSNEMAKVDDSFFHRLEESFLVEEDKKHERHPIFGNIVDEVAYHEKYPTIYHLRKKLVDSTDKADLRLIYLALAHMIKFRGHFLIEGDLNPDNSDVDKLFIQLVQTYNQLFEENPINASGVDAKAILSARLSKSRRLENLIAQLPGEKKNGLFGNLIALSLGLTPNFKSNFDLAEDAKLQLSKDTYDDDLDNLLAQIGDQYADLFLAAKNLSDAILLSDILRVNTEITKAPLSASMIKRYDEHHQDLTLLKALVRQQLPEKYKEIFFDQSKNGYAGYIDGGASQEEFYKFIKPILEKMDGTEELLVKLNREDLLRKQRTFDNGSIPHQIHLGELHAILRRQEDFYPFLKDNREKIEKILTFRIPYYVGPLARGNSRFAWMTRKSEETITPWNFEEVVDKGASAQSFIERMTNFDKNLPNEKVLPKHSLLYEYFTVYNELTKVKYVTEGMRKPAFLSGEQKKAIVDLLFKTNRKVTVKQLKEDYFKKIECFDSVEISGVEDRFNASLGTYHDLLKIIKDKDFLDNEENEDILEDIVLTLTLFEDREMIEERLKTYAHLFDDKVMKQLKRRRYTGWGRLSRKLINGIRDKQSGKTILDFLKSDGFANRNFMQLIHDDSLTFKEDIQKAQVSGQGDSLHEHIANLAGSPAIKKGILQTVKVVDELVKVMGRHKPENIVIEMARENQTTQKGQKNSRERMKRIEEGIKELGSQILKEHPVENTQLQNEKLYLYYLQNGRDMYVDQELDINRLSDYDVDHIVPQSFLKDDSIDNKVLTRSDKARGKSDNVPSEEVVKKMKNYWRQLLNAKLITQRKFDNLTKAERGGLSELDKAGFIKRQLVETRQITKHVAQILDSRMNTKYDENDKLIREVKVITLKSKLVSDFRKDFQFYKVREINNYHHAHDAYLNAVVGTALIKKYPKLESEFVYGDYKVYDVRKMIAKSEQEIGKATAKYFFYSNIMNFFKTEITLANGEIRKRPLIETNGETGEIVWDKGRDFATVRKVLSMPQVNIVKKTEVQTGGFSKESILPKRNSDKLIARKKDWDPKKYGGFDSPTVAYSVLVVAKVEKGKSKKLKSVKELLGITIMERSSFEKNPIDFLEAKGYKEVKKDLIIKLPKYSLFELENGRKRMLASAGELQKGNELALPSKYVNFLYLASHYEKLKGSPEDNEQKQLFVEQHKHYLDEIIEQISEFSKRVILADANLDKVLSAYNKHRDKPIREQAENIIHLFTLTNLGAPAAFKYFDTTIDRKRYTSTKEVLDATLIHQSITGLYETRIDLSQLGGDGGGGSPAPGSSGGLLGRDLLTKLKAQIQFSTEGPQVTWEDRPAMCLVLNLEEEYRLHEKPVPPSIDPSWLQLFPMVWAEKAGMGLANQVPPVVVELKSDASPVAVRQYPMSKEAREGIRPHIQRFLDLGILVPCQSPWNTPLLPVKKPGTNDYRPVQDLREVNKRVQDIHPTVPNPYNLLSSLPPSHTWYSVLDLKDAFFCLKLHPNSQPLFAFEWRDPEKGNTGQLTWTRLPQGFKNSPTLFNEALHRDLASFRALNPQVVMLQYVDDLLVAAPTYRDCKEGTRRLLQELSKLGYRVSAKKAQLCREEVTYLGYLLKGGKRWLTPARKATVMKIPTPTTPRQVREFLGTAGFCRLWIPGFASLAAPLYPLTRPKVPFTWTEAHQEAFGRIKEALLSAPALALPDLTKPFALYVDEKEGVARGVLTQTLGPWRRPVAYLSKKLDPVASGWPTCLKAIAAVALLLKDADKLTLGQNVLVIAPHNLESIVRQPPDRWMTNARMTHYQSLLLNERVSFAPPAILNPATLLPVESDDTPIHICSEILAEETGTRPDLRDQPLPGVPAWYTDGSSFIMDGRRQAGAAIVDNKRTVWASNLPEGTSAQKAELIALTQALRLAEGKSINIYTDSRYAFATAHVHGAIYKQRGWLTSAGKDIKNKEEILALLEAIHLPKRVAIIHCPGHQRGTDPVATGNRKADEAAKQAAQSTRILTETTKNAGKRTADGSEFEKRTADGSEFESPKKKAKVE

SEQ ID NO: 1649 - protein, 2149 aa, synthetic construct
MPAAKRVKLDGGDKKYSIGLDIGTNSVGWAVITDEYKVPSKKFKVLGNTDRHSIKKNLIGALLFDSGETAEATRLKRTARRRYTRRKNRICYLQEIFSNEMAKVDDSFFHRLEESFLVEEDKKHERHPIFGNIVDEVAYHEKYPTIYHLRKKLVDSTDKADLRLIYLALAHMIKFRGHFLIEGDLNPDNSDVDKLFIQLVQTYNQLFEENPINASGVDAKAILSARLSKSRRLENLIAQLPGEKKNGLFGNLIALSLGLTPNFKSNFDLAEDAKLQLSKDTYDDDLDNLLAQIGDQYADLFLAAKNLSDAILLSDILRVNTEITKAPLSASMIKRYDEHHQDLTLLKALVRQQLPEKYKEIFFDQSKNGYAGYIDGGASQEEFYKFIKPILEKMDGTEELLVKLNREDLLRKQRTFDNGSIPHQIHLGELHAILRRQEDFYPFLKDNREKIEKILTFRIPYYVGPLARGNSRFAWMTRKSEETITPWNFEEVVDKGASAQSFIERMTNFDKNLPNEKVLPKHSLLYEYFTVYNELTKVKYVTEGMRKPAFLSGEQKKAIVDLLFKTNRKVTVKQLKEDYFKKIECFDSVEISGVEDRFNASLGTYHDLLKIIKDKDFLDNEENEDILEDIVLTLTLFEDREMIEERLKTYAHLFDDKVMKQLKRRRYTGWGRLSRKLINGIRDKQSGKTILDFLKSDGFANRNFMQLIHDDSLTFKEDIQKAQVSGQGDSLHEHIANLAGSPAIKKGILQTVKVVDELVKVMGRHKPENIVIEMARENQTTQKGQKNSRERMKRIEEGIKELGSQILKEHPVENTQLQNEKLYLYYLQNGRDMYVDQELDINRLSDYDVDHIVPQSFLKDDSIDNKVLTRSDKARGKSDNVPSEEVVKKMKNYWRQLLNAKLITQRKFDNLTKAERGGLSELDKAGFIKRQLVETRQITKHVAQILDSRMNTKYDENDKLIREVKVITLKSKLVSDFRKDFQFYKVREINNYHHAHDAYLNAVVGTALIKKYPKLESEFVYGDYKVYDVRKMIAKSEQEIGKATAKYFFYSNIMNFFKTEITLANGEIRKRPLIETNGETGEIVWDKGRDFATVRKVLSMPQVNIVKKTEVQTGGFSKESILPKRNSDKLIARKKDWDPKKYGGFDSPTVAYSVLVVAKVEKGKSKKLKSVKELLGITIMERSSFEKNPIDFLEAKGYKEVKKDLIIKLPKYSLFELENGRKRMLASAGELQKGNELALPSKYVNFLYLASHYEKLKGSPEDNEQKQLFVEQHKHYLDEIIEQISEFSKRVILADANLDKVLSAYNKHRDKPIREQAENIIHLFTLTNLGAPAAFKYFDTTIDRKRYTSTKEVLDATLIHQSITGLYETRIDLSQLGGDGGSGGSSGGSSGSETPGTSESATPESSGGSSGGSSGGLLGRDLLTKLKAQIQFSTEGPQVTWEDRPAMCLVLNLEEEYRLHEKPVPPSIDPSWLQLFPMVWAEKAGMGLANQVPPVVVELKSDASPVAVRQYPMSKEAREGIRPHIQRFLDLGILVPCQSPWNTPLLPVKKPGTNDYRPVQDLREVNKRVQDIHPTVPNPYNLLSSLPPSHTWYSVLDLKDAFFCLKLHPNSQPLFAFEWRDPEKGNTGQLTWTRLPQGFKNSPTLFNEALHRDLASFRALNPQVVMLQYVDDLLVAAPTYRDCKEGTRRLLQELSKLGYRVSAKKAQLCREEVTYLGYLLKGGKRWLTPARKATVMKIPTPTTPRQVREFLGTAGFCRLWIPGFASLAAPLYPLTRPKVPFTWTEAHQEAFGRIKEALLSAPALALPDLTKPFALYVDEKEGVARGVLTQTLGPWRRPVAYLSKKLDPVASGWPTCLKAIAAVALLLKDADKLTLGQNVLVIAPHNLESIVRQPPDRWMTNARMTHYQSLLLNERVSFAPPAILNPATLLPVESDDTPIHICSEILAEETGTRPDLRDQPLPGVPAWYTDGSSFIMDGRRQAGAAIVDNKRTVWASNLPEGTSAQKAELIALTQALRLAEGKSINIYTDSRYAFATAHVHGAIYKQRGWLTSAGKDIKNKEEILALLEAIHLPKRVAIIHCPGHQRGTDPVATGNRKADEAAKQAAQSTRILTETTKNAGKRTADGSEFEKRTADGSEFESPKKKAKVE

SEQ ID NO: 1650 - protein, 2121 aa, synthetic construct
MPAAKRVKLDGGDKKYSIGLDIGTNSVGWAVITDEYKVPSKKFKVLGNTDRHSIKKNLIGALLFDSGETAEATRLKRTARRRYTRRKNRICYLQEIFSNEMAKVDDSFFHRLEESFLVEEDKKHERHPIFGNIVDEVAYHEKYPTIYHLRKKLVDSTDKADLRLIYLALAHMIKFRGHFLIEGDLNPDNSDVDKLFIQLVQTYNQLFEENPINASGVDAKAILSARLSKSRRLENLIAQLPGEKKNGLFGNLIALSLGLTPNFKSNFDLAEDAKLQLSKDTYDDDLDNLLAQIGDQYADLFLAAKNLSDAILLSDILRVNTEITKAPLSASMIKRYDEHHQDLTLLKALVRQQLPEKYKEIFFDQSKNGYAGYIDGGASQEEFYKFIKPILEKMDGTEELLVKLNREDLLRKQRTFDNGSIPHQIHLGELHAILRRQEDFYPFLKDNREKIEKILTFRIPYYVGPLARGNSRFAWMTRKSEETITPWNFEEVVDKGASAQSFIERMTNFDKNLPNEKVLPKHSLLYEYFTVYNELTKVKYVTEGMRKPAFLSGEQKKAIVDLLFKTNRKVTVKQLKEDYFKKIECFDSVEISGVEDRFNASLGTYHDLLKIIKDKDFLDNEENEDILEDIVLTLTLFEDREMIEERLKTYAHLFDDKVMKQLKRRRYTGWGRLSRKLINGIRDKQSGKTILDFLKSDGFANRNFMQLIHDDSLTFKEDIQKAQVSGQGDSLHEHIANLAGSPAIKKGILQTVKVVDELVKVMGRHKPENIVIEMARENQTTQKGQKNSRERMKRIEEGIKELGSQILKEHPVENTQLQNEKLYLYYLQNGRDMYVDQELDINRLSDYDVDHIVPQSFLKDDSIDNKVLTRSDKARGKSDNVPSEEVVKKMKNYWRQLLNAKLITQRKFDNLTKAERGGLSELDKAGFIKRQLVETRQITKHVAQILDSRMNTKYDENDKLIREVKVITLKSKLVSDFRKDFQFYKVREINNYHHAHDAYLNAVVGTALIKKYPKLESEFVYGDYKVYDVRKMIAKSEQEIGKATAKYFFYSNIMNFFKTEITLANGEIRKRPLIETNGETGEIVWDKGRDFATVRKVLSMPQVNIVKKTEVQTGGFSKESILPKRNSDKLIARKKDWDPKKYGGFDSPTVAYSVLVVAKVEKGKSKKLKSVKELLGITIMERSSFEKNPIDFLEAKGYKEVKKDLIIKLPKYSLFELENGRKRMLASAGELQKGNELALPSKYVNFLYLASHYEKLKGSPEDNEQKQLFVEQHKHYLDEIIEQISEFSKRVILADANLDKVLSAYNKHRDKPIREQAENIIHLFTLTNLGAPAAFKYFDTTIDRKRYTSTKEVLDATLIHQSITGLYETRIDLSQLGGDGGGGGGSGGLLGRDLLTKLKAQIQFSTEGPQVTWEDRPAMCLVLNLEEEYRLHEKPVPPSIDPSWLQLFPMVWAEKAGMGLANQVPPVVVELKSDASPVAVRQYPMSKEAREGIRPHIQRFLDLGILVPCQSPWNTPLLPVKKPGTNDYRPVQDLREVNKRVQDIHPTVPNPYNLLSSLPPSHTWYSVLDLKDAFFCLKLHPNSQPLFAFEWRDPEKGNTGQLTWTRLPQGFKNSPTLFNEALHRDLASFRALNPQVVMLQYVDDLLVAAPTYRDCKEGTRRLLQELSKLGYRVSAKKAQLCREEVTYLGYLLKGGKRWLTPARKATVMKIPTPTTPRQVREFLGTAGFCRLWIPGFASLAAPLYPLTRPKVPFTWTEAHQEAFGRIKEALLSAPALALPDLTKPFALYVDEKEGVARGVLTQTLGPWRRPVAYLSKKLDPVASGWPTCLKAIAAVALLLKDADKLTLGQNVLVIAPHNLESIVRQPPDRWMTNARMTHYQSLLLNERVSFAPPAILNPATLLPVESDDTPIHICSEILAEETGTRPDLRDQPLPGVPAWYTDGSSFIMDGRRQAGAAIVDNKRTVWASNLPEGTSAQKAELIALTQALRLAEGKSINIYTDSRYAFATAHVHGAIYKQRGWLTSAGKDIKNKEEILALLEAIHLPKRVAIIHCPGHQRGTDPVATGNRKADEAAKQAAQSTRILTETTKNAGKRTADGSEFEKRTADGSEFESPKKKAKVE

SEQ ID NO: 1651 - protein, 2125 aa, synthetic construct
MPAAKRVKLDGGDKKYSIGLDIGTNSVGWAVITDEYKVPSKKFKVLGNTDRHSIKKNLIGALLFDSGETAEATRLKRTARRRYTRRKNRICYLQEIFSNEMAKVDDSFFHRLEESFLVEEDKKHERHPIFGNIVDEVAYHEKYPTIYHLRKKLVDSTDKADLRLIYLALAHMIKFRGHFLIEGDLNPDNSDVDKLFIQLVQTYNQLFEENPINASGVDAKAILSARLSKSRRLENLIAQLPGEKKNGLFGNLIALSLGLTPNFKSNFDLAEDAKLQLSKDTYDDDLDNLLAQIGDQYADLFLAAKNLSDAILLSDILRVNTEITKAPLSASMIKRYDEHHQDLTLLKALVRQQLPEKYKEIFFDQSKNGYAGYIDGGASQEEFYKFIKPILEKMDGTEELLVKLNREDLLRKQRTFDNGSIPHQIHLGELHAILRRQEDFYPFLKDNREKIEKILTFRIPYYVGPLARGNSRFAWMTRKSEETITPWNFEEVVDKGASAQSFIERMTNFDKNLPNEKVLPKHSLLYEYFTVYNELTKVKYVTEGMRKPAFLSGEQKKAIVDLLFKTNRKVTVKQLKEDYFKKIECFDSVEISGVEDRFNASLGTYHDLLKIIKDKDFLDNEENEDILEDIVLTLTLFEDREMIEERLKTYAHLFDDKVMKQLKRRRYTGWGRLSRKLINGIRDKQSGKTILDFLKSDGFANRNFMQLIHDDSLTFKEDIQKAQVSGQGDSLHEHIANLAGSPAIKKGILQTVKVVDELVKVMGRHKPENIVIEMARENQTTQKGQKNSRERMKRIEEGIKELGSQILKEHPVENTQLQNEKLYLYYLQNGRDMYVDQELDINRLSDYDVDHIVPQSFLKDDSIDNKVLTRSDKARGKSDNVPSEEVVKKMKNYWRQLLNAKLITQRKFDNLTKAERGGLSELDKAGFIKRQLVETRQITKHVAQILDSRMNTKYDENDKLIREVKVITLKSKLVSDFRKDFQFYKVREINNYHHAHDAYLNAVVGTALIKKYPKLESEFVYGDYKVYDVRKMIAKSEQEIGKATAKYFFYSNIMNFFKTEITLANGEIRKRPLIETNGETGEIVWDKGRDFATVRKVLSMPQVNIVKKTEVQTGGFSKESILPKRNSDKLIARKKDWDPKKYGGFDSPTVAYSVLVVAKVEKGKSKKLKSVKELLGITIMERSSFEKNPIDFLEAKGYKEVKKDLIIKLPKYSLFELENGRKRMLASAGELQKGNELALPSKYVNFLYLASHYEKLKGSPEDNEQKQLFVEQHKHYLDEIIEQISEFSKRVILADANLDKVLSAYNKHRDKPIREQAENIIHLFTLTNLGAPAAFKYFDTTIDRKRYTSTKEVLDATLIHQSITGLYETRIDLSQLGGDGGPAPGSSGGSGGLLGRDLLTKLKAQIQFSTEGPQVTWEDRPAMCLVLNLEEEYRLHEKPVPPSIDPSWLQLFPMVWAEKAGMGLANQVPPVVVELKSDASPVAVRQYPMSKEAREGIRPHIQRFLDLGILVPCQSPWNTPLLPVKKPGTNDYRPVQDLREVNKRVQDIHPTVPNPYNLLSSLPPSHTWYSVLDLKDAFFCLKLHPNSQPLFAFEWRDPEKGNTGQLTWTRLPQGFKNSPTLFNEALHRDLASFRALNPQVVMLQYVDDLLVAAPTYRDCKEGTRRLLQELSKLGYRVSAKKAQLCREEVTYLGYLLKGGKRWLTPARKATVMKIPTPTTPRQVREFLGTAGFCRLWIPGFASLAAPLYPLTRPKVPFTWTEAHQEAFGRIKEALLSAPALALPDLTKPFALYVDEKEGVARGVLTQTLGPWRRPVAYLSKKLDPVASGWPTCLKAIAAVALLLKDADKLTLGQNVLVIAPHNLESIVRQPPDRWMTNARMTHYQSLLLNERVSFAPPAILNPATLLPVESDDTPIHICSEILAEETGTRPDLRDQPLPGVPAWYTDGSSFIMDGRRQAGAAIVDNKRTVWASNLPEGTSAQKAELIALTQALRLAEGKSINIYTDSRYAFATAHVHGAIYKQRGWLTSAGKDIKNKEEILALLEAIHLPKRVAIIHCPGHQRGTDPVATGNRKADEAAKQAAQSTRILTETTKNAGKRTADGSEFEKRTADGSEFESPKKKAKVE

SEQ ID NO: 1652 - protein, 2125 aa, synthetic construct
MPAAKRVKLDGGDKKYSIGLDIGTNSVGWAVITDEYKVPSKKFKVLGNTDRHSIKKNLIGALLFDSGETAEATRLKRTARRRYTRRKNRICYLQEIFSNEMAKVDDSFFHRLEESFLVEEDKKHERHPIFGNIVDEVAYHEKYPTIYHLRKKLVDSTDKADLRLIYLALAHMIKFRGHFLIEGDLNPDNSDVDKLFIQLVQTYNQLFEENPINASGVDAKAILSARLSKSRRLENLIAQLPGEKKNGLFGNLIALSLGLTPNFKSNFDLAEDAKLQLSKDTYDDDLDNLLAQIGDQYADLFLAAKNLSDAILLSDILRVNTEITKAPLSASMIKRYDEHHQDLTLLKALVRQQLPEKYKEIFFDQSKNGYAGYIDGGASQEEFYKFIKPILEKMDGTEELLVKLNREDLLRKQRTFDNGSIPHQIHLGELHAILRRQEDFYPFLKDNREKIEKILTFRIPYYVGPLARGNSRFAWMTRKSEETITPWNFEEVVDKGASAQSFIERMTNFDKNLPNEKVLPKHSLLYEYFTVYNELTKVKYVTEGMRKPAFLSGEQKKAIVDLLFKTNRKVTVKQLKEDYFKKIECFDSVEISGVEDRFNASLGTYHDLLKIIKDKDFLDNEENEDILEDIVLTLTLFEDREMIEERLKTYAHLFDDKVMKQLKRRRYTGWGRLSRKLINGIRDKQSGKTILDFLKSDGFANRNFMQLIHDDSLTFKEDIQKAQVSGQGDSLHEHIANLAGSPAIKKGILQTVKVVDELVKVMGRHKPENIVIEMARENQTTQKGQKNSRERMKRIEEGIKELGSQILKEHPVENTQLQNEKLYLYYLQNGRDMYVDQELDINRLSDYDVDHIVPQSFLKDDSIDNKVLTRSDKARGKSDNVPSEEVVKKMKNYWRQLLNAKLITQRKFDNLTKAERGGLSELDKAGFIKRQLVETRQITKHVAQILDSRMNTKYDENDKLIREVKVITLKSKLVSDFRKDFQFYKVREINNYHHAHDAYLNAVVGTALIKKYPKLESEFVYGDYKVYDVRKMIAKSEQEIGKATAKYFFYSNIMNFFKTEITLANGEIRKRPLIETNGETGEIVWDKGRDFATVRKVLSMPQVNIVKKTEVQTGGFSKESILPKRNSDKLIARKKDWDPKKYGGFDSPTVAYSVLVVAKVEKGKSKKLKSVKELLGITIMERSSFEKNPIDFLEAKGYKEVKKDLIIKLPKYSLFELENGRKRMLASAGELQKGNELALPSKYVNFLYLASHYEKLKGSPEDNEQKQLFVEQHKHYLDEIIEQISEFSKRVILADANLDKVLSAYNKHRDKPIREQAENIIHLFTLTNLGAPAAFKYFDTTIDRKRYTSTKEVLDATLIHQSITGLYETRIDLSQLGGDGGPAPGGSGGGGGLLGRDLLTKLKAQIQFSTEGPQVTWEDRPAMCLVLNLEEEYRLHEKPVPPSIDPSWLQLFPMVWAEKAGMGLANQVPPVVVELKSDASPVAVRQYPMSKEAREGIRPHIQRFLDLGILVPCQSPWNTPLLPVKKPGTNDYRPVQDLREVNKRVQDIHPTVPNPYNLLSSLPPSHTWYSVLDLKDAFFCLKLHPNSQPLFAFEWRDPEKGNTGQLTWTRLPQGFKNSPTLFNEALHRDLASFRALNPQVVMLQYVDDLLVAAPTYRDCKEGTRRLLQELSKLGYRVSAKKAQLCREEVTYLGYLLKGGKRWLTPARKATVMKIPTPTTPRQVREFLGTAGFCRLWIPGFASLAAPLYPLTRPKVPFTWTEAHQEAFGRIKEALLSAPALALPDLTKPFALYVDEKEGVARGVLTQTLGPWRRPVAYLSKKLDPVASGWPTCLKAIAAVALLLKDADKLTLGQNVLVIAPHNLESIVRQPPDRWMTNARMTHYQSLLLNERVSFAPPAILNPATLLPVESDDTPIHICSEILAEETGTRPDLRDQPLPGVPAWYTDGSSFIMDGRRQAGAAIVDNKRTVWASNLPEGTSAQKAELIALTQALRLAEGKSINIYTDSRYAFATAHVHGAIYKQRGWLTSAGKDIKNKEEILALLEAIHLPKRVAIIHCPGHQRGTDPVATGNRKADEAAKQAAQSTRILTETTKNAGKRTADGSEFEKRTADGSEFESPKKKAKVE

SEQ ID NO: 1653 - protein, 2125 aa, synthetic construct
MPAAKRVKLDGGDKKYSIGLDIGTNSVGWAVITDEYKVPSKKFKVLGNTDRHSIKKNLIGALLFDSGETAEATRLKRTARRRYTRRKNRICYLQEIFSNEMAKVDDSFFHRLEESFLVEEDKKHERHPIFGNIVDEVAYHEKYPTIYHLRKKLVDSTDKADLRLIYLALAHMIKFRGHFLIEGDLNPDNSDVDKLFIQLVQTYNQLFEENPINASGVDAKAILSARLSKSRRLENLIAQLPGEKKNGLFGNLIALSLGLTPNFKSNFDLAEDAKLQLSKDTYDDDLDNLLAQIGDQYADLFLAAKNLSDAILLSDILRVNTEITKAPLSASMIKRYDEHHQDLTLLKALVRQQLPEKYKEIFFDQSKNGYAGYIDGGASQEEFYKFIKPILEKMDGTEELLVKLNREDLLRKQRTFDNGSIPHQIHLGELHAILRRQEDFYPFLKDNREKIEKILTFRIPYYVGPLARGNSRFAWMTRKSEETITPWNFEEVVDKGASAQSFIERMTNFDKNLPNEKVLPKHSLLYEYFTVYNELTKVKYVTEGMRKPAFLSGEQKKAIVDLLFKTNRKVTVKQLKEDYFKKIECFDSVEISGVEDRFNASLGTYHDLLKIIKDKDFLDNEENEDILEDIVLTLTLFEDREMIEERLKTYAHLFDDKVMKQLKRRRYTGWGRLSRKLINGIRDKQSGKTILDFLKSDGFANRNFMQLIHDDSLTFKEDIQKAQVSGQGDSLHEHIANLAGSPAIKKGILQTVKVVDELVKVMGRHKPENIVIEMARENQTTQKGQKNSRERMKRIEEGIKELGSQILKEHPVENTQLQNEKLYLYYLQNGRDMYVDQELDINRLSDYDVDHIVPQSFLKDDSIDNKVLTRSDKARGKSDNVPSEEVVKKMKNYWRQLLNAKLITQRKFDNLTKAERGGLSELDKAGFIKRQLVETRQITKHVAQILDSRMNTKYDENDKLIREVKVITLKSKLVSDFRKDFQFYKVREINNYHHAHDAYLNAVVGTALIKKYPKLESEFVYGDYKVYDVRKMIAKSEQEIGKATAKYFFYSNIMNFFKTEITLANGEIRKRPLIETNGETGEIVWDKGRDFATVRKVLSMPQVNIVKKTEVQTGGFSKESILPKRNSDKLIARKKDWDPKKYGGFDSPTVAYSVLVVAKVEKGKSKKLKSVKELLGITIMERSSFEKNPIDFLEAKGYKEVKKDLIIKLPKYSLFELENGRKRMLASAGELQKGNELALPSKYVNFLYLASHYEKLKGSPEDNEQKQLFVEQHKHYLDEIIEQISEFSKRVILADANLDKVLSAYNKHRDKPIREQAENIIHLFTLTNLGAPAAFKYFDTTIDRKRYTSTKEVLDATLIHQSITGLYETRIDLSQLGGDGGGGGGGSPAPGGLLGRDLLTKLKAQIQFSTEGPQVTWEDRPAMCLVLNLEEEYRLHEKPVPPSIDPSWLQLFPMVWAEKAGMGLANQVPPVVVELKSDASPVAVRQYPMSKEAREGIRPHIQRFLDLGILVPCQSPWNTPLLPVKKPGTNDYRPVQDLREVNKRVQDIHPTVPNPYNLLSSLPPSHTWYSVLDLKDAFFCLKLHPNSQPLFAFEWRDPEKGNTGQLTWTRLPQGFKNSPTLFNEALHRDLASFRALNPQVVMLQYVDDLLVAAPTYRDCKEGTRRLLQELSKLGYRVSAKKAQLCREEVTYLGYLLKGGKRWLTPARKATVMKIPTPTTPRQVREFLGTAGFCRLWIPGFASLAAPLYPLTRPKVPFTWTEAHQEAFGRIKEALLSAPALALPDLTKPFALYVDEKEGVARGVLTQTLGPWRRPVAYLSKKLDPVASGWPTCLKAIAAVALLLKDADKLTLGQNVLVIAPHNLESIVRQPPDRWMTNARMTHYQSLLLNERVSFAPPAILNPATLLPVESDDTPIHICSEILAEETGTRPDLRDQPLPGVPAWYTDGSSFIMDGRRQAGAAIVDNKRTVWASNLPEGTSAQKAELIALTQALRLAEGKSINIYTDSRYAFATAHVHGAIYKQRGWLTSAGKDIKNKEEILALLEAIHLPKRVAIIHCPGHQRGTDPVATGNRKADEAAKQAAQSTRILTETTKNAGKRTADGSEFEKRTADGSEFESPKKKAKVE

SEQ ID NO: 1654 - protein, 2127 aa, synthetic construct
MPAAKRVKLDGGDKKYSIGLDIGTNSVGWAVITDEYKVPSKKFKVLGNTDRHSIKKNLIGALLFDSGETAEATRLKRTARRRYTRRKNRICYLQEIFSNEMAKVDDSFFHRLEESFLVEEDKKHERHPIFGNIVDEVAYHEKYPTIYHLRKKLVDSTDKADLRLIYLALAHMIKFRGHFLIEGDLNPDNSDVDKLFIQLVQTYNQLFEENPINASGVDAKAILSARLSKSRRLENLIAQLPGEKKNGLFGNLIALSLGLTPNFKSNFDLAEDAKLQLSKDTYDDDLDNLLAQIGDQYADLFLAAKNLSDAILLSDILRVNTEITKAPLSASMIKRYDEHHQDLTLLKALVRQQLPEKYKEIFFDQSKNGYAGYIDGGASQEEFYKFIKPILEKMDGTEELLVKLNREDLLRKQRTFDNGSIPHQIHLGELHAILRRQEDFYPFLKDNREKIEKILTFRIPYYVGPLARGNSRFAWMTRKSEETITPWNFEEVVDKGASAQSFIERMTNFDKNLPNEKVLPKHSLLYEYFTVYNELTKVKYVTEGMRKPAFLSGEQKKAIVDLLFKTNRKVTVKQLKEDYFKKIECFDSVEISGVEDRFNASLGTYHDLLKIIKDKDFLDNEENEDILEDIVLTLTLFEDREMIEERLKTYAHLFDDKVMKQLKRRRYTGWGRLSRKLINGIRDKQSGKTILDFLKSDGFANRNFMQLIHDDSLTFKEDIQKAQVSGQGDSLHEHIANLAGSPAIKKGILQTVKVVDELVKVMGRHKPENIVIEMARENQTTQKGQKNSRERMKRIEEGIKELGSQILKEHPVENTQLQNEKLYLYYLQNGRDMYVDQELDINRLSDYDVDHIVPQSFLKDDSIDNKVLTRSDKARGKSDNVPSEEVVKKMKNYWRQLLNAKLITQRKFDNLTKAERGGLSELDKAGFIKRQLVETRQITKHVAQILDSRMNTKYDENDKLIREVKVITLKSKLVSDFRKDFQFYKVREINNYHHAHDAYLNAVVGTALIKKYPKLESEFVYGDYKVYDVRKMIAKSEQEIGKATAKYFFYSNIMNFFKTEITLANGEIRKRPLIETNGETGEIVWDKGRDFATVRKVLSMPQVNIVKKTEVQTGGFSKESILPKRNSDKLIARKKDWDPKKYGGFDSPTVAYSVLVVAKVEKGKSKKLKSVKELLGITIMERSSFEKNPIDFLEAKGYKEVKKDLIIKLPKYSLFELENGRKRMLASAGELQKGNELALPSKYVNFLYLASHYEKLKGSPEDNEQKQLFVEQHKHYLDEIIEQISEFSKRVILADANLDKVLSAYNKHRDKPIREQAENIIHLFTLTNLGAPAAFKYFDTTIDRKRYTSTKEVLDATLIHQSITGLYETRIDLSQLGGDGGGGSEAAAKPAPGGLLGRDLLTKLKAQIQFSTEGPQVTWEDRPAMCLVLNLEEEYRLHEKPVPPSIDPSWLQLFPMVWAEKAGMGLANQVPPVVVELKSDASPVAVRQYPMSKEAREGIRPHIQRFLDLGILVPCQSPWNTPLLPVKKPGTNDYRPVQDLREVNKRVQDIHPTVPNPYNLLSSLPPSHTWYSVLDLKDAFFCLKLHPNSQPLFAFEWRDPEKGNTGQLTWTRLPQGFKNSPTLFNEALHRDLASFRALNPQVVMLQYVDDLLVAAPTYRDCKEGTRRLLQELSKLGYRVSAKKAQLCREEVTYLGYLLKGGKRWLTPARKATVMKIPTPTTPRQVREFLGTAGFCRLWIPGFASLAAPLYPLTRPKVPFTWTEAHQEAFGRIKEALLSAPALALPDLTKPFALYVDEKEGVARGVLTQTLGPWRRPVAYLSKKLDPVASGWPTCLKAIAAVALLLKDADKLTLGQNVLVIAPHNLESIVRQPPDRWMTNARMTHYQSLLLNERVSFAPPAILNPATLLPVESDDTPIHICSEILAEETGTRPDLRDQPLPGVPAWYTDGSSFIMDGRRQAGAAIVDNKRTVWASNLPEGTSAQKAELIALTQALRLAEGKSINIYTDSRYAFATAHVHGAIYKQRGWLTSAGKDIKNKEEILALLEAIHLPKRVAIIHCPGHQRGTDPVATGNRKADEAAKQAAQSTRILTETTKNAGKRTADGSEFEKRTADGSEFESPKKKAKVE

SEQ ID NO: 1655 - protein, 2125 aa, synthetic construct
MPAAKRVKLDGGDKKYSIGLDIGTNSVGWAVITDEYKVPSKKFKVLGNTDRHSIKKNLIGALLFDSGETAEATRLKRTARRRYTRRKNRICYLQEIFSNEMAKVDDSFFHRLEESFLVEEDKKHERHPIFGNIVDEVAYHEKYPTIYHLRKKLVDSTDKADLRLIYLALAHMIKFRGHFLIEGDLNPDNSDVDKLFIQLVQTYNQLFEENPINASGVDAKAILSARLSKSRRLENLIAQLPGEKKNGLFGNLIALSLGLTPNFKSNFDLAEDAKLQLSKDTYDDDLDNLLAQIGDQYADLFLAAKNLSDAILLSDILRVNTEITKAPLSASMIKRYDEHHQDLTLLKALVRQQLPEKYKEIFFDQSKNGYAGYIDGGASQEEFYKFIKPILEKMDGTEELLVKLNREDLLRKQRTFDNGSIPHQIHLGELHAILRRQEDFYPFLKDNREKIEKILTFRIPYYVGPLARGNSRFAWMTRKSEETITPWNFEEVVDKGASAQSFIERMTNFDKNLPNEKVLPKHSLLYEYFTVYNELTKVKYVTEGMRKPAFLSGEQKKAIVDLLFKTNRKVTVKQLKEDYFKKIECFDSVEISGVEDRFNASLGTYHDLLKIIKDKDFLDNEENEDILEDIVLTLTLFEDREMIEERLKTYAHLFDDKVMKQLKRRRYTGWGRLSRKLINGIRDKQSGKTILDFLKSDGFANRNFMQLIHDDSLTFKEDIQKAQVSGQGDSLHEHIANLAGSPAIKKGILQTVKVVDELVKVMGRHKPENIVIEMARENQTTQKGQKNSRERMKRIEEGIKELGSQILKEHPVENTQLQNEKLYLYYLQNGRDMYVDQELDINRLSDYDVDHIVPQSFLKDDSIDNKVLTRSDKARGKSDNVPSEEVVKKMKNYWRQLLNAKLITQRKFDNLTKAERGGLSELDKAGFIKRQLVETRQITKHVAQILDSRMNTKYDENDKLIREVKVITLKSKLVSDFRKDFQFYKVREINNYHHAHDAYLNAVVGTALIKKYPKLESEFVYGDYKVYDVRKMIAKSEQEIGKATAKYFFYSNIMNFFKTEITLANGEIRKRPLIETNGETGEIVWDKGRDFATVRKVLSMPQVNIVKKTEVQTGGFSKESILPKRNSDKLIARKKDWDPKKYGGFDSPTVAYSVLVVAKVEKGKSKKLKSVKELLGITIMERSSFEKNPIDFLEAKGYKEVKKDLIIKLPKYSLFELENGRKRMLASAGELQKGNELALPSKYVNFLYLASHYEKLKGSPEDNEQKQLFVEQHKHYLDEIIEQISEFSKRVILADANLDKVLSAYNKHRDKPIREQAENIIHLFTLTNLGAPAAFKYFDTTIDRKRYTSTKEVLDATLIHQSITGLYETRIDLSQLGGDGGGGSGGSGGSGGLLGRDLLTKLKAQIQFSTEGPQVTWEDRPAMCLVLNLEEEYRLHEKPVPPSIDPSWLQLFPMVWAEKAGMGLANQVPPVVVELKSDASPVAVRQYPMSKEAREGIRPHIQRFLDLGILVPCQSPWNTPLLPVKKPGTNDYRPVQDLREVNKRVQDIHPTVPNPYNLLSSLPPSHTWYSVLDLKDAFFCLKLHPNSQPLFAFEWRDPEKGNTGQLTWTRLPQGFKNSPTLFNEALHRDLASFRALNPQVVMLQYVDDLLVAAPTYRDCKEGTRRLLQELSKLGYRVSAKKAQLCREEVTYLGYLLKGGKRWLTPARKATVMKIPTPTTPRQVREFLGTAGFCRLWIPGFASLAAPLYPLTRPKVPFTWTEAHQEAFGRIKEALLSAPALALPDLTKPFALYVDEKEGVARGVLTQTLGPWRRPVAYLSKKLDPVASGWPTCLKAIAAVALLLKDADKLTLGQNVLVIAPHNLESIVRQPPDRWMTNARMTHYQSLLLNERVSFAPPAILNPATLLPVESDDTPIHICSEILAEETGTRPDLRDQPLPGVPAWYTDGSSFIMDGRRQAGAAIVDNKRTVWASNLPEGTSAQKAELIALTQALRLAEGKSINIYTDSRYAFATAHVHGAIYKQRGWLTSAGKDIKNKEEILALLEAIHLPKRVAIIHCPGHQRGTDPVATGNRKADEAAKQAAQSTRILTETTKNAGKRTADGSEFEKRTADGSEFESPKKKAKVE

SEQ ID NO: 1656 - protein, 2127 aa, synthetic construct
MPAAKRVKLDGGDKKYSIGLDIGTNSVGWAVITDEYKVPSKKFKVLGNTDRHSIKKNLIGALLFDSGETAEATRLKRTARRRYTRRKNRICYLQEIFSNEMAKVDDSFFHRLEESFLVEEDKKHERHPIFGNIVDEVAYHEKYPTIYHLRKKLVDSTDKADLRLIYLALAHMIKFRGHFLIEGDLNPDNSDVDKLFIQLVQTYNQLFEENPINASGVDAKAILSARLSKSRRLENLIAQLPGEKKNGLFGNLIALSLGLTPNFKSNFDLAEDAKLQLSKDTYDDDLDNLLAQIGDQYADLFLAAKNLSDAILLSDILRVNTEITKAPLSASMIKRYDEHHQDLTLLKALVRQQLPEKYKEIFFDQSKNGYAGYIDGGASQEEFYKFIKPILEKMDGTEELLVKLNREDLLRKQRTFDNGSIPHQIHLGELHAILRRQEDFYPFLKDNREKIEKILTFRIPYYVGPLARGNSRFAWMTRKSEETITPWNFEEVVDKGASAQSFIERMTNFDKNLPNEKVLPKHSLLYEYFTVYNELTKVKYVTEGMRKPAFLSGEQKKAIVDLLFKTNRKVTVKQLKEDYFKKIECFDSVEISGVEDRFNASLGTYHDLLKIIKDKDFLDNEENEDILEDIVLTLTLFEDREMIEERLKTYAHLFDDKVMKQLKRRRYTGWGRLSRKLINGIRDKQSGKTILDFLKSDGFANRNFMQLIHDDSLTFKEDIQKAQVSGQGDSLHEHIANLAGSPAIKKGILQTVKVVDELVKVMGRHKPENIVIEMARENQTTQKGQKNSRERMKRIEEGIKELGSQILKEHPVENTQLQNEKLYLYYLQNGRDMYVDQELDINRLSDYDVDHIVPQSFLKDDSIDNKVLTRSDKARGKSDNVPSEEVVKKMKNYWRQLLNAKLITQRKFDNLTKAERGGLSELDKAGFIKRQLVETRQITKHVAQILDSRMNTKYDENDKLIREVKVITLKSKLVSDFRKDFQFYKVREINNYHHAHDAYLNAVVGTALIKKYPKLESEFVYGDYKVYDVRKMIAKSEQEIGKATAKYFFYSNIMNFFKTEITLANGEIRKRPLIETNGETGEIVWDKGRDFATVRKVLSMPQVNIVKKTEVQTGGFSKESILPKRNSDKLIARKKDWDPKKYGGFDSPTVAYSVLVVAKVEKGKSKKLKSVKELLGITIMERSSFEKNPIDFLEAKGYKEVKKDLIIKLPKYSLFELENGRKRMLASAGELQKGNELALPSKYVNFLYLASHYEKLKGSPEDNEQKQLFVEQHKHYLDEIIEQISEFSKRVILADANLDKVLSAYNKHRDKPIREQAENIIHLFTLTNLGAPAAFKYFDTTIDRKRYTSTKEVLDATLIHQSITGLYETRIDLSQLGGDGGPAPEAAAKGSSGGLLGRDLLTKLKAQIQFSTEGPQVTWEDRPAMCLVLNLEEEYRLHEKPVPPSIDPSWLQLFPMVWAEKAGMGLANQVPPVVVELKSDASPVAVRQYPMSKEAREGIRPHIQRFLDLGILVPCQSPWNTPLLPVKKPGTNDYRPVQDLREVNKRVQDIHPTVPNPYNLLSSLPPSHTWYSVLDLKDAFFCLKLHPNSQPLFAFEWRDPEKGNTGQLTWTRLPQGFKNSPTLFNEALHRDLASFRALNPQVVMLQYVDDLLVAAPTYRDCKEGTRRLLQELSKLGYRVSAKKAQLCREEVTYLGYLLKGGKRWLTPARKATVMKIPTPTTPRQVREFLGTAGFCRLWIPGFASLAAPLYPLTRPKVPFTWTEAHQEAFGRIKEALLSAPALALPDLTKPFALYVDEKEGVARGVLTQTLGPWRRPVAYLSKKLDPVASGWPTCLKAIAAVALLLKDADKLTLGQNVLVIAPHNLESIVRQPPDRWMTNARMTHYQSLLLNERVSFAPPAILNPATLLPVESDDTPIHICSEILAEETGTRPDLRDQPLPGVPAWYTDGSSFIMDGRRQAGAAIVDNKRTVWASNLPEGTSAQKAELIALTQALRLAEGKSINIYTDSRYAFATAHVHGAIYKQRGWLTSAGKDIKNKEEILALLEAIHLPKRVAIIHCPGHQRGTDPVATGNRKADEAAKQAAQSTRILTETTKNAGKRTADGSEFEKRTADGSEFESPKKKAKVE

SEQ ID NO: 1657 - protein, 2122 aa, synthetic construct
MPAAKRVKLDGGDKKYSIGLDIGTNSVGWAVITDEYKVPSKKFKVLGNTDRHSIKKNLIGALLFDSGETAEATRLKRTARRRYTRRKNRICYLQEIFSNEMAKVDDSFFHRLEESFLVEEDKKHERHPIFGNIVDEVAYHEKYPTIYHLRKKLVDSTDKADLRLIYLALAHMIKFRGHFLIEGDLNPDNSDVDKLFIQLVQTYNQLFEENPINASGVDAKAILSARLSKSRRLENLIAQLPGEKKNGLFGNLIALSLGLTPNFKSNFDLAEDAKLQLSKDTYDDDLDNLLAQIGDQYADLFLAAKNLSDAILLSDILRVNTEITKAPLSASMIKRYDEHHQDLTLLKALVRQQLPEKYKEIFFDQSKNGYAGYIDGGASQEEFYKFIKPILEKMDGTEELLVKLNREDLLRKQRTFDNGSIPHQIHLGELHAILRRQEDFYPFLKDNREKIEKILTFRIPYYVGPLARGNSRFAWMTRKSEETITPWNFEEVVDKGASAQSFIERMTNFDKNLPNEKVLPKHSLLYEYFTVYNELTKVKYVTEGMRKPAFLSGEQKKAIVDLLFKTNRKVTVKQLKEDYFKKIECFDSVEISGVEDRFNASLGTYHDLLKIIKDKDFLDNEENEDILEDIVLTLTLFEDREMIEERLKTYAHLFDDKVMKQLKRRRYTGWGRLSRKLINGIRDKQSGKTILDFLKSDGFANRNFMQLIHDDSLTFKEDIQKAQVSGQGDSLHEHIANLAGSPAIKKGILQTVKVVDELVKVMGRHKPENIVIEMARENQTTQKGQKNSRERMKRIEEGIKELGSQILKEHPVENTQLQNEKLYLYYLQNGRDMYVDQELDINRLSDYDVDHIVPQSFLKDDSIDNKVLTRSDKARGKSDNVPSEEVVKKMKNYWRQLLNAKLITQRKFDNLTKAERGGLSELDKAGFIKRQLVETRQITKHVAQILDSRMNTKYDENDKLIREVKVITLKSKLVSDFRKDFQFYKVREINNYHHAHDAYLNAVVGTALIKKYPKLESEFVYGDYKVYDVRKMIAKSEQEIGKATAKYFFYSNIMNFFKTEITLANGEIRKRPLIETNGETGEIVWDKGRDFATVRKVLSMPQVNIVKKTEVQTGGFSKESILPKRNSDKLIARKKDWDPKKYGGFDSPTVAYSVLVVAKVEKGKSKKLKSVKELLGITIMERSSFEKNPIDFLEAKGYKEVKKDLIIKLPKYSLFELENGRKRMLASAGELQKGNELALPSKYVNFLYLASHYEKLKGSPEDNEQKQLFVEQHKHYLDEIIEQISEFSKRVILADANLDKVLSAYNKHRDKPIREQAENIIHLFTLTNLGAPAAFKYFDTTIDRKRYTSTKEVLDATLIHQSITGLYETRIDLSQLGGDGGGGGGSSGGLLGRDLLTKLKAQIQFSTEGPQVTWEDRPAMCLVLNLEEEYRLHEKPVPPSIDPSWLQLFPMVWAEKAGMGLANQVPPVVVELKSDASPVAVRQYPMSKEAREGIRPHIQRFLDLGILVPCQSPWNTPLLPVKKPGTNDYRPVQDLREVNKRVQDIHPTVPNPYNLLSSLPPSHTWYSVLDLKDAFFCLKLHPNSQPLFAFEWRDPEKGNTGQLTWTRLPQGFKNSPTLFNEALHRDLASFRALNPQVVMLQYVDDLLVAAPTYRDCKEGTRRLLQELSKLGYRVSAKKAQLCREEVTYLGYLLKGGKRWLTPARKATVMKIPTPTTPRQVREFLGTAGFCRLWIPGFASLAAPLYPLTRPKVPFTWTEAHQEAFGRIKEALLSAPALALPDLTKPFALYVDEKEGVARGVLTQTLGPWRRPVAYLSKKLDPVASGWPTCLKAIAAVALLLKDADKLTLGQNVLVIAPHNLESIVRQPPDRWMTNARMTHYQSLLLNERVSFAPPAILNPATLLPVESDDTPIHICSEILAEETGTRPDLRDQPLPGVPAWYTDGSSFIMDGRRQAGAAIVDNKRTVWASNLPEGTSAQKAELIALTQALRLAEGKSINIYTDSRYAFATAHVHGAIYKQRGWLTSAGKDIKNKEEILALLEAIHLPKRVAIIHCPGHQRGTDPVATGNRKADEAAKQAAQSTRILTETTKNAGKRTADGSEFEKRTADGSEFESPKKKAKVE

SEQ ID NO: 1658 - protein, 2125 aa, synthetic construct
MPAAKRVKLDGGDKKYSIGLDIGTNSVGWAVITDEYKVPSKKFKVLGNTDRHSIKKNLIGALLFDSGETAEATRLKRTARRRYTRRKNRICYLQEIFSNEMAKVDDSFFHRLEESFLVEEDKKHERHPIFGNIVDEVAYHEKYPTIYHLRKKLVDSTDKADLRLIYLALAHMIKFRGHFLIEGDLNPDNSDVDKLFIQLVQTYNQLFEENPINASGVDAKAILSARLSKSRRLENLIAQLPGEKKNGLFGNLIALSLGLTPNFKSNFDLAEDAKLQLSKDTYDDDLDNLLAQIGDQYADLFLAAKNLSDAILLSDILRVNTEITKAPLSASMIKRYDEHHQDLTLLKALVRQQLPEKYKEIFFDQSKNGYAGYIDGGASQEEFYKFIKPILEKMDGTEELLVKLNREDLLRKQRTFDNGSIPHQIHLGELHAILRRQEDFYPFLKDNREKIEKILTFRIPYYVGPLARGNSRFAWMTRKSEETITPWNFEEVVDKGASAQSFIERMTNFDKNLPNEKVLPKHSLLYEYFTVYNELTKVKYVTEGMRKPAFLSGEQKKAIVDLLFKTNRKVTVKQLKEDYFKKIECFDSVEISGVEDRFNASLGTYHDLLKIIKDKDFLDNEENEDILEDIVLTLTLFEDREMIEERLKTYAHLFDDKVMKQLKRRRYTGWGRLSRKLINGIRDKQSGKTILDFLKSDGFANRNFMQLIHDDSLTFKEDIQKAQVSGQGDSLHEHIANLAGSPAIKKGILQTVKVVDELVKVMGRHKPENIVIEMARENQTTQKGQKNSRERMKRIEEGIKELGSQILKEHPVENTQLQNEKLYLYYLQNGRDMYVDQELDINRLSDYDVDHIVPQSFLKDDSIDNKVLTRSDKARGKSDNVPSEEVVKKMKNYWRQLLNAKLITQRKFDNLTKAERGGLSELDKAGFIKRQLVETRQITKHVAQILDSRMNTKYDENDKLIREVKVITLKSKLVSDFRKDFQFYKVREINNYHHAHDAYLNAVVGTALIKKYPKLESEFVYGDYKVYDVRKMIAKSEQEIGKATAKYFFYSNIMNFFKTEITLANGEIRKRPLIETNGETGEIVWDKGRDFATVRKVLSMPQVNIVKKTEVQTGGFSKESILPKRNSDKLIARKKDWDPKKYGGFDSPTVAYSVLVVAKVEKGKSKKLKSVKELLGITIMERSSFEKNPIDFLEAKGYKEVKKDLIIKLPKYSLFELENGRKRMLASAGELQKGNELALPSKYVNFLYLASHYEKLKGSPEDNEQKQLFVEQHKHYLDEIIEQISEFSKRVILADANLDKVLSAYNKHRDKPIREQAENIIHLFTLTNLGAPAAFKYFDTTIDRKRYTSTKEVLDATLIHQSITGLYETRIDLSQLGGDGGPAPGGSGSSGGLLGRDLLTKLKAQIQFSTEGPQVTWEDRPAMCLVLNLEEEYRLHEKPVPPSIDPSWLQLFPMVWAEKAGMGLANQVPPVVVELKSDASPVAVRQYPMSKEAREGIRPHIQRFLDLGILVPCQSPWNTPLLPVKKPGTNDYRPVQDLREVNKRVQDIHPTVPNPYNLLSSLPPSHTWYSVLDLKDAFFCLKLHPNSQPLFAFEWRDPEKGNTGQLTWTRLPQGFKNSPTLFNEALHRDLASFRALNPQVVMLQYVDDLLVAAPTYRDCKEGTRRLLQELSKLGYRVSAKKAQLCREEVTYLGYLLKGGKRWLTPARKATVMKIPTPTTPRQVREFLGTAGFCRLWIPGFASLAAPLYPLTRPKVPFTWTEAHQEAFGRIKEALLSAPALALPDLTKPFALYVDEKEGVARGVLTQTLGPWRRPVAYLSKKLDPVASGWPTCLKAIAAVALLLKDADKLTLGQNVLVIAPHNLESIVRQPPDRWMTNARMTHYQSLLLNERVSFAPPAILNPATLLPVESDDTPIHICSEILAEETGTRPDLRDQPLPGVPAWYTDGSSFIMDGRRQAGAAIVDNKRTVWASNLPEGTSAQKAELIALTQALRLAEGKSINIYTDSRYAFATAHVHGAIYKQRGWLTSAGKDIKNKEEILALLEAIHLPKRVAIIHCPGHQRGTDPVATGNRKADEAAKQAAQSTRILTETTKNAGKRTADGSEFEKRTADGSEFESPKKKAKVE

SEQ ID NO: 1659 - protein, 2127 aa, synthetic construct
MPAAKRVKLDGGDKKYSIGLDIGTNSVGWAVITDEYKVPSKKFKVLGNTDRHSIKKNLIGALLFDSGETAEATRLKRTARRRYTRRKNRICYLQEIFSNEMAKVDDSFFHRLEESFLVEEDKKHERHPIFGNIVDEVAYHEKYPTIYHLRKKLVDSTDKADLRLIYLALAHMIKFRGHFLIEGDLNPDNSDVDKLFIQLVQTYNQLFEENPINASGVDAKAILSARLSKSRRLENLIAQLPGEKKNGLFGNLIALSLGLTPNFKSNFDLAEDAKLQLSKDTYDDDLDNLLAQIGDQYADLFLAAKNLSDAILLSDILRVNTEITKAPLSASMIKRYDEHHQDLTLLKALVRQQLPEKYKEIFFDQSKNGYAGYIDGGASQEEFYKFIKPILEKMDGTEELLVKLNREDLLRKQRTFDNGSIPHQIHLGELHAILRRQEDFYPFLKDNREKIEKILTFRIPYYVGPLARGNSRFAWMTRKSEETITPWNFEEVVDKGASAQSFIERMTNFDKNLPNEKVLPKHSLLYEYFTVYNELTKVKYVTEGMRKPAFLSGEQKKAIVDLLFKTNRKVTVKQLKEDYFKKIECFDSVEISGVEDRFNASLGTYHDLLKIIKDKDFLDNEENEDILEDIVLTLTLFEDREMIEERLKTYAHLFDDKVMKQLKRRRYTGWGRLSRKLINGIRDKQSGKTILDFLKSDGFANRNFMQLIHDDSLTFKEDIQKAQVSGQGDSLHEHIANLAGSPAIKKGILQTVKVVDELVKVMGRHKPENIVIEMARENQTTQKGQKNSRERMKRIEEGIKELGSQILKEHPVENTQLQNEKLYLYYLQNGRDMYVDQELDINRLSDYDVDHIVPQSFLKDDSIDNKVLTRSDKARGKSDNVPSEEVVKKMKNYWRQLLNAKLITQRKFDNLTKAERGGLSELDKAGFIKRQLVETRQITKHVAQILDSRMNTKYDENDKLIREVKVITLKSKLVSDFRKDFQFYKVREINNYHHAHDAYLNAVVGTALIKKYPKLESEFVYGDYKVYDVRKMIAKSEQEIGKATAKYFFYSNIMNFFKTEITLANGEIRKRPLIETNGETGEIVWDKGRDFATVRKVLSMPQVNIVKKTEVQTGGFSKESILPKRNSDKLIARKKDWDPKKYGGFDSPTVAYSVLVVAKVEKGKSKKLKSVKELLGITIMERSSFEKNPIDFLEAKGYKEVKKDLIIKLPKYSLFELENGRKRMLASAGELQKGNELALPSKYVNFLYLASHYEKLKGSPEDNEQKQLFVEQHKHYLDEIIEQISEFSKRVILADANLDKVLSAYNKHRDKPIREQAENIIHLFTLTNLGAPAAFKYFDTTIDRKRYTSTKEVLDATLIHQSITGLYETRIDLSQLGGDGGGGSGGGEAAAKGGLLGRDLLTKLKAQIQFSTEGPQVTWEDRPAMCLVLNLEEEYRLHEKPVPPSIDPSWLQLFPMVWAEKAGMGLANQVPPVVVELKSDASPVAVRQYPMSKEAREGIRPHIQRFLDLGILVPCQSPWNTPLLPVKKPGTNDYRPVQDLREVNKRVQDIHPTVPNPYNLLSSLPPSHTWYSVLDLKDAFFCLKLHPNSQPLFAFEWRDPEKGNTGQLTWTRLPQGFKNSPTLFNEALHRDLASFRALNPQVVMLQYVDDLLVAAPTYRDCKEGTRRLLQELSKLGYRVSAKKAQLCREEVTYLGYLLKGGKRWLTPARKATVMKIPTPTTPRQVREFLGTAGFCRLWIPGFASLAAPLYPLTRPKVPFTWTEAHQEAFGRIKEALLSAPALALPDLTKPFALYVDEKEGVARGVLTQTLGPWRRPVAYLSKKLDPVASGWPTCLKAIAAVALLLKDADKLTLGQNVLVIAPHNLESIVRQPPDRWMTNARMTHYQSLLLNERVSFAPPAILNPATLLPVESDDTPIHICSEILAEETGTRPDLRDQPLPGVPAWYTDGSSFIMDGRRQAGAAIVDNKRTVWASNLPEGTSAQKAELIALTQALRLAEGKSINIYTDSRYAFATAHVHGAIYKQRGWLTSAGKDIKNKEEILALLEAIHLPKRVAIIHCPGHQRGTDPVATGNRKADEAAKQAAQSTRILTETTKNAGKRTADGSEFEKRTADGSEFESPKKKAKVE

SEQ ID NO: 1660 - protein, 2132 aa, synthetic construct
MPAAKRVKLDGGDKKYSIGLDIGTNSVGWAVITDEYKVPSKKFKVLGNTDRHSIKKNLIGALLFDSGETAEATRLKRTARRRYTRRKNRICYLQEIFSNEMAKVDDSFFHRLEESFLVEEDKKHERHPIFGNIVDEVAYHEKYPTIYHLRKKLVDSTDKADLRLIYLALAHMIKFRGHFLIEGDLNPDNSDVDKLFIQLVQTYNQLFEENPINASGVDAKAILSARLSKSRRLENLIAQLPGEKKNGLFGNLIALSLGLTPNFKSNFDLAEDAKLQLSKDTYDDDLDNLLAQIGDQYADLFLAAKNLSDAILLSDILRVNTEITKAPLSASMIKRYDEHHQDLTLLKALVRQQLPEKYKEIFFDQSKNGYAGYIDGGASQEEFYKFIKPILEKMDGTEELLVKLNREDLLRKQRTFDNGSIPHQIHLGELHAILRRQEDFYPFLKDNREKIEKILTFRIPYYVGPLARGNSRFAWMTRKSEETITPWNFEEVVDKGASAQSFIERMTNFDKNLPNEKVLPKHSLLYEYFTVYNELTKVKYVTEGMRKPAFLSGEQKKAIVDLLFKTNRKVTVKQLKEDYFKKIECFDSVEISGVEDRFNASLGTYHDLLKIIKDKDFLDNEENEDILEDIVLTLTLFEDREMIEERLKTYAHLFDDKVMKQLKRRRYTGWGRLSRKLINGIRDKQSGKTILDFLKSDGFANRNFMQLIHDDSLTFKEDIQKAQVSGQGDSLHEHIANLAGSPAIKKGILQTVKVVDELVKVMGRHKPENIVIEMARENQTTQKGQKNSRERMKRIEEGIKELGSQILKEHPVENTQLQNEKLYLYYLQNGRDMYVDQELDINRLSDYDVDHIVPQSFLKDDSIDNKVLTRSDKARGKSDNVPSEEVVKKMKNYWRQLLNAKLITQRKFDNLTKAERGGLSELDKAGFIKRQLVETRQITKHVAQILDSRMNTKYDENDKLIREVKVITLKSKLVSDFRKDFQFYKVREINNYHHAHDAYLNAVVGTALIKKYPKLESEFVYGDYKVYDVRKMIAKSEQEIGKATAKYFFYSNIMNFFKTEITLANGEIRKRPLIETNGETGEIVWDKGRDFATVRKVLSMPQVNIVKKTEVQTGGFSKESILPKRNSDKLIARKKDWDPKKYGGFDSPTVAYSVLVVAKVEKGKSKKLKSVKELLGITIMERSSFEKNPIDFLEAKGYKEVKKDLIIKLPKYSLFELENGRKRMLASAGELQKGNELALPSKYVNFLYLASHYEKLKGSPEDNEQKQLFVEQHKHYLDEIIEQISEFSKRVILADANLDKVLSAYNKHRDKPIREQAENIIHLFTLTNLGAPAAFKYFDTTIDRKRYTSTKEVLDATLIHQSITGLYETRIDLSQLGGDGGSGSETPGTSESATPESGGLLGRDLLTKLKAQIQFSTEGPQVTWEDRPAMCLVLNLEEEYRLHEKPVPPSIDPSWLQLFPMVWAEKAGMGLANQVPPVVVELKSDASPVAVRQYPMSKEAREGIRPHIQRFLDLGILVPCQSPWNTPLLPVKKPGTNDYRPVQDLREVNKRVQDIHPTVPNPYNLLSSLPPSHTWYSVLDLKDAFFCLKLHPNSQPLFAFEWRDPEKGNTGQLTWTRLPQGFKNSPTLFNEALHRDLASFRALNPQVVMLQYVDDLLVAAPTYRDCKEGTRRLLQELSKLGYRVSAKKAQLCREEVTYLGYLLKGGKRWLTPARKATVMKIPTPTTPRQVREFLGTAGFCRLWIPGFASLAAPLYPLTRPKVPFTWTEAHQEAFGRIKEALLSAPALALPDLTKPFALYVDEKEGVARGVLTQTLGPWRRPVAYLSKKLDPVASGWPTCLKAIAAVALLLKDADKLTLGQNVLVIAPHNLESIVRQPPDRWMTNARMTHYQSLLLNERVSFAPPAILNPATLLPVESDDTPIHICSEILAEETGTRPDLRDQPLPGVPAWYTDGSSFIMDGRRQAGAAIVDNKRTVWASNLPEGTSAQKAELIALTQALRLAEGKSINIYTDSRYAFATAHVHGAIYKQRGWLTSAGKDIKNKEEILALLEAIHLPKRVAIIHCPGHQRGTDPVATGNRKADEAAKQAAQSTRILTETTKNAGKRTADGSEFEKRTADGSEFESPKKKAKVE

SEQ ID NO: 1661 - protein, 2125 aa, synthetic construct
MPAAKRVKLDGGDKKYSIGLDIGTNSVGWAVITDEYKVPSKKFKVLGNTDRHSIKKNLIGALLFDSGETAEATRLKRTARRRYTRRKNRICYLQEIFSNEMAKVDDSFFHRLEESFLVEEDKKHERHPIFGNIVDEVAYHEKYPTIYHLRKKLVDSTDKADLRLIYLALAHMIKFRGHFLIEGDLNPDNSDVDKLFIQLVQTYNQLFEENPINASGVDAKAILSARLSKSRRLENLIAQLPGEKKNGLFGNLIALSLGLTPNFKSNFDLAEDAKLQLSKDTYDDDLDNLLAQIGDQYADLFLAAKNLSDAILLSDILRVNTEITKAPLSASMIKRYDEHHQDLTLLKALVRQQLPEKYKEIFFDQSKNGYAGYIDGGASQEEFYKFIKPILEKMDGTEELLVKLNREDLLRKQRTFDNGSIPHQIHLGELHAILRRQEDFYPFLKDNREKIEKILTFRIPYYVGPLARGNSRFAWMTRKSEETITPWNFEEVVDKGASAQSFIERMTNFDKNLPNEKVLPKHSLLYEYFTVYNELTKVKYVTEGMRKPAFLSGEQKKAIVDLLFKTNRKVTVKQLKEDYFKKIECFDSVEISGVEDRFNASLGTYHDLLKIIKDKDFLDNEENEDILEDIVLTLTLFEDREMIEERLKTYAHLFDDKVMKQLKRRRYTGWGRLSRKLINGIRDKQSGKTILDFLKSDGFANRNFMQLIHDDSLTFKEDIQKAQVSGQGDSLHEHIANLAGSPAIKKGILQTVKVVDELVKVMGRHKPENIVIEMARENQTTQKGQKNSRERMKRIEEGIKELGSQILKEHPVENTQLQNEKLYLYYLQNGRDMYVDQELDINRLSDYDVDHIVPQSFLKDDSIDNKVLTRSDKARGKSDNVPSEEVVKKMKNYWRQLLNAKLITQRKFDNLTKAERGGLSELDKAGFIKRQLVETRQITKHVAQILDSRMNTKYDENDKLIREVKVITLKSKLVSDFRKDFQFYKVREINNYHHAHDAYLNAVVGTALIKKYPKLESEFVYGDYKVYDVRKMIAKSEQEIGKATAKYFFYSNIMNFFKTEITLANGEIRKRPLIETNGETGEIVWDKGRDFATVRKVLSMPQVNIVKKTEVQTGGFSKESILPKRNSDKLIARKKDWDPKKYGGFDSPTVAYSVLVVAKVEKGKSKKLKSVKELLGITIMERSSFEKNPIDFLEAKGYKEVKKDLIIKLPKYSLFELENGRKRMLASAGELQKGNELALPSKYVNFLYLASHYEKLKGSPEDNEQKQLFVEQHKHYLDEIIEQISEFSKRVILADANLDKVLSAYNKHRDKPIREQAENIIHLFTLTNLGAPAAFKYFDTTIDRKRYTSTKEVLDATLIHQSITGLYETRIDLSQLGGDGGGSSGGSPAPGGLLGRDLLTKLKAQIQFSTEGPQVTWEDRPAMCLVLNLEEEYRLHEKPVPPSIDPSWLQLFPMVWAEKAGMGLANQVPPVVVELKSDASPVAVRQYPMSKEAREGIRPHIQRFLDLGILVPCQSPWNTPLLPVKKPGTNDYRPVQDLREVNKRVQDIHPTVPNPYNLLSSLPPSHTWYSVLDLKDAFFCLKLHPNSQPLFAFEWRDPEKGNTGQLTWTRLPQGFKNSPTLFNEALHRDLASFRALNPQVVMLQYVDDLLVAAPTYRDCKEGTRRLLQELSKLGYRVSAKKAQLCREEVTYLGYLLKGGKRWLTPARKATVMKIPTPTTPRQVREFLGTAGFCRLWIPGFASLAAPLYPLTRPKVPFTWTEAHQEAFGRIKEALLSAPALALPDLTKPFALYVDEKEGVARGVLTQTLGPWRRPVAYLSKKLDPVASGWPTCLKAIAAVALLLKDADKLTLGQNVLVIAPHNLESIVRQPPDRWMTNARMTHYQSLLLNERVSFAPPAILNPATLLPVESDDTPIHICSEILAEETGTRPDLRDQPLPGVPAWYTDGSSFIMDGRRQAGAAIVDNKRTVWASNLPEGTSAQKAELIALTQALRLAEGKSINIYTDSRYAFATAHVHGAIYKQRGWLTSAGKDIKNKEEILALLEAIHLPKRVAIIHCPGHQRGTDPVATGNRKADEAAKQAAQSTRILTETTKNAGKRTADGSEFEKRTADGSEFESPKKKAKVE

SEQ ID NO: 1662 - protein, 2146 aa, synthetic construct
MPAAKRVKLDGGDKKYSIGLDIGTNSVGWAVITDEYKVPSKKFKVLGNTDRHSIKKNLIGALLFDSGETAEATRLKRTARRRYTRRKNRICYLQEIFSNEMAKVDDSFFHRLEESFLVEEDKKHERHPIFGNIVDEVAYHEKYPTIYHLRKKLVDSTDKADLRLIYLALAHMIKFRGHFLIEGDLNPDNSDVDKLFIQLVQTYNQLFEENPINASGVDAKAILSARLSKSRRLENLIAQLPGEKKNGLFGNLIALSLGLTPNFKSNFDLAEDAKLQLSKDTYDDDLDNLLAQIGDQYADLFLAAKNLSDAILLSDILRVNTEITKAPLSASMIKRYDEHHQDLTLLKALVRQQLPEKYKEIFFDQSKNGYAGYIDGGASQEEFYKFIKPILEKMDGTEELLVKLNREDLLRKQRTFDNGSIPHQIHLGELHAILRRQEDFYPFLKDNREKIEKILTFRIPYYVGPLARGNSRFAWMTRKSEETITPWNFEEVVDKGASAQSFIERMTNFDKNLPNEKVLPKHSLLYEYFTVYNELTKVKYVTEGMRKPAFLSGEQKKAIVDLLFKTNRKVTVKQLKEDYFKKIECFDSVEISGVEDRFNASLGTYHDLLKIIKDKDFLDNEENEDILEDIVLTLTLFEDREMIEERLKTYAHLFDDKVMKQLKRRRYTGWGRLSRKLINGIRDKQSGKTILDFLKSDGFANRNFMQLIHDDSLTFKEDIQKAQVSGQGDSLHEHIANLAGSPAIKKGILQTVKVVDELVKVMGRHKPENIVIEMARENQTTQKGQKNSRERMKRIEEGIKELGSQILKEHPVENTQLQNEKLYLYYLQNGRDMYVDQELDINRLSDYDVDHIVPQSFLKDDSIDNKVLTRSDKARGKSDNVPSEEVVKKMKNYWRQLLNAKLITQRKFDNLTKAERGGLSELDKAGFIKRQLVETRQITKHVAQILDSRMNTKYDENDKLIREVKVITLKSKLVSDFRKDFQFYKVREINNYHHAHDAYLNAVVGTALIKKYPKLESEFVYGDYKVYDVRKMIAKSEQEIGKATAKYFFYSNIMNFFKTEITLANGEIRKRPLIETNGETGEIVWDKGRDFATVRKVLSMPQVNIVKKTEVQTGGFSKESILPKRNSDKLIARKKDWDPKKYGGFDSPTVAYSVLVVAKVEKGKSKKLKSVKELLGITIMERSSFEKNPIDFLEAKGYKEVKKDLIIKLPKYSLFELENGRKRMLASAGELQKGNELALPSKYVNFLYLASHYEKLKGSPEDNEQKQLFVEQHKHYLDEIIEQISEFSKRVILADANLDKVLSAYNKHRDKPIREQAENIIHLFTLTNLGAPAAFKYFDTTIDRKRYTSTKEVLDATLIHQSITGLYETRIDLSQLGGDGGGGGGSGGGGSGGGGSGGGGSGGGGSGGGGSGGLLGRDLLTKLKAQIQFSTEGPQVTWEDRPAMCLVLNLEEEYRLHEKPVPPSIDPSWLQLFPMVWAEKAGMGLANQVPPVVVELKSDASPVAVRQYPMSKEAREGIRPHIQRFLDLGILVPCQSPWNTPLLPVKKPGTNDYRPVQDLREVNKRVQDIHPTVPNPYNLLSSLPPSHTWYSVLDLKDAFFCLKLHPNSQPLFAFEWRDPEKGNTGQLTWTRLPQGFKNSPTLFNEALHRDLASFRALNPQVVMLQYVDDLLVAAPTYRDCKEGTRRLLQELSKLGYRVSAKKAQLCREEVTYLGYLLKGGKRWLTPARKATVMKIPTPTTPRQVREFLGKAGFCRLFIPGFASLAAPLYPLTRPKVPFTWTEAHQEAFGRIKEALLSAPALALPDLTKPFALYVDEKEGVARGVLTQTLGPWRRPVAYLSKKLDPVASGWPTCLKAIAAVALLLKDADKLTLGQNVLVIAPHNLESIVRQPPDRWMTNARMTHYQSLLLNERVSFAPPAILNPATLLPVESDDTPIHICSEILAEETGTRPDLRDQPLPGVPAWYTDGSSFIMDGRRQAGAAIVDNKRTVWASNLPEGTSAQKAELIALTQALRLAEGKSINIYTDSRYAFATAHVHGAIYKQRGWLTSAGKDIKNKEEILALLEAIHLPKRVAIIHCPGHQRGTDPVATGNRKADEAAKQAAQSTRILTETTKNAGKRTADGSEFEKRTADGSEFESPKKKAKVE

SEQ ID NO: 1663 - protein, 2127 aa, synthetic construct
MPAAKRVKLDGGDKKYSIGLDIGTNSVGWAVITDEYKVPSKKFKVLGNTDRHSIKKNLIGALLFDSGETAEATRLKRTARRRYTRRKNRICYLQEIFSNEMAKVDDSFFHRLEESFLVEEDKKHERHPIFGNIVDEVAYHEKYPTIYHLRKKLVDSTDKADLRLIYLALAHMIKFRGHFLIEGDLNPDNSDVDKLFIQLVQTYNQLFEENPINASGVDAKAILSARLSKSRRLENLIAQLPGEKKNGLFGNLIALSLGLTPNFKSNFDLAEDAKLQLSKDTYDDDLDNLLAQIGDQYADLFLAAKNLSDAILLSDILRVNTEITKAPLSASMIKRYDEHHQDLTLLKALVRQQLPEKYKEIFFDQSKNGYAGYIDGGASQEEFYKFIKPILEKMDGTEELLVKLNREDLLRKQRTFDNGSIPHQIHLGELHAILRRQEDFYPFLKDNREKIEKILTFRIPYYVGPLARGNSRFAWMTRKSEETITPWNFEEVVDKGASAQSFIERMTNFDKNLPNEKVLPKHSLLYEYFTVYNELTKVKYVTEGMRKPAFLSGEQKKAIVDLLFKTNRKVTVKQLKEDYFKKIECFDSVEISGVEDRFNASLGTYHDLLKIIKDKDFLDNEENEDILEDIVLTLTLFEDREMIEERLKTYAHLFDDKVMKQLKRRRYTGWGRLSRKLINGIRDKQSGKTILDFLKSDGFANRNFMQLIHDDSLTFKEDIQKAQVSGQGDSLHEHIANLAGSPAIKKGILQTVKVVDELVKVMGRHKPENIVIEMARENQTTQKGQKNSRERMKRIEEGIKELGSQILKEHPVENTQLQNEKLYLYYLQNGRDMYVDQELDINRLSDYDVDHIVPQSFLKDDSIDNKVLTRSDKARGKSDNVPSEEVVKKMKNYWRQLLNAKLITQRKFDNLTKAERGGLSELDKAGFIKRQLVETRQITKHVAQILDSRMNTKYDENDKLIREVKVITLKSKLVSDFRKDFQFYKVREINNYHHAHDAYLNAVVGTALIKKYPKLESEFVYGDYKVYDVRKMIAKSEQEIGKATAKYFFYSNIMNFFKTEITLANGEIRKRPLIETNGETGEIVWDKGRDFATVRKVLSMPQVNIVKKTEVQTGGFSKESILPKRNSDKLIARKKDWDPKKYGGFDSPTVAYSVLVVAKVEKGKSKKLKSVKELLGITIMERSSFEKNPIDFLEAKGYKEVKKDLIIKLPKYSLFELENGRKRMLASAGELQKGNELALPSKYVNFLYLASHYEKLKGSPEDNEQKQLFVEQHKHYLDEIIEQISEFSKRVILADANLDKVLSAYNKHRDKPIREQAENIIHLFTLTNLGAPAAFKYFDTTIDRKRYTSTKEVLDATLIHQSITGLYETRIDLSQLGGDGGPAPEAAAKGGGGGLLGRDLLTKLKAQIQFSTEGPQVTWEDRPAMCLVLNLEEEYRLHEKPVPPSIDPSWLQLFPMVWAEKAGMGLANQVPPVVVELKSDASPVAVRQYPMSKEAREGIRPHIQRFLDLGILVPCQSPWNTPLLPVKKPGTNDYRPVQDLREVNKRVQDIHPTVPNPYNLLSSLPPSHTWYSVLDLKDAFFCLKLHPNSQPLFAFEWRDPEKGNTGQLTWTRLPQGFKNSPTLFNEALHRDLASFRALNPQVVMLQYVDDLLVAAPTYRDCKEGTRRLLQELSKLGYRVSAKKAQLCREEVTYLGYLLKGGKRWLTPARKATVMKIPTPTTPRQVREFLGKAGFCRLFIPGFASLAAPLYPLTRPKVPFTWTEAHQEAFGRIKEALLSAPALALPDLTKPFALYVDEKEGVARGVLTQTLGPWRRPVAYLSKKLDPVASGWPTCLKAIAAVALLLKDADKLTLGQNVLVIAPHNLESIVRQPPDRWMTNARMTHYQSLLLNERVSFAPPAILNPATLLPVESDDTPIHICSEILAEETGTRPDLRDQPLPGVPAWYTDGSSFIMDGRRQAGAAIVDNKRTVWASNLPEGTSAQKAELIALTQALRLAEGKSINIYTDSRYAFATAHVHGAIYKQRGWLTSAGKDIKNKEEILALLEAIHLPKRVAIIHCPGHQRGTDPVATGNRKADEAAKQAAQSTRILTETTKNAGKRTADGSEFEKRTADGSEFESPKKKAKVE

SEQ ID NO: 1664 - protein, 2127 aa, synthetic construct
MPAAKRVKLDGGDKKYSIGLDIGTNSVGWAVITDEYKVPSKKFKVLGNTDRHSIKKNLIGALLFDSGETAEATRLKRTARRRYTRRKNRICYLQEIFSNEMAKVDDSFFHRLEESFLVEEDKKHERHPIFGNIVDEVAYHEKYPTIYHLRKKLVDSTDKADLRLIYLALAHMIKFRGHFLIEGDLNPDNSDVDKLFIQLVQTYNQLFEENPINASGVDAKAILSARLSKSRRLENLIAQLPGEKKNGLFGNLIALSLGLTPNFKSNFDLAEDAKLQLSKDTYDDDLDNLLAQIGDQYADLFLAAKNLSDAILLSDILRVNTEITKAPLSASMIKRYDEHHQDLTLLKALVRQQLPEKYKEIFFDQSKNGYAGYIDGGASQEEFYKFIKPILEKMDGTEELLVKLNREDLLRKQRTFDNGSIPHQIHLGELHAILRRQEDFYPFLKDNREKIEKILTFRIPYYVGPLARGNSRFAWMTRKSEETITPWNFEEVVDKGASAQSFIERMTNFDKNLPNEKVLPKHSLLYEYFTVYNELTKVKYVTEGMRKPAFLSGEQKKAIVDLLFKTNRKVTVKQLKEDYFKKIECFDSVEISGVEDRFNASLGTYHDLLKIIKDKDFLDNEENEDILEDIVLTLTLFEDREMIEERLKTYAHLFDDKVMKQLKRRRYTGWGRLSRKLINGIRDKQSGKTILDFLKSDGFANRNFMQLIHDDSLTFKEDIQKAQVSGQGDSLHEHIANLAGSPAIKKGILQTVKVVDELVKVMGRHKPENIVIEMARENQTTQKGQKNSRERMKRIEEGIKELGSQILKEHPVENTQLQNEKLYLYYLQNGRDMYVDQELDINRLSDYDVDHIVPQSFLKDDSIDNKVLTRSDKARGKSDNVPSEEVVKKMKNYWRQLLNAKLITQRKFDNLTKAERGGLSELDKAGFIKRQLVETRQITKHVAQILDSRMNTKYDENDKLIREVKVITLKSKLVSDFRKDFQFYKVREINNYHHAHDAYLNAVVGTALIKKYPKLESEFVYGDYKVYDVRKMIAKSEQEIGKATAKYFFYSNIMNFFKTEITLANGEIRKRPLIETNGETGEIVWDKGRDFATVRKVLSMPQVNIVKKTEVQTGGFSKESILPKRNSDKLIARKKDWDPKKYGGFDSPTVAYSVLVVAKVEKGKSKKLKSVKELLGITIMERSSFEKNPIDFLEAKGYKEVKKDLIIKLPKYSLFELENGRKRMLASAGELQKGNELALPSKYVNFLYLASHYEKLKGSPEDNEQKQLFVEQHKHYLDEIIEQISEFSKRVILADANLDKVLSAYNKHRDKPIREQAENIIHLFTLTNLGAPAAFKYFDTTIDRKRYTSTKEVLDATLIHQSITGLYETRIDLSQLGGDGGEAAAKGSSPAPGGLLGRDLLTKLKAQIQFSTEGPQVTWEDRPAMCLVLNLEEEYRLHEKPVPPSIDPSWLQLFPMVWAEKAGMGLANQVPPVVVELKSDASPVAVRQYPMSKEAREGIRPHIQRFLDLGILVPCQSPWNTPLLPVKKPGTNDYRPVQDLREVNKRVQDIHPTVPNPYNLLSSLPPSHTWYSVLDLKDAFFCLKLHPNSQPLFAFEWRDPEKGNTGQLTWTRLPQGFKNSPTLFNEALHRDLASFRALNPQVVMLQYVDDLLVAAPTYRDCKEGTRRLLQELSKLGYRVSAKKAQLCREEVTYLGYLLKGGKRWLTPARKATVMKIPTPTTPRQVREFLGKAGFCRLFIPGFASLAAPLYPLTRPKVPFTWTEAHQEAFGRIKEALLSAPALALPDLTKPFALYVDEKEGVARGVLTQTLGPWRRPVAYLSKKLDPVASGWPTCLKAIAAVALLLKDADKLTLGQNVLVIAPHNLESIVRQPPDRWMTNARMTHYQSLLLNERVSFAPPAILNPATLLPVESDDTPIHICSEILAEETGTRPDLRDQPLPGVPAWYTDGSSFIMDGRRQAGAAIVDNKRTVWASNLPEGTSAQKAELIALTQALRLAEGKSINIYTDSRYAFATAHVHGAIYKQRGWLTSAGKDIKNKEEILALLEAIHLPKRVAIIHCPGHQRGTDPVATGNRKADEAAKQAAQSTRILTETTKNAGKRTADGSEFEKRTADGSEFESPKKKAKVE

SEQ ID NO: 1665 - protein, 2131 aa, synthetic construct
MPAAKRVKLDGGDKKYSIGLDIGTNSVGWAVITDEYKVPSKKFKVLGNTDRHSIKKNLIGALLFDSGETAEATRLKRTARRRYTRRKNRICYLQEIFSNEMAKVDDSFFHRLEESFLVEEDKKHERHPIFGNIVDEVAYHEKYPTIYHLRKKLVDSTDKADLRLIYLALAHMIKFRGHFLIEGDLNPDNSDVDKLFIQLVQTYNQLFEENPINASGVDAKAILSARLSKSRRLENLIAQLPGEKKNGLFGNLIALSLGLTPNFKSNFDLAEDAKLQLSKDTYDDDLDNLLAQIGDQYADLFLAAKNLSDAILLSDILRVNTEITKAPLSASMIKRYDEHHQDLTLLKALVRQQLPEKYKEIFFDQSKNGYAGYIDGGASQEEFYKFIKPILEKMDGTEELLVKLNREDLLRKQRTFDNGSIPHQIHLGELHAILRRQEDFYPFLKDNREKIEKILTFRIPYYVGPLARGNSRFAWMTRKSEETITPWNFEEVVDKGASAQSFIERMTNFDKNLPNEKVLPKHSLLYEYFTVYNELTKVKYVTEGMRKPAFLSGEQKKAIVDLLFKTNRKVTVKQLKEDYFKKIECFDSVEISGVEDRFNASLGTYHDLLKIIKDKDFLDNEENEDILEDIVLTLTLFEDREMIEERLKTYAHLFDDKVMKQLKRRRYTGWGRLSRKLINGIRDKQSGKTILDFLKSDGFANRNFMQLIHDDSLTFKEDIQKAQVSGQGDSLHEHIANLAGSPAIKKGILQTVKVVDELVKVMGRHKPENIVIEMARENQTTQKGQKNSRERMKRIEEGIKELGSQILKEHPVENTQLQNEKLYLYYLQNGRDMYVDQELDINRLSDYDVDHIVPQSFLKDDSIDNKVLTRSDKARGKSDNVPSEEVVKKMKNYWRQLLNAKLITQRKFDNLTKAERGGLSELDKAGFIKRQLVETRQITKHVAQILDSRMNTKYDENDKLIREVKVITLKSKLVSDFRKDFQFYKVREINNYHHAHDAYLNAVVGTALIKKYPKLESEFVYGDYKVYDVRKMIAKSEQEIGKATAKYFFYSNIMNFFKTEITLANGEIRKRPLIETNGETGEIVWDKGRDFATVRKVLSMPQVNIVKKTEVQTGGFSKESILPKRNSDKLIARKKDWDPKKYGGFDSPTVAYSVLVVAKVEKGKSKKLKSVKELLGITIMERSSFEKNPIDFLEAKGYKEVKKDLIIKLPKYSLFELENGRKRMLASAGELQKGNELALPSKYVNFLYLASHYEKLKGSPEDNEQKQLFVEQHKHYLDEIIEQISEFSKRVILADANLDKVLSAYNKHRDKPIREQAENIIHLFTLTNLGAPAAFKYFDTTIDRKRYTSTKEVLDATLIHQSITGLYETRIDLSQLGGDGGGGSGGSGGSGGSGGSGGLLGRDLLTKLKAQIQFSTEGPQVTWEDRPAMCLVLNLEEEYRLHEKPVPPSIDPSWLQLFPMVWAEKAGMGLANQVPPVVVELKSDASPVAVRQYPMSKEAREGIRPHIQRFLDLGILVPCQSPWNTPLLPVKKPGTNDYRPVQDLREVNKRVQDIHPTVPNPYNLLSSLPPSHTWYSVLDLKDAFFCLKLHPNSQPLFAFEWRDPEKGNTGQLTWTRLPQGFKNSPTLFNEALHRDLASFRALNPQVVMLQYVDDLLVAAPTYRDCKEGTRRLLQELSKLGYRVSAKKAQLCREEVTYLGYLLKGGKRWLTPARKATVMKIPTPTTPRQVREFLGKAGFCRLFIPGFASLAAPLYPLTRPKVPFTWTEAHQEAFGRIKEALLSAPALALPDLTKPFALYVDEKEGVARGVLTQTLGPWRRPVAYLSKKLDPVASGWPTCLKAIAAVALLLKDADKLTLGQNVLVIAPHNLESIVRQPPDRWMTNARMTHYQSLLLNERVSFAPPAILNPATLLPVESDDTPIHICSEILAEETGTRPDLRDQPLPGVPAWYTDGSSFIMDGRRQAGAAIVDNKRTVWASNLPEGTSAQKAELIALTQALRLAEGKSINIYTDSRYAFATAHVHGAIYKQRGWLTSAGKDIKNKEEILALLEAIHLPKRVAIIHCPGHQRGTDPVATGNRKADEAAKQAAQSTRILTETTKNAGKRTADGSEFEKRTADGSEFESPKKKAKVE

SEQ ID NO: 1666 - protein, 2127 aa, synthetic construct
MPAAKRVKLDGGDKKYSIGLDIGTNSVGWAVITDEYKVPSKKFKVLGNTDRHSIKKNLIGALLFDSGETAEATRLKRTARRRYTRRKNRICYLQEIFSNEMAKVDDSFFHRLEESFLVEEDKKHERHPIFGNIVDEVAYHEKYPTIYHLRKKLVDSTDKADLRLIYLALAHMIKFRGHFLIEGDLNPDNSDVDKLFIQLVQTYNQLFEENPINASGVDAKAILSARLSKSRRLENLIAQLPGEKKNGLFGNLIALSLGLTPNFKSNFDLAEDAKLQLSKDTYDDDLDNLLAQIGDQYADLFLAAKNLSDAILLSDILRVNTEITKAPLSASMIKRYDEHHQDLTLLKALVRQQLPEKYKEIFFDQSKNGYAGYIDGGASQEEFYKFIKPILEKMDGTEELLVKLNREDLLRKQRTFDNGSIPHQIHLGELHAILRRQEDFYPFLKDNREKIEKILTFRIPYYVGPLARGNSRFAWMTRKSEETITPWNFEEVVDKGASAQSFIERMTNFDKNLPNEKVLPKHSLLYEYFTVYNELTKVKYVTEGMRKPAFLSGEQKKAIVDLLFKTNRKVTVKQLKEDYFKKIECFDSVEISGVEDRFNASLGTYHDLLKIIKDKDFLDNEENEDILEDIVLTLTLFEDREMIEERLKTYAHLFDDKVMKQLKRRRYTGWGRLSRKLINGIRDKQSGKTILDFLKSDGFANRNFMQLIHDDSLTFKEDIQKAQVSGQGDSLHEHIANLAGSPAIKKGILQTVKVVDELVKVMGRHKPENIVIEMARENQTTQKGQKNSRERMKRIEEGIKELGSQILKEHPVENTQLQNEKLYLYYLQNGRDMYVDQELDINRLSDYDVDHIVPQSFLKDDSIDNKVLTRSDKARGKSDNVPSEEVVKKMKNYWRQLLNAKLITQRKFDNLTKAERGGLSELDKAGFIKRQLVETRQITKHVAQILDSRMNTKYDENDKLIREVKVITLKSKLVSDFRKDFQFYKVREINNYHHAHDAYLNAVVGTALIKKYPKLESEFVYGDYKVYDVRKMIAKSEQEIGKATAKYFFYSNIMNFFKTEITLANGEIRKRPLIETNGETGEIVWDKGRDFATVRKVLSMPQVNIVKKTEVQTGGFSKESILPKRNSDKLIARKKDWDPKKYGGFDSPTVAYSVLVVAKVEKGKSKKLKSVKELLGITIMERSSFEKNPIDFLEAKGYKEVKKDLIIKLPKYSLFELENGRKRMLASAGELQKGNELALPSKYVNFLYLASHYEKLKGSPEDNEQKQLFVEQHKHYLDEIIEQISEFSKRVILADANLDKVLSAYNKHRDKPIREQAENIIHLFTLTNLGAPAAFKYFDTTIDRKRYTSTKEVLDATLIHQSITGLYETRIDLSQLGGDGGGGSPAPEAAAKGGLLGRDLLTKLKAQIQFSTEGPQVTWEDRPAMCLVLNLEEEYRLHEKPVPPSIDPSWLQLFPMVWAEKAGMGLANQVPPVVVELKSDASPVAVRQYPMSKEAREGIRPHIQRFLDLGILVPCQSPWNTPLLPVKKPGTNDYRPVQDLREVNKRVQDIHPTVPNPYNLLSSLPPSHTWYSVLDLKDAFFCLKLHPNSQPLFAFEWRDPEKGNTGQLTWTRLPQGFKNSPTLFNEALHRDLASFRALNPQVVMLQYVDDLLVAAPTYRDCKEGTRRLLQELSKLGYRVSAKKAQLCREEVTYLGYLLKGGKRWLTPARKATVMKIPTPTTPRQVREFLGKAGFCRLFIPGFASLAAPLYPLTRPKVPFTWTEAHQEAFGRIKEALLSAPALALPDLTKPFALYVDEKEGVARGVLTQTLGPWRRPVAYLSKKLDPVASGWPTCLKAIAAVALLLKDADKLTLGQNVLVIAPHNLESIVRQPPDRWMTNARMTHYQSLLLNERVSFAPPAILNPATLLPVESDDTPIHICSEILAEETGTRPDLRDQPLPGVPAWYTDGSSFIMDGRRQAGAAIVDNKRTVWASNLPEGTSAQKAELIALTQALRLAEGKSINIYTDSRYAFATAHVHGAIYKQRGWLTSAGKDIKNKEEILALLEAIHLPKRVAIIHCPGHQRGTDPVATGNRKADEAAKQAAQSTRILTETTKNAGKRTADGSEFEKRTADGSEFESPKKKAKVE

SEQ ID NO: 1667 - protein, 2134 aa, synthetic construct
MPAAKRVKLDGGDKKYSIGLDIGTNSVGWAVITDEYKVPSKKFKVLGNTDRHSIKKNLIGALLFDSGETAEATRLKRTARRRYTRRKNRICYLQEIFSNEMAKVDDSFFHRLEESFLVEEDKKHERHPIFGNIVDEVAYHEKYPTIYHLRKKLVDSTDKADLRLIYLALAHMIKFRGHFLIEGDLNPDNSDVDKLFIQLVQTYNQLFEENPINASGVDAKAILSARLSKSRRLENLIAQLPGEKKNGLFGNLIALSLGLTPNFKSNFDLAEDAKLQLSKDTYDDDLDNLLAQIGDQYADLFLAAKNLSDAILLSDILRVNTEITKAPLSASMIKRYDEHHQDLTLLKALVRQQLPEKYKEIFFDQSKNGYAGYIDGGASQEEFYKFIKPILEKMDGTEELLVKLNREDLLRKQRTFDNGSIPHQIHLGELHAILRRQEDFYPFLKDNREKIEKILTFRIPYYVGPLARGNSRFAWMTRKSEETITPWNFEEVVDKGASAQSFIERMTNFDKNLPNEKVLPKHSLLYEYFTVYNELTKVKYVTEGMRKPAFLSGEQKKAIVDLLFKTNRKVTVKQLKEDYFKKIECFDSVEISGVEDRFNASLGTYHDLLKIIKDKDFLDNEENEDILEDIVLTLTLFEDREMIEERLKTYAHLFDDKVMKQLKRRRYTGWGRLSRKLINGIRDKQSGKTILDFLKSDGFANRNFMQLIHDDSLTFKEDIQKAQVSGQGDSLHEHIANLAGSPAIKKGILQTVKVVDELVKVMGRHKPENIVIEMARENQTTQKGQKNSRERMKRIEEGIKELGSQILKEHPVENTQLQNEKLYLYYLQNGRDMYVDQELDINRLSDYDVDHIVPQSFLKDDSIDNKVLTRSDKARGKSDNVPSEEVVKKMKNYWRQLLNAKLITQRKFDNLTKAERGGLSELDKAGFIKRQLVETRQITKHVAQILDSRMNTKYDENDKLIREVKVITLKSKLVSDFRKDFQFYKVREINNYHHAHDAYLNAVVGTALIKKYPKLESEFVYGDYKVYDVRKMIAKSEQEIGKATAKYFFYSNIMNFFKTEITLANGEIRKRPLIETNGETGEIVWDKGRDFATVRKVLSMPQVNIVKKTEVQTGGFSKESILPKRNSDKLIARKKDWDPKKYGGFDSPTVAYSVLVVAKVEKGKSKKLKSVKELLGITIMERSSFEKNPIDFLEAKGYKEVKKDLIIKLPKYSLFELENGRKRMLASAGELQKGNELALPSKYVNFLYLASHYEKLKGSPEDNEQKQLFVEQHKHYLDEIIEQISEFSKRVILADANLDKVLSAYNKHRDKPIREQAENIIHLFTLTNLGAPAAFKYFDTTIDRKRYTSTKEVLDATLIHQSITGLYETRIDLSQLGGDGGGSSGSSGSSGSSGSSGSSGGLLGRDLLTKLKAQIQFSTEGPQVTWEDRPAMCLVLNLEEEYRLHEKPVPPSIDPSWLQLFPMVWAEKAGMGLANQVPPVVVELKSDASPVAVRQYPMSKEAREGIRPHIQRFLDLGILVPCQSPWNTPLLPVKKPGTNDYRPVQDLREVNKRVQDIHPTVPNPYNLLSSLPPSHTWYSVLDLKDAFFCLKLHPNSQPLFAFEWRDPEKGNTGQLTWTRLPQGFKNSPTLFNEALHRDLASFRALNPQVVMLQYVDDLLVAAPTYRDCKEGTRRLLQELSKLGYRVSAKKAQLCREEVTYLGYLLKGGKRWLTPARKATVMKIPTPTTPRQVREFLGKAGFCRLFIPGFASLAAPLYPLTRPKVPFTWTEAHQEAFGRIKEALLSAPALALPDLTKPFALYVDEKEGVARGVLTQTLGPWRRPVAYLSKKLDPVASGWPTCLKAIAAVALLLKDADKLTLGQNVLVIAPHNLESIVRQPPDRWMTNARMTHYQSLLLNERVSFAPPAILNPATLLPVESDDTPIHICSEILAEETGTRPDLRDQPLPGVPAWYTDGSSFIMDGRRQAGAAIVDNKRTVWASNLPEGTSAQKAELIALTQALRLAEGKSINIYTDSRYAFATAHVHGAIYKQRGWLTSAGKDIKNKEEILALLEAIHLPKRVAIIHCPGHQRGTDPVATGNRKADEAAKQAAQSTRILTETTKNAGKRTADGSEFEKRTADGSEFESPKKKAKVE

SEQ ID NO: 1668 - protein, 2122 aa, synthetic construct
MPAAKRVKLDGGDKKYSIGLDIGTNSVGWAVITDEYKVPSKKFKVLGNTDRHSIKKNLIGALLFDSGETAEATRLKRTARRRYTRRKNRICYLQEIFSNEMAKVDDSFFHRLEESFLVEEDKKHERHPIFGNIVDEVAYHEKYPTIYHLRKKLVDSTDKADLRLIYLALAHMIKFRGHFLIEGDLNPDNSDVDKLFIQLVQTYNQLFEENPINASGVDAKAILSARLSKSRRLENLIAQLPGEKKNGLFGNLIALSLGLTPNFKSNFDLAEDAKLQLSKDTYDDDLDNLLAQIGDQYADLFLAAKNLSDAILLSDILRVNTEITKAPLSASMIKRYDEHHQDLTLLKALVRQQLPEKYKEIFFDQSKNGYAGYIDGGASQEEFYKFIKPILEKMDGTEELLVKLNREDLLRKQRTFDNGSIPHQIHLGELHAILRRQEDFYPFLKDNREKIEKILTFRIPYYVGPLARGNSRFAWMTRKSEETITPWNFEEVVDKGASAQSFIERMTNFDKNLPNEKVLPKHSLLYEYFTVYNELTKVKYVTEGMRKPAFLSGEQKKAIVDLLFKTNRKVTVKQLKEDYFKKIECFDSVEISGVEDRFNASLGTYHDLLKIIKDKDFLDNEENEDILEDIVLTLTLFEDREMIEERLKTYAHLFDDKVMKQLKRRRYTGWGRLSRKLINGIRDKQSGKTILDFLKSDGFANRNFMQLIHDDSLTFKEDIQKAQVSGQGDSLHEHIANLAGSPAIKKGILQTVKVVDELVKVMGRHKPENIVIEMARENQTTQKGQKNSRERMKRIEEGIKELGSQILKEHPVENTQLQNEKLYLYYLQNGRDMYVDQELDINRLSDYDVDHIVPQSFLKDDSIDNKVLTRSDKARGKSDNVPSEEVVKKMKNYWRQLLNAKLITQRKFDNLTKAERGGLSELDKAGFIKRQLVETRQITKHVAQILDSRMNTKYDENDKLIREVKVITLKSKLVSDFRKDFQFYKVREINNYHHAHDAYLNAVVGTALIKKYPKLESEFVYGDYKVYDVRKMIAKSEQEIGKATAKYFFYSNIMNFFKTEITLANGEIRKRPLIETNGETGEIVWDKGRDFATVRKVLSMPQVNIVKKTEVQTGGFSKESILPKRNSDKLIARKKDWDPKKYGGFDSPTVAYSVLVVAKVEKGKSKKLKSVKELLGITIMERSSFEKNPIDFLEAKGYKEVKKDLIIKLPKYSLFELENGRKRMLASAGELQKGNELALPSKYVNFLYLASHYEKLKGSPEDNEQKQLFVEQHKHYLDEIIEQISEFSKRVILADANLDKVLSAYNKHRDKPIREQAENIIHLFTLTNLGAPAAFKYFDTTIDRKRYTSTKEVLDATLIHQSITGLYETRIDLSQLGGDGGGGSGGGGGLLGRDLLTKLKAQIQFSTEGPQVTWEDRPAMCLVLNLEEEYRLHEKPVPPSIDPSWLQLFPMVWAEKAGMGLANQVPPVVVELKSDASPVAVRQYPMSKEAREGIRPHIQRFLDLGILVPCQSPWNTPLLPVKKPGTNDYRPVQDLREVNKRVQDIHPTVPNPYNLLSSLPPSHTWYSVLDLKDAFFCLKLHPNSQPLFAFEWRDPEKGNTGQLTWTRLPQGFKNSPTLFNEALHRDLASFRALNPQVVMLQYVDDLLVAAPTYRDCKEGTRRLLQELSKLGYRVSAKKAQLCREEVTYLGYLLKGGKRWLTPARKATVMKIPTPTTPRQVREFLGKAGFCRLFIPGFASLAAPLYPLTRPKVPFTWTEAHQEAFGRIKEALLSAPALALPDLTKPFALYVDEKEGVARGVLTQTLGPWRRPVAYLSKKLDPVASGWPTCLKAIAAVALLLKDADKLTLGQNVLVIAPHNLESIVRQPPDRWMTNARMTHYQSLLLNERVSFAPPAILNPATLLPVESDDTPIHICSEILAEETGTRPDLRDQPLPGVPAWYTDGSSFIMDGRRQAGAAIVDNKRTVWASNLPEGTSAQKAELIALTQALRLAEGKSINIYTDSRYAFATAHVHGAIYKQRGWLTSAGKDIKNKEEILALLEAIHLPKRVAIIHCPGHQRGTDPVATGNRKADEAAKQAAQSTRILTETTKNAGKRTADGSEFEKRTADGSEFESPKKKAKVE

SEQ ID NO: 1669 - protein, 2124 aa, synthetic construct
MPAAKRVKLDGGDKKYSIGLDIGTNSVGWAVITDEYKVPSKKFKVLGNTDRHSIKKNLIGALLFDSGETAEATRLKRTARRRYTRRKNRICYLQEIFSNEMAKVDDSFFHRLEESFLVEEDKKHERHPIFGNIVDEVAYHEKYPTIYHLRKKLVDSTDKADLRLIYLALAHMIKFRGHFLIEGDLNPDNSDVDKLFIQLVQTYNQLFEENPINASGVDAKAILSARLSKSRRLENLIAQLPGEKKNGLFGNLIALSLGLTPNFKSNFDLAEDAKLQLSKDTYDDDLDNLLAQIGDQYADLFLAAKNLSDAILLSDILRVNTEITKAPLSASMIKRYDEHHQDLTLLKALVRQQLPEKYKEIFFDQSKNGYAGYIDGGASQEEFYKFIKPILEKMDGTEELLVKLNREDLLRKQRTFDNGSIPHQIHLGELHAILRRQEDFYPFLKDNREKIEKILTFRIPYYVGPLARGNSRFAWMTRKSEETITPWNFEEVVDKGASAQSFIERMTNFDKNLPNEKVLPKHSLLYEYFTVYNELTKVKYVTEGMRKPAFLSGEQKKAIVDLLFKTNRKVTVKQLKEDYFKKIECFDSVEISGVEDRFNASLGTYHDLLKIIKDKDFLDNEENEDILEDIVLTLTLFEDREMIEERLKTYAHLFDDKVMKQLKRRRYTGWGRLSRKLINGIRDKQSGKTILDFLKSDGFANRNFMQLIHDDSLTFKEDIQKAQVSGQGDSLHEHIANLAGSPAIKKGILQTVKVVDELVKVMGRHKPENIVIEMARENQTTQKGQKNSRERMKRIEEGIKELGSQILKEHPVENTQLQNEKLYLYYLQNGRDMYVDQELDINRLSDYDVDHIVPQSFLKDDSIDNKVLTRSDKARGKSDNVPSEEVVKKMKNYWRQLLNAKLITQRKFDNLTKAERGGLSELDKAGFIKRQLVETRQITKHVAQILDSRMNTKYDENDKLIREVKVITLKSKLVSDFRKDFQFYKVREINNYHHAHDAYLNAVVGTALIKKYPKLESEFVYGDYKVYDVRKMIAKSEQEIGKATAKYFFYSNIMNFFKTEITLANGEIRKRPLIETNGETGEIVWDKGRDFATVRKVLSMPQVNIVKKTEVQTGGFSKESILPKRNSDKLIARKKDWDPKKYGGFDSPTVAYSVLVVAKVEKGKSKKLKSVKELLGITIMERSSFEKNPIDFLEAKGYKEVKKDLIIKLPKYSLFELENGRKRMLASAGELQKGNELALPSKYVNFLYLASHYEKLKGSPEDNEQKQLFVEQHKHYLDEIIEQISEFSKRVILADANLDKVLSAYNKHRDKPIREQAENIIHLFTLTNLGAPAAFKYFDTTIDRKRYTSTKEVLDATLIHQSITGLYETRIDLSQLGGDGGPAPEAAAKGGLLGRDLLTKLKAQIQFSTEGPQVTWEDRPAMCLVLNLEEEYRLHEKPVPPSIDPSWLQLFPMVWAEKAGMGLANQVPPVVVELKSDASPVAVRQYPMSKEAREGIRPHIQRFLDLGILVPCQSPWNTPLLPVKKPGTNDYRPVQDLREVNKRVQDIHPTVPNPYNLLSSLPPSHTWYSVLDLKDAFFCLKLHPNSQPLFAFEWRDPEKGNTGQLTWTRLPQGFKNSPTLFNEALHRDLASFRALNPQVVMLQYVDDLLVAAPTYRDCKEGTRRLLQELSKLGYRVSAKKAQLCREEVTYLGYLLKGGKRWLTPARKATVMKIPTPTTPRQVREFLGKAGFCRLFIPGFASLAAPLYPLTRPKVPFTWTEAHQEAFGRIKEALLSAPALALPDLTKPFALYVDEKEGVARGVLTQTLGPWRRPVAYLSKKLDPVASGWPTCLKAIAAVALLLKDADKLTLGQNVLVIAPHNLESIVRQPPDRWMTNARMTHYQSLLLNERVSFAPPAILNPATLLPVESDDTPIHICSEILAEETGTRPDLRDQPLPGVPAWYTDGSSFIMDGRRQAGAAIVDNKRTVWASNLPEGTSAQKAELIALTQALRLAEGKSINIYTDSRYAFATAHVHGAIYKQRGWLTSAGKDIKNKEEILALLEAIHLPKRVAIIHCPGHQRGTDPVATGNRKADEAAKQAAQSTRILTETTKNAGKRTADGSEFEKRTADGSEFESPKKKAKVE

SEQ ID NO: 1670 - protein, 2162 aa, synthetic construct
MPAAKRVKLDGGDKKYSIGLDIGTNSVGWAVITDEYKVPSKKFKVLGNTDRHSIKKNLIGALLFDSGETAEATRLKRTARRRYTRRKNRICYLQEIFSNEMAKVDDSFFHRLEESFLVEEDKKHERHPIFGNIVDEVAYHEKYPTIYHLRKKLVDSTDKADLRLIYLALAHMIKFRGHFLIEGDLNPDNSDVDKLFIQLVQTYNQLFEENPINASGVDAKAILSARLSKSRRLENLIAQLPGEKKNGLFGNLIALSLGLTPNFKSNFDLAEDAKLQLSKDTYDDDLDNLLAQIGDQYADLFLAAKNLSDAILLSDILRVNTEITKAPLSASMIKRYDEHHQDLTLLKALVRQQLPEKYKEIFFDQSKNGYAGYIDGGASQEEFYKFIKPILEKMDGTEELLVKLNREDLLRKQRTFDNGSIPHQIHLGELHAILRRQEDFYPFLKDNREKIEKILTFRIPYYVGPLARGNSRFAWMTRKSEETITPWNFEEVVDKGASAQSFIERMTNFDKNLPNEKVLPKHSLLYEYFTVYNELTKVKYVTEGMRKPAFLSGEQKKAIVDLLFKTNRKVTVKQLKEDYFKKIECFDSVEISGVEDRFNASLGTYHDLLKIIKDKDFLDNEENEDILEDIVLTLTLFEDREMIEERLKTYAHLFDDKVMKQLKRRRYTGWGRLSRKLINGIRDKQSGKTILDFLKSDGFANRNFMQLIHDDSLTFKEDIQKAQVSGQGDSLHEHIANLAGSPAIKKGILQTVKVVDELVKVMGRHKPENIVIEMARENQTTQKGQKNSRERMKRIEEGIKELGSQILKEHPVENTQLQNEKLYLYYLQNGRDMYVDQELDINRLSDYDVDHIVPQSFLKDDSIDNKVLTRSDKARGKSDNVPSEEVVKKMKNYWRQLLNAKLITQRKFDNLTKAERGGLSELDKAGFIKRQLVETRQITKHVAQILDSRMNTKYDENDKLIREVKVITLKSKLVSDFRKDFQFYKVREINNYHHAHDAYLNAVVGTALIKKYPKLESEFVYGDYKVYDVRKMIAKSEQEIGKATAKYFFYSNIMNFFKTEITLANGEIRKRPLIETNGETGEIVWDKGRDFATVRKVLSMPQVNIVKKTEVQTGGFSKESILPKRNSDKLIARKKDWDPKKYGGFDSPTVAYSVLVVAKVEKGKSKKLKSVKELLGITIMERSSFEKNPIDFLEAKGYKEVKKDLIIKLPKYSLFELENGRKRMLASAGELQKGNELALPSKYVNFLYLASHYEKLKGSPEDNEQKQLFVEQHKHYLDEIIEQISEFSKRVILADANLDKVLSAYNKHRDKPIREQAENIIHLFTLTNLGAPAAFKYFDTTIDRKRYTSTKEVLDATLIHQSITGLYETRIDLSQLGGDGGAEAAAKEAAAKEAAAKEAAAKALEAEAAAKEAAAKEAAAKEAAAKAGGLLGRDLLTKLKAQIQFSTEGPQVTWEDRPAMCLVLNLEEEYRLHEKPVPPSIDPSWLQLFPMVWAEKAGMGLANQVPPVVVELKSDASPVAVRQYPMSKEAREGIRPHIQRFLDLGILVPCQSPWNTPLLPVKKPGTNDYRPVQDLREVNKRVQDIHPTVPNPYNLLSSLPPSHTWYSVLDLKDAFFCLKLHPNSQPLFAFEWRDPEKGNTGQLTWTRLPQGFKNSPTLFNEALHRDLASFRALNPQVVMLQYVDDLLVAAPTYRDCKEGTRRLLQELSKLGYRVSAKKAQLCREEVTYLGYLLKGGKRWLTPARKATVMKIPTPTTPRQVREFLGKAGFCRLFIPGFASLAAPLYPLTRPKVPFTWTEAHQEAFGRIKEALLSAPALALPDLTKPFALYVDEKEGVARGVLTQTLGPWRRPVAYLSKKLDPVASGWPTCLKAIAAVALLLKDADKLTLGQNVLVIAPHNLESIVRQPPDRWMTNARMTHYQSLLLNERVSFAPPAILNPATLLPVESDDTPIHICSEILAEETGTRPDLRDQPLPGVPAWYTDGSSFIMDGRRQAGAAIVDNKRTVWASNLPEGTSAQKAELIALTQALRLAEGKSINIYTDSRYAFATAHVHGAIYKQRGWLTSAGKDIKNKEEILALLEAIHLPKRVAIIHCPGHQRGTDPVATGNRKADEAAKQAAQSTRILTETTKNAGKRTADGSEFEKRTADGSEFESPKKKAKVE

SEQ ID NO: 1671 - protein, 2124 aa, synthetic construct
MPAAKRVKLDGGDKKYSIGLDIGTNSVGWAVITDEYKVPSKKFKVLGNTDRHSIKKNLIGALLFDSGETAEATRLKRTARRRYTRRKNRICYLQEIFSNEMAKVDDSFFHRLEESFLVEEDKKHERHPIFGNIVDEVAYHEKYPTIYHLRKKLVDSTDKADLRLIYLALAHMIKFRGHFLIEGDLNPDNSDVDKLFIQLVQTYNQLFEENPINASGVDAKAILSARLSKSRRLENLIAQLPGEKKNGLFGNLIALSLGLTPNFKSNFDLAEDAKLQLSKDTYDDDLDNLLAQIGDQYADLFLAAKNLSDAILLSDILRVNTEITKAPLSASMIKRYDEHHQDLTLLKALVRQQLPEKYKEIFFDQSKNGYAGYIDGGASQEEFYKFIKPILEKMDGTEELLVKLNREDLLRKQRTFDNGSIPHQIHLGELHAILRRQEDFYPFLKDNREKIEKILTFRIPYYVGPLARGNSRFAWMTRKSEETITPWNFEEVVDKGASAQSFIERMTNFDKNLPNEKVLPKHSLLYEYFTVYNELTKVKYVTEGMRKPAFLSGEQKKAIVDLLFKTNRKVTVKQLKEDYFKKIECFDSVEISGVEDRFNASLGTYHDLLKIIKDKDFLDNEENEDILEDIVLTLTLFEDREMIEERLKTYAHLFDDKVMKQLKRRRYTGWGRLSRKLINGIRDKQSGKTILDFLKSDGFANRNFMQLIHDDSLTFKEDIQKAQVSGQGDSLHEHIANLAGSPAIKKGILQTVKVVDELVKVMGRHKPENIVIEMARENQTTQKGQKNSRERMKRIEEGIKELGSQILKEHPVENTQLQNEKLYLYYLQNGRDMYVDQELDINRLSDYDVDHIVPQSFLKDDSIDNKVLTRSDKARGKSDNVPSEEVVKKMKNYWRQLLNAKLITQRKFDNLTKAERGGLSELDKAGFIKRQLVETRQITKHVAQILDSRMNTKYDENDKLIREVKVITLKSKLVSDFRKDFQFYKVREINNYHHAHDAYLNAVVGTALIKKYPKLESEFVYGDYKVYDVRKMIAKSEQEIGKATAKYFFYSNIMNFFKTEITLANGEIRKRPLIETNGETGEIVWDKGRDFATVRKVLSMPQVNIVKKTEVQTGGFSKESILPKRNSDKLIARKKDWDPKKYGGFDSPTVAYSVLVVAKVEKGKSKKLKSVKELLGITIMERSSFEKNPIDFLEAKGYKEVKKDLIIKLPKYSLFELENGRKRMLASAGELQKGNELALPSKYVNFLYLASHYEKLKGSPEDNEQKQLFVEQHKHYLDEIIEQISEFSKRVILADANLDKVLSAYNKHRDKPIREQAENIIHLFTLTNLGAPAAFKYFDTTIDRKRYTSTKEVLDATLIHQSITGLYETRIDLSQLGGDGGEAAAKGSSGGLLGRDLLTKLKAQIQFSTEGPQVTWEDRPAMCLVLNLEEEYRLHEKPVPPSIDPSWLQLFPMVWAEKAGMGLANQVPPVVVELKSDASPVAVRQYPMSKEAREGIRPHIQRFLDLGILVPCQSPWNTPLLPVKKPGTNDYRPVQDLREVNKRVQDIHPTVPNPYNLLSSLPPSHTWYSVLDLKDAFFCLKLHPNSQPLFAFEWRDPEKGNTGQLTWTRLPQGFKNSPTLFNEALHRDLASFRALNPQVVMLQYVDDLLVAAPTYRDCKEGTRRLLQELSKLGYRVSAKKAQLCREEVTYLGYLLKGGKRWLTPARKATVMKIPTPTTPRQVREFLGKAGFCRLFIPGFASLAAPLYPLTRPKVPFTWTEAHQEAFGRIKEALLSAPALALPDLTKPFALYVDEKEGVARGVLTQTLGPWRRPVAYLSKKLDPVASGWPTCLKAIAAVALLLKDADKLTLGQNVLVIAPHNLESIVRQPPDRWMTNARMTHYQSLLLNERVSFAPPAILNPATLLPVESDDTPIHICSEILAEETGTRPDLRDQPLPGVPAWYTDGSSFIMDGRRQAGAAIVDNKRTVWASNLPEGTSAQKAELIALTQALRLAEGKSINIYTDSRYAFATAHVHGAIYKQRGWLTSAGKDIKNKEEILALLEAIHLPKRVAIIHCPGHQRGTDPVATGNRKADEAAKQAAQSTRILTETTKNAGKRTADGSEFEKRTADGSEFESPKKKAKVE

SEQ ID NO: 1672 - protein, 2127 aa, synthetic construct
MPAAKRVKLDGGDKKYSIGLDIGTNSVGWAVITDEYKVPSKKFKVLGNTDRHSIKKNLIGALLFDSGETAEATRLKRTARRRYTRRKNRICYLQEIFSNEMAKVDDSFFHRLEESFLVEEDKKHERHPIFGNIVDEVAYHEKYPTIYHLRKKLVDSTDKADLRLIYLALAHMIKFRGHFLIEGDLNPDNSDVDKLFIQLVQTYNQLFEENPINASGVDAKAILSARLSKSRRLENLIAQLPGEKKNGLFGNLIALSLGLTPNFKSNFDLAEDAKLQLSKDTYDDDLDNLLAQIGDQYADLFLAAKNLSDAILLSDILRVNTEITKAPLSASMIKRYDEHHQDLTLLKALVRQQLPEKYKEIFFDQSKNGYAGYIDGGASQEEFYKFIKPILEKMDGTEELLVKLNREDLLRKQRTFDNGSIPHQIHLGELHAILRRQEDFYPFLKDNREKIEKILTFRIPYYVGPLARGNSRFAWMTRKSEETITPWNFEEVVDKGASAQSFIERMTNFDKNLPNEKVLPKHSLLYEYFTVYNELTKVKYVTEGMRKPAFLSGEQKKAIVDLLFKTNRKVTVKQLKEDYFKKIECFDSVEISGVEDRFNASLGTYHDLLKIIKDKDFLDNEENEDILEDIVLTLTLFEDREMIEERLKTYAHLFDDKVMKQLKRRRYTGWGRLSRKLINGIRDKQSGKTILDFLKSDGFANRNFMQLIHDDSLTFKEDIQKAQVSGQGDSLHEHIANLAGSPAIKKGILQTVKVVDELVKVMGRHKPENIVIEMARENQTTQKGQKNSRERMKRIEEGIKELGSQILKEHPVENTQLQNEKLYLYYLQNGRDMYVDQELDINRLSDYDVDHIVPQSFLKDDSIDNKVLTRSDKARGKSDNVPSEEVVKKMKNYWRQLLNAKLITQRKFDNLTKAERGGLSELDKAGFIKRQLVETRQITKHVAQILDSRMNTKYDENDKLIREVKVITLKSKLVSDFRKDFQFYKVREINNYHHAHDAYLNAVVGTALIKKYPKLESEFVYGDYKVYDVRKMIAKSEQEIGKATAKYFFYSNIMNFFKTEITLANGEIRKRPLIETNGETGEIVWDKGRDFATVRKVLSMPQVNIVKKTEVQTGGFSKESILPKRNSDKLIARKKDWDPKKYGGFDSPTVAYSVLVVAKVEKGKSKKLKSVKELLGITIMERSSFEKNPIDFLEAKGYKEVKKDLIIKLPKYSLFELENGRKRMLASAGELQKGNELALPSKYVNFLYLASHYEKLKGSPEDNEQKQLFVEQHKHYLDEIIEQISEFSKRVILADANLDKVLSAYNKHRDKPIREQAENIIHLFTLTNLGAPAAFKYFDTTIDRKRYTSTKEVLDATLIHQSITGLYETRIDLSQLGGDGGGGGEAAAKPAPGGLLGRDLLTKLKAQIQFSTEGPQVTWEDRPAMCLVLNLEEEYRLHEKPVPPSIDPSWLQLFPMVWAEKAGMGLANQVPPVVVELKSDASPVAVRQYPMSKEAREGIRPHIQRFLDLGILVPCQSPWNTPLLPVKKPGTNDYRPVQDLREVNKRVQDIHPTVPNPYNLLSSLPPSHTWYSVLDLKDAFFCLKLHPNSQPLFAFEWRDPEKGNTGQLTWTRLPQGFKNSPTLFNEALHRDLASFRALNPQVVMLQYVDDLLVAAPTYRDCKEGTRRLLQELSKLGYRVSAKKAQLCREEVTYLGYLLKGGKRWLTPARKATVMKIPTPTTPRQVREFLGKAGFCRLFIPGFASLAAPLYPLTRPKVPFTWTEAHQEAFGRIKEALLSAPALALPDLTKPFALYVDEKEGVARGVLTQTLGPWRRPVAYLSKKLDPVASGWPTCLKAIAAVALLLKDADKLTLGQNVLVIAPHNLESIVRQPPDRWMTNARMTHYQSLLLNERVSFAPPAILNPATLLPVESDDTPIHICSEILAEETGTRPDLRDQPLPGVPAWYTDGSSFIMDGRRQAGAAIVDNKRTVWASNLPEGTSAQKAELIALTQALRLAEGKSINIYTDSRYAFATAHVHGAIYKQRGWLTSAGKDIKNKEEILALLEAIHLPKRVAIIHCPGHQRGTDPVATGNRKADEAAKQAAQSTRILTETTKNAGKRTADGSEFEKRTADGSEFESPKKKAKVE

SEQ ID NO: 1673 - protein, 2122 aa, synthetic construct
MPAAKRVKLDGGDKKYSIGLDIGTNSVGWAVITDEYKVPSKKFKVLGNTDRHSIKKNLIGALLFDSGETAEATRLKRTARRRYTRRKNRICYLQEIFSNEMAKVDDSFFHRLEESFLVEEDKKHERHPIFGNIVDEVAYHEKYPTIYHLRKKLVDSTDKADLRLIYLALAHMIKFRGHFLIEGDLNPDNSDVDKLFIQLVQTYNQLFEENPINASGVDAKAILSARLSKSRRLENLIAQLPGEKKNGLFGNLIALSLGLTPNFKSNFDLAEDAKLQLSKDTYDDDLDNLLAQIGDQYADLFLAAKNLSDAILLSDILRVNTEITKAPLSASMIKRYDEHHQDLTLLKALVRQQLPEKYKEIFFDQSKNGYAGYIDGGASQEEFYKFIKPILEKMDGTEELLVKLNREDLLRKQRTFDNGSIPHQIHLGELHAILRRQEDFYPFLKDNREKIEKILTFRIPYYVGPLARGNSRFAWMTRKSEETITPWNFEEVVDKGASAQSFIERMTNFDKNLPNEKVLPKHSLLYEYFTVYNELTKVKYVTEGMRKPAFLSGEQKKAIVDLLFKTNRKVTVKQLKEDYFKKIECFDSVEISGVEDRFNASLGTYHDLLKIIKDKDFLDNEENEDILEDIVLTLTLFEDREMIEERLKTYAHLFDDKVMKQLKRRRYTGWGRLSRKLINGIRDKQSGKTILDFLKSDGFANRNFMQLIHDDSLTFKEDIQKAQVSGQGDSLHEHIANLAGSPAIKKGILQTVKVVDELVKVMGRHKPENIVIEMARENQTTQKGQKNSRERMKRIEEGIKELGSQILKEHPVENTQLQNEKLYLYYLQNGRDMYVDQELDINRLSDYDVDHIVPQSFLKDDSIDNKVLTRSDKARGKSDNVPSEEVVKKMKNYWRQLLNAKLITQRKFDNLTKAERGGLSELDKAGFIKRQLVETRQITKHVAQILDSRMNTKYDENDKLIREVKVITLKSKLVSDFRKDFQFYKVREINNYHHAHDAYLNAVVGTALIKKYPKLESEFVYGDYKVYDVRKMIAKSEQEIGKATAKYFFYSNIMNFFKTEITLANGEIRKRPLIETNGETGEIVWDKGRDFATVRKVLSMPQVNIVKKTEVQTGGFSKESILPKRNSDKLIARKKDWDPKKYGGFDSPTVAYSVLVVAKVEKGKSKKLKSVKELLGITIMERSSFEKNPIDFLEAKGYKEVKKDLIIKLPKYSLFELENGRKRMLASAGELQKGNELALPSKYVNFLYLASHYEKLKGSPEDNEQKQLFVEQHKHYLDEIIEQISEFSKRVILADANLDKVLSAYNKHRDKPIREQAENIIHLFTLTNLGAPAAFKYFDTTIDRKRYTSTKEVLDATLIHQSITGLYETRIDLSQLGGDGGGGGPAPGGLLGRDLLTKLKAQIQFSTEGPQVTWEDRPAMCLVLNLEEEYRLHEKPVPPSIDPSWLQLFPMVWAEKAGMGLANQVPPVVVELKSDASPVAVRQYPMSKEAREGIRPHIQRFLDLGILVPCQSPWNTPLLPVKKPGTNDYRPVQDLREVNKRVQDIHPTVPNPYNLLSSLPPSHTWYSVLDLKDAFFCLKLHPNSQPLFAFEWRDPEKGNTGQLTWTRLPQGFKNSPTLFNEALHRDLASFRALNPQVVMLQYVDDLLVAAPTYRDCKEGTRRLLQELSKLGYRVSAKKAQLCREEVTYLGYLLKGGKRWLTPARKATVMKIPTPTTPRQVREFLGKAGFCRLFIPGFASLAAPLYPLTRPKVPFTWTEAHQEAFGRIKEALLSAPALALPDLTKPFALYVDEKEGVARGVLTQTLGPWRRPVAYLSKKLDPVASGWPTCLKAIAAVALLLKDADKLTLGQNVLVIAPHNLESIVRQPPDRWMTNARMTHYQSLLLNERVSFAPPAILNPATLLPVESDDTPIHICSEILAEETGTRPDLRDQPLPGVPAWYTDGSSFIMDGRRQAGAAIVDNKRTVWASNLPEGTSAQKAELIALTQALRLAEGKSINIYTDSRYAFATAHVHGAIYKQRGWLTSAGKDIKNKEEILALLEAIHLPKRVAIIHCPGHQRGTDPVATGNRKADEAAKQAAQSTRILTETTKNAGKRTADGSEFEKRTADGSEFESPKKKAKVE

SEQ ID NO: 1674 - protein, 2136 aa, synthetic construct
MPAAKRVKLDGGDKKYSIGLDIGTNSVGWAVITDEYKVPSKKFKVLGNTDRHSIKKNLIGALLFDSGETAEATRLKRTARRRYTRRKNRICYLQEIFSNEMAKVDDSFFHRLEESFLVEEDKKHERHPIFGNIVDEVAYHEKYPTIYHLRKKLVDSTDKADLRLIYLALAHMIKFRGHFLIEGDLNPDNSDVDKLFIQLVQTYNQLFEENPINASGVDAKAILSARLSKSRRLENLIAQLPGEKKNGLFGNLIALSLGLTPNFKSNFDLAEDAKLQLSKDTYDDDLDNLLAQIGDQYADLFLAAKNLSDAILLSDILRVNTEITKAPLSASMIKRYDEHHQDLTLLKALVRQQLPEKYKEIFFDQSKNGYAGYIDGGASQEEFYKFIKPILEKMDGTEELLVKLNREDLLRKQRTFDNGSIPHQIHLGELHAILRRQEDFYPFLKDNREKIEKILTFRIPYYVGPLARGNSRFAWMTRKSEETITPWNFEEVVDKGASAQSFIERMTNFDKNLPNEKVLPKHSLLYEYFTVYNELTKVKYVTEGMRKPAFLSGEQKKAIVDLLFKTNRKVTVKQLKEDYFKKIECFDSVEISGVEDRFNASLGTYHDLLKIIKDKDFLDNEENEDILEDIVLTLTLFEDREMIEERLKTYAHLFDDKVMKQLKRRRYTGWGRLSRKLINGIRDKQSGKTILDFLKSDGFANRNFMQLIHDDSLTFKEDIQKAQVSGQGDSLHEHIANLAGSPAIKKGILQTVKVVDELVKVMGRHKPENIVIEMARENQTTQKGQKNSRERMKRIEEGIKELGSQILKEHPVENTQLQNEKLYLYYLQNGRDMYVDQELDINRLSDYDVDHIVPQSFLKDDSIDNKVLTRSDKARGKSDNVPSEEVVKKMKNYWRQLLNAKLITQRKFDNLTKAERGGLSELDKAGFIKRQLVETRQITKHVAQILDSRMNTKYDENDKLIREVKVITLKSKLVSDFRKDFQFYKVREINNYHHAHDAYLNAVVGTALIKKYPKLESEFVYGDYKVYDVRKMIAKSEQEIGKATAKYFFYSNIMNFFKTEITLANGEIRKRPLIETNGETGEIVWDKGRDFATVRKVLSMPQVNIVKKTEVQTGGFSKESILPKRNSDKLIARKKDWDPKKYGGFDSPTVAYSVLVVAKVEKGKSKKLKSVKELLGITIMERSSFEKNPIDFLEAKGYKEVKKDLIIKLPKYSLFELENGRKRMLASAGELQKGNELALPSKYVNFLYLASHYEKLKGSPEDNEQKQLFVEQHKHYLDEIIEQISEFSKRVILADANLDKVLSAYNKHRDKPIREQAENIIHLFTLTNLGAPAAFKYFDTTIDRKRYTSTKEVLDATLIHQSITGLYETRIDLSQLGGDGGEAAAKEAAAKEAAAKEAAAKGGLLGRDLLTKLKAQIQFSTEGPQVTWEDRPAMCLVLNLEEEYRLHEKPVPPSIDPSWLQLFPMVWAEKAGMGLANQVPPVVVELKSDASPVAVRQYPMSKEAREGIRPHIQRFLDLGILVPCQSPWNTPLLPVKKPGTNDYRPVQDLREVNKRVQDIHPTVPNPYNLLSSLPPSHTWYSVLDLKDAFFCLKLHPNSQPLFAFEWRDPEKGNTGQLTWTRLPQGFKNSPTLFNEALHRDLASFRALNPQVVMLQYVDDLLVAAPTYRDCKEGTRRLLQELSKLGYRVSAKKAQLCREEVTYLGYLLKGGKRWLTPARKATVMKIPTPTTPRQVREFLGKAGFCRLFIPGFASLAAPLYPLTRPKVPFTWTEAHQEAFGRIKEALLSAPALALPDLTKPFALYVDEKEGVARGVLTQTLGPWRRPVAYLSKKLDPVASGWPTCLKAIAAVALLLKDADKLTLGQNVLVIAPHNLESIVRQPPDRWMTNARMTHYQSLLLNERVSFAPPAILNPATLLPVESDDTPIHICSEILAEETGTRPDLRDQPLPGVPAWYTDGSSFIMDGRRQAGAAIVDNKRTVWASNLPEGTSAQKAELIALTQALRLAEGKSINIYTDSRYAFATAHVHGAIYKQRGWLTSAGKDIKNKEEILALLEAIHLPKRVAIIHCPGHQRGTDPVATGNRKADEAAKQAAQSTRILTETTKNAGKRTADGSEFEKRTADGSEFESPKKKAKVE

SEQ ID NO: 1675 - protein, 2119 aa, synthetic construct
MPAAKRVKLDGGDKKYSIGLDIGTNSVGWAVITDEYKVPSKKFKVLGNTDRHSIKKNLIGALLFDSGETAEATRLKRTARRRYTRRKNRICYLQEIFSNEMAKVDDSFFHRLEESFLVEEDKKHERHPIFGNIVDEVAYHEKYPTIYHLRKKLVDSTDKADLRLIYLALAHMIKFRGHFLIEGDLNPDNSDVDKLFIQLVQTYNQLFEENPINASGVDAKAILSARLSKSRRLENLIAQLPGEKKNGLFGNLIALSLGLTPNFKSNFDLAEDAKLQLSKDTYDDDLDNLLAQIGDQYADLFLAAKNLSDAILLSDILRVNTEITKAPLSASMIKRYDEHHQDLTLLKALVRQQLPEKYKEIFFDQSKNGYAGYIDGGASQEEFYKFIKPILEKMDGTEELLVKLNREDLLRKQRTFDNGSIPHQIHLGELHAILRRQEDFYPFLKDNREKIEKILTFRIPYYVGPLARGNSRFAWMTRKSEETITPWNFEEVVDKGASAQSFIERMTNFDKNLPNEKVLPKHSLLYEYFTVYNELTKVKYVTEGMRKPAFLSGEQKKAIVDLLFKTNRKVTVKQLKEDYFKKIECFDSVEISGVEDRFNASLGTYHDLLKIIKDKDFLDNEENEDILEDIVLTLTLFEDREMIEERLKTYAHLFDDKVMKQLKRRRYTGWGRLSRKLINGIRDKQSGKTILDFLKSDGFANRNFMQLIHDDSLTFKEDIQKAQVSGQGDSLHEHIANLAGSPAIKKGILQTVKVVDELVKVMGRHKPENIVIEMARENQTTQKGQKNSRERMKRIEEGIKELGSQILKEHPVENTQLQNEKLYLYYLQNGRDMYVDQELDINRLSDYDVDHIVPQSFLKDDSIDNKVLTRSDKARGKSDNVPSEEVVKKMKNYWRQLLNAKLITQRKFDNLTKAERGGLSELDKAGFIKRQLVETRQITKHVAQILDSRMNTKYDENDKLIREVKVITLKSKLVSDFRKDFQFYKVREINNYHHAHDAYLNAVVGTALIKKYPKLESEFVYGDYKVYDVRKMIAKSEQEIGKATAKYFFYSNIMNFFKTEITLANGEIRKRPLIETNGETGEIVWDKGRDFATVRKVLSMPQVNIVKKTEVQTGGFSKESILPKRNSDKLIARKKDWDPKKYGGFDSPTVAYSVLVVAKVEKGKSKKLKSVKELLGITIMERSSFEKNPIDFLEAKGYKEVKKDLIIKLPKYSLFELENGRKRMLASAGELQKGNELALPSKYVNFLYLASHYEKLKGSPEDNEQKQLFVEQHKHYLDEIIEQISEFSKRVILADANLDKVLSAYNKHRDKPIREQAENIIHLFTLTNLGAPAAFKYFDTTIDRKRYTSTKEVLDATLIHQSITGLYETRIDLSQLGGDGGGGSGGLLGRDLLTKLKAQIQFSTEGPQVTWEDRPAMCLVLNLEEEYRLHEKPVPPSIDPSWLQLFPMVWAEKAGMGLANQVPPVVVELKSDASPVAVRQYPMSKEAREGIRPHIQRFLDLGILVPCQSPWNTPLLPVKKPGTNDYRPVQDLREVNKRVQDIHPTVPNPYNLLSSLPPSHTWYSVLDLKDAFFCLKLHPNSQPLFAFEWRDPEKGNTGQLTWTRLPQGFKNSPTLFNEALHRDLASFRALNPQVVMLQYVDDLLVAAPTYRDCKEGTRRLLQELSKLGYRVSAKKAQLCREEVTYLGYLLKGGKRWLTPARKATVMKIPTPTTPRQVREFLGKAGFCRLFIPGFASLAAPLYPLTRPKVPFTWTEAHQEAFGRIKEALLSAPALALPDLTKPFALYVDEKEGVARGVLTQTLGPWRRPVAYLSKKLDPVASGWPTCLKAIAAVALLLKDADKLTLGQNVLVIAPHNLESIVRQPPDRWMTNARMTHYQSLLLNERVSFAPPAILNPATLLPVESDDTPIHICSEILAEETGTRPDLRDQPLPGVPAWYTDGSSFIMDGRRQAGAAIVDNKRTVWASNLPEGTSAQKAELIALTQALRLAEGKSINIYTDSRYAFATAHVHGAIYKQRGWLTSAGKDIKNKEEILALLEAIHLPKRVAIIHCPGHQRGTDPVATGNRKADEAAKQAAQSTRILTETTKNAGKRTADGSEFEKRTADGSEFESPKKKAKVE

SEQ ID NO: 1676 - protein, 2122 aa, synthetic construct
MPAAKRVKLDGGDKKYSIGLDIGTNSVGWAVITDEYKVPSKKFKVLGNTDRHSIKKNLIGALLFDSGETAEATRLKRTARRRYTRRKNRICYLQEIFSNEMAKVDDSFFHRLEESFLVEEDKKHERHPIFGNIVDEVAYHEKYPTIYHLRKKLVDSTDKADLRLIYLALAHMIKFRGHFLIEGDLNPDNSDVDKLFIQLVQTYNQLFEENPINASGVDAKAILSARLSKSRRLENLIAQLPGEKKNGLFGNLIALSLGLTPNFKSNFDLAEDAKLQLSKDTYDDDLDNLLAQIGDQYADLFLAAKNLSDAILLSDILRVNTEITKAPLSASMIKRYDEHHQDLTLLKALVRQQLPEKYKEIFFDQSKNGYAGYIDGGASQEEFYKFIKPILEKMDGTEELLVKLNREDLLRKQRTFDNGSIPHQIHLGELHAILRRQEDFYPFLKDNREKIEKILTFRIPYYVGPLARGNSRFAWMTRKSEETITPWNFEEVVDKGASAQSFIERMTNFDKNLPNEKVLPKHSLLYEYFTVYNELTKVKYVTEGMRKPAFLSGEQKKAIVDLLFKTNRKVTVKQLKEDYFKKIECFDSVEISGVEDRFNASLGTYHDLLKIIKDKDFLDNEENEDILEDIVLTLTLFEDREMIEERLKTYAHLFDDKVMKQLKRRRYTGWGRLSRKLINGIRDKQSGKTILDFLKSDGFANRNFMQLIHDDSLTFKEDIQKAQVSGQGDSLHEHIANLAGSPAIKKGILQTVKVVDELVKVMGRHKPENIVIEMARENQTTQKGQKNSRERMKRIEEGIKELGSQILKEHPVENTQLQNEKLYLYYLQNGRDMYVDQELDINRLSDYDVDHIVPQSFLKDDSIDNKVLTRSDKARGKSDNVPSEEVVKKMKNYWRQLLNAKLITQRKFDNLTKAERGGLSELDKAGFIKRQLVETRQITKHVAQILDSRMNTKYDENDKLIREVKVITLKSKLVSDFRKDFQFYKVREINNYHHAHDAYLNAVVGTALIKKYPKLESEFVYGDYKVYDVRKMIAKSEQEIGKATAKYFFYSNIMNFFKTEITLANGEIRKRPLIETNGETGEIVWDKGRDFATVRKVLSMPQVNIVKKTEVQTGGFSKESILPKRNSDKLIARKKDWDPKKYGGFDSPTVAYSVLVVAKVEKGKSKKLKSVKELLGITIMERSSFEKNPIDFLEAKGYKEVKKDLIIKLPKYSLFELENGRKRMLASAGELQKGNELALPSKYVNFLYLASHYEKLKGSPEDNEQKQLFVEQHKHYLDEIIEQISEFSKRVILADANLDKVLSAYNKHRDKPIREQAENIIHLFTLTNLGAPAAFKYFDTTIDRKRYTSTKEVLDATLIHQSITGLYETRIDLSQLGGDGGGGGGSSGGLLGRDLLTKLKAQIQFSTEGPQVTWEDRPAMCLVLNLEEEYRLHEKPVPPSIDPSWLQLFPMVWAEKAGMGLANQVPPVVVELKSDASPVAVRQYPMSKEAREGIRPHIQRFLDLGILVPCQSPWNTPLLPVKKPGTNDYRPVQDLREVNKRVQDIHPTVPNPYNLLSSLPPSHTWYSVLDLKDAFFCLKLHPNSQPLFAFEWRDPEKGNTGQLTWTRLPQGFKNSPTLFNEALHRDLASFRALNPQVVMLQYVDDLLVAAPTYRDCKEGTRRLLQELSKLGYRVSAKKAQLCREEVTYLGYLLKGGKRWLTPARKATVMKIPTPTTPRQVREFLGKAGFCRLFIPGFASLAAPLYPLTRPKVPFTWTEAHQEAFGRIKEALLSAPALALPDLTKPFALYVDEKEGVARGVLTQTLGPWRRPVAYLSKKLDPVASGWPTCLKAIAAVALLLKDADKLTLGQNVLVIAPHNLESIVRQPPDRWMTNARMTHYQSLLLNERVSFAPPAILNPATLLPVESDDTPIHICSEILAEETGTRPDLRDQPLPGVPAWYTDGSSFIMDGRRQAGAAIVDNKRTVWASNLPEGTSAQKAELIALTQALRLAEGKSINIYTDSRYAFATAHVHGAIYKQRGWLTSAGKDIKNKEEILALLEAIHLPKRVAIIHCPGHQRGTDPVATGNRKADEAAKQAAQSTRILTETTKNAGKRTADGSEFEKRTADGSEFESPKKKAKVE

SEQ ID NO: 1677 - protein, 2127 aa, synthetic construct
MPAAKRVKLDGGDKKYSIGLDIGTNSVGWAVITDEYKVPSKKFKVLGNTDRHSIKKNLIGALLFDSGETAEATRLKRTARRRYTRRKNRICYLQEIFSNEMAKVDDSFFHRLEESFLVEEDKKHERHPIFGNIVDEVAYHEKYPTIYHLRKKLVDSTDKADLRLIYLALAHMIKFRGHFLIEGDLNPDNSDVDKLFIQLVQTYNQLFEENPINASGVDAKAILSARLSKSRRLENLIAQLPGEKKNGLFGNLIALSLGLTPNFKSNFDLAEDAKLQLSKDTYDDDLDNLLAQIGDQYADLFLAAKNLSDAILLSDILRVNTEITKAPLSASMIKRYDEHHQDLTLLKALVRQQLPEKYKEIFFDQSKNGYAGYIDGGASQEEFYKFIKPILEKMDGTEELLVKLNREDLLRKQRTFDNGSIPHQIHLGELHAILRRQEDFYPFLKDNREKIEKILTFRIPYYVGPLARGNSRFAWMTRKSEETITPWNFEEVVDKGASAQSFIERMTNFDKNLPNEKVLPKHSLLYEYFTVYNELTKVKYVTEGMRKPAFLSGEQKKAIVDLLFKTNRKVTVKQLKEDYFKKIECFDSVEISGVEDRFNASLGTYHDLLKIIKDKDFLDNEENEDILEDIVLTLTLFEDREMIEERLKTYAHLFDDKVMKQLKRRRYTGWGRLSRKLINGIRDKQSGKTILDFLKSDGFANRNFMQLIHDDSLTFKEDIQKAQVSGQGDSLHEHIANLAGSPAIKKGILQTVKVVDELVKVMGRHKPENIVIEMARENQTTQKGQKNSRERMKRIEEGIKELGSQILKEHPVENTQLQNEKLYLYYLQNGRDMYVDQELDINRLSDYDVDHIVPQSFLKDDSIDNKVLTRSDKARGKSDNVPSEEVVKKMKNYWRQLLNAKLITQRKFDNLTKAERGGLSELDKAGFIKRQLVETRQITKHVAQILDSRMNTKYDENDKLIREVKVITLKSKLVSDFRKDFQFYKVREINNYHHAHDAYLNAVVGTALIKKYPKLESEFVYGDYKVYDVRKMIAKSEQEIGKATAKYFFYSNIMNFFKTEITLANGEIRKRPLIETNGETGEIVWDKGRDFATVRKVLSMPQVNIVKKTEVQTGGFSKESILPKRNSDKLIARKKDWDPKKYGGFDSPTVAYSVLVVAKVEKGKSKKLKSVKELLGITIMERSSFEKNPIDFLEAKGYKEVKKDLIIKLPKYSLFELENGRKRMLASAGELQKGNELALPSKYVNFLYLASHYEKLKGSPEDNEQKQLFVEQHKHYLDEIIEQISEFSKRVILADANLDKVLSAYNKHRDKPIREQAENIIHLFTLTNLGAPAAFKYFDTTIDRKRYTSTKEVLDATLIHQSITGLYETRIDLSQLGGDGGEAAAKGGGGSSGGLLGRDLLTKLKAQIQFSTEGPQVTWEDRPAMCLVLNLEEEYRLHEKPVPPSIDPSWLQLFPMVWAEKAGMGLANQVPPVVVELKSDASPVAVRQYPMSKEAREGIRPHIQRFLDLGILVPCQSPWNTPLLPVKKPGTNDYRPVQDLREVNKRVQDIHPTVPNPYNLLSSLPPSHTWYSVLDLKDAFFCLKLHPNSQPLFAFEWRDPEKGNTGQLTWTRLPQGFKNSPTLFNEALHRDLASFRALNPQVVMLQYVDDLLVAAPTYRDCKEGTRRLLQELSKLGYRVSAKKAQLCREEVTYLGYLLKGGKRWLTPARKATVMKIPTPTTPRQVREFLGKAGFCRLFIPGFASLAAPLYPLTRPKVPFTWTEAHQEAFGRIKEALLSAPALALPDLTKPFALYVDEKEGVARGVLTQTLGPWRRPVAYLSKKLDPVASGWPTCLKAIAAVALLLKDADKLTLGQNVLVIAPHNLESIVRQPPDRWMTNARMTHYQSLLLNERVSFAPPAILNPATLLPVESDDTPIHICSEILAEETGTRPDLRDQPLPGVPAWYTDGSSFIMDGRRQAGAAIVDNKRTVWASNLPEGTSAQKAELIALTQALRLAEGKSINIYTDSRYAFATAHVHGAIYKQRGWLTSAGKDIKNKEEILALLEAIHLPKRVAIIHCPGHQRGTDPVATGNRKADEAAKQAAQSTRILTETTKNAGKRTADGSEFEKRTADGSEFESPKKKAKVE

SEQ ID NO: 1678 - protein, 2128 aa, synthetic construct
MPAAKRVKLDGGDKKYSIGLDIGTNSVGWAVITDEYKVPSKKFKVLGNTDRHSIKKNLIGALLFDSGETAEATRLKRTARRRYTRRKNRICYLQEIFSNEMAKVDDSFFHRLEESFLVEEDKKHERHPIFGNIVDEVAYHEKYPTIYHLRKKLVDSTDKADLRLIYLALAHMIKFRGHFLIEGDLNPDNSDVDKLFIQLVQTYNQLFEENPINASGVDAKAILSARLSKSRRLENLIAQLPGEKKNGLFGNLIALSLGLTPNFKSNFDLAEDAKLQLSKDTYDDDLDNLLAQIGDQYADLFLAAKNLSDAILLSDILRVNTEITKAPLSASMIKRYDEHHQDLTLLKALVRQQLPEKYKEIFFDQSKNGYAGYIDGGASQEEFYKFIKPILEKMDGTEELLVKLNREDLLRKQRTFDNGSIPHQIHLGELHAILRRQEDFYPFLKDNREKIEKILTFRIPYYVGPLARGNSRFAWMTRKSEETITPWNFEEVVDKGASAQSFIERMTNFDKNLPNEKVLPKHSLLYEYFTVYNELTKVKYVTEGMRKPAFLSGEQKKAIVDLLFKTNRKVTVKQLKEDYFKKIECFDSVEISGVEDRFNASLGTYHDLLKIIKDKDFLDNEENEDILEDIVLTLTLFEDREMIEERLKTYAHLFDDKVMKQLKRRRYTGWGRLSRKLINGIRDKQSGKTILDFLKSDGFANRNFMQLIHDDSLTFKEDIQKAQVSGQGDSLHEHIANLAGSPAIKKGILQTVKVVDELVKVMGRHKPENIVIEMARENQTTQKGQKNSRERMKRIEEGIKELGSQILKEHPVENTQLQNEKLYLYYLQNGRDMYVDQELDINRLSDYDVDHIVPQSFLKDDSIDNKVLTRSDKARGKSDNVPSEEVVKKMKNYWRQLLNAKLITQRKFDNLTKAERGGLSELDKAGFIKRQLVETRQITKHVAQILDSRMNTKYDENDKLIREVKVITLKSKLVSDFRKDFQFYKVREINNYHHAHDAYLNAVVGTALIKKYPKLESEFVYGDYKVYDVRKMIAKSEQEIGKATAKYFFYSNIMNFFKTEITLANGEIRKRPLIETNGETGEIVWDKGRDFATVRKVLSMPQVNIVKKTEVQTGGFSKESILPKRNSDKLIARKKDWDPKKYGGFDSPTVAYSVLVVAKVEKGKSKKLKSVKELLGITIMERSSFEKNPIDFLEAKGYKEVKKDLIIKLPKYSLFELENGRKRMLASAGELQKGNELALPSKYVNFLYLASHYEKLKGSPEDNEQKQLFVEQHKHYLDEIIEQISEFSKRVILADANLDKVLSAYNKHRDKPIREQAENIIHLFTLTNLGAPAAFKYFDTTIDRKRYTSTKEVLDATLIHQSITGLYETRIDLSQLGGDGGGGSGGSGGSGGSGGLLGRDLLTKLKAQIQFSTEGPQVTWEDRPAMCLVLNLEEEYRLHEKPVPPSIDPSWLQLFPMVWAEKAGMGLANQVPPVVVELKSDASPVAVRQYPMSKEAREGIRPHIQRFLDLGILVPCQSPWNTPLLPVKKPGTNDYRPVQDLREVNKRVQDIHPTVPNPYNLLSSLPPSHTWYSVLDLKDAFFCLKLHPNSQPLFAFEWRDPEKGNTGQLTWTRLPQGFKNSPTLFNEALHRDLASFRALNPQVVMLQYVDDLLVAAPTYRDCKEGTRRLLQELSKLGYRVSAKKAQLCREEVTYLGYLLKGGKRWLTPARKATVMKIPTPTTPRQVREFLGKAGFCRLFIPGFASLAAPLYPLTRPKVPFTWTEAHQEAFGRIKEALLSAPALALPDLTKPFALYVDEKEGVARGVLTQTLGPWRRPVAYLSKKLDPVASGWPTCLKAIAAVALLLKDADKLTLGQNVLVIAPHNLESIVRQPPDRWMTNARMTHYQSLLLNERVSFAPPAILNPATLLPVESDDTPIHICSEILAEETGTRPDLRDQPLPGVPAWYTDGSSFIMDGRRQAGAAIVDNKRTVWASNLPEGTSAQKAELIALTQALRLAEGKSINIYTDSRYAFATAHVHGAIYKQRGWLTSAGKDIKNKEEILALLEAIHLPKRVAIIHCPGHQRGTDPVATGNRKADEAAKQAAQSTRILTETTKNAGKRTADGSEFEKRTADGSEFESPKKKAKVE

SEQ ID NO: 1679 - protein, 2124 aa, synthetic construct
MPAAKRVKLDGGDKKYSIGLDIGTNSVGWAVITDEYKVPSKKFKVLGNTDRHSIKKNLIGALLFDSGETAEATRLKRTARRRYTRRKNRICYLQEIFSNEMAKVDDSFFHRLEESFLVEEDKKHERHPIFGNIVDEVAYHEKYPTIYHLRKKLVDSTDKADLRLIYLALAHMIKFRGHFLIEGDLNPDNSDVDKLFIQLVQTYNQLFEENPINASGVDAKAILSARLSKSRRLENLIAQLPGEKKNGLFGNLIALSLGLTPNFKSNFDLAEDAKLQLSKDTYDDDLDNLLAQIGDQYADLFLAAKNLSDAILLSDILRVNTEITKAPLSASMIKRYDEHHQDLTLLKALVRQQLPEKYKEIFFDQSKNGYAGYIDGGASQEEFYKFIKPILEKMDGTEELLVKLNREDLLRKQRTFDNGSIPHQIHLGELHAILRRQEDFYPFLKDNREKIEKILTFRIPYYVGPLARGNSRFAWMTRKSEETITPWNFEEVVDKGASAQSFIERMTNFDKNLPNEKVLPKHSLLYEYFTVYNELTKVKYVTEGMRKPAFLSGEQKKAIVDLLFKTNRKVTVKQLKEDYFKKIECFDSVEISGVEDRFNASLGTYHDLLKIIKDKDFLDNEENEDILEDIVLTLTLFEDREMIEERLKTYAHLFDDKVMKQLKRRRYTGWGRLSRKLINGIRDKQSGKTILDFLKSDGFANRNFMQLIHDDSLTFKEDIQKAQVSGQGDSLHEHIANLAGSPAIKKGILQTVKVVDELVKVMGRHKPENIVIEMARENQTTQKGQKNSRERMKRIEEGIKELGSQILKEHPVENTQLQNEKLYLYYLQNGRDMYVDQELDINRLSDYDVDHIVPQSFLKDDSIDNKVLTRSDKARGKSDNVPSEEVVKKMKNYWRQLLNAKLITQRKFDNLTKAERGGLSELDKAGFIKRQLVETRQITKHVAQILDSRMNTKYDENDKLIREVKVITLKSKLVSDFRKDFQFYKVREINNYHHAHDAYLNAVVGTALIKKYPKLESEFVYGDYKVYDVRKMIAKSEQEIGKATAKYFFYSNIMNFFKTEITLANGEIRKRPLIETNGETGEIVWDKGRDFATVRKVLSMPQVNIVKKTEVQTGGFSKESILPKRNSDKLIARKKDWDPKKYGGFDSPTVAYSVLVVAKVEKGKSKKLKSVKELLGITIMERSSFEKNPIDFLEAKGYKEVKKDLIIKLPKYSLFELENGRKRMLASAGELQKGNELALPSKYVNFLYLASHYEKLKGSPEDNEQKQLFVEQHKHYLDEIIEQISEFSKRVILADANLDKVLSAYNKHRDKPIREQAENIIHLFTLTNLGAPAAFKYFDTTIDRKRYTSTKEVLDATLIHQSITGLYETRIDLSQLGGDGGEAAAKGGSGGLLGRDLLTKLKAQIQFSTEGPQVTWEDRPAMCLVLNLEEEYRLHEKPVPPSIDPSWLQLFPMVWAEKAGMGLANQVPPVVVELKSDASPVAVRQYPMSKEAREGIRPHIQRFLDLGILVPCQSPWNTPLLPVKKPGTNDYRPVQDLREVNKRVQDIHPTVPNPYNLLSSLPPSHTWYSVLDLKDAFFCLKLHPNSQPLFAFEWRDPEKGNTGQLTWTRLPQGFKNSPTLFNEALHRDLASFRALNPQVVMLQYVDDLLVAAPTYRDCKEGTRRLLQELSKLGYRVSAKKAQLCREEVTYLGYLLKGGKRWLTPARKATVMKIPTPTTPRQVREFLGKAGFCRLFIPGFASLAAPLYPLTRPKVPFTWTEAHQEAFGRIKEALLSAPALALPDLTKPFALYVDEKEGVARGVLTQTLGPWRRPVAYLSKKLDPVASGWPTCLKAIAAVALLLKDADKLTLGQNVLVIAPHNLESIVRQPPDRWMTNARMTHYQSLLLNERVSFAPPAILNPATLLPVESDDTPIHICSEILAEETGTRPDLRDQPLPGVPAWYTDGSSFIMDGRRQAGAAIVDNKRTVWASNLPEGTSAQKAELIALTQALRLAEGKSINIYTDSRYAFATAHVHGAIYKQRGWLTSAGKDIKNKEEILALLEAIHLPKRVAIIHCPGHQRGTDPVATGNRKADEAAKQAAQSTRILTETTKNAGKRTADGSEFEKRTADGSEFESPKKKAKVE

SEQ ID NO: 1680 - protein, 2123 aa, synthetic construct
MPAAKRVKLDGGDKKYSIGLDIGTNSVGWAVITDEYKVPSKKFKVLGNTDRHSIKKNLIGALLFDSGETAEATRLKRTARRRYTRRKNRICYLQEIFSNEMAKVDDSFFHRLEESFLVEEDKKHERHPIFGNIVDEVAYHEKYPTIYHLRKKLVDSTDKADLRLIYLALAHMIKFRGHFLIEGDLNPDNSDVDKLFIQLVQTYNQLFEENPINASGVDAKAILSARLSKSRRLENLIAQLPGEKKNGLFGNLIALSLGLTPNFKSNFDLAEDAKLQLSKDTYDDDLDNLLAQIGDQYADLFLAAKNLSDAILLSDILRVNTEITKAPLSASMIKRYDEHHQDLTLLKALVRQQLPEKYKEIFFDQSKNGYAGYIDGGASQEEFYKFIKPILEKMDGTEELLVKLNREDLLRKQRTFDNGSIPHQIHLGELHAILRRQEDFYPFLKDNREKIEKILTFRIPYYVGPLARGNSRFAWMTRKSEETITPWNFEEVVDKGASAQSFIERMTNFDKNLPNEKVLPKHSLLYEYFTVYNELTKVKYVTEGMRKPAFLSGEQKKAIVDLLFKTNRKVTVKQLKEDYFKKIECFDSVEISGVEDRFNASLGTYHDLLKIIKDKDFLDNEENEDILEDIVLTLTLFEDREMIEERLKTYAHLFDDKVMKQLKRRRYTGWGRLSRKLINGIRDKQSGKTILDFLKSDGFANRNFMQLIHDDSLTFKEDIQKAQVSGQGDSLHEHIANLAGSPAIKKGILQTVKVVDELVKVMGRHKPENIVIEMARENQTTQKGQKNSRERMKRIEEGIKELGSQILKEHPVENTQLQNEKLYLYYLQNGRDMYVDQELDINRLSDYDVDHIVPQSFLKDDSIDNKVLTRSDKARGKSDNVPSEEVVKKMKNYWRQLLNAKLITQRKFDNLTKAERGGLSELDKAGFIKRQLVETRQITKHVAQILDSRMNTKYDENDKLIREVKVITLKSKLVSDFRKDFQFYKVREINNYHHAHDAYLNAVVGTALIKKYPKLESEFVYGDYKVYDVRKMIAKSEQEIGKATAKYFFYSNIMNFFKTEITLANGEIRKRPLIETNGETGEIVWDKGRDFATVRKVLSMPQVNIVKKTEVQTGGFSKESILPKRNSDKLIARKKDWDPKKYGGFDSPTVAYSVLVVAKVEKGKSKKLKSVKELLGITIMERSSFEKNPIDFLEAKGYKEVKKDLIIKLPKYSLFELENGRKRMLASAGELQKGNELALPSKYVNFLYLASHYEKLKGSPEDNEQKQLFVEQHKHYLDEIIEQISEFSKRVILADANLDKVLSAYNKHRDKPIREQAENIIHLFTLTNLGAPAAFKYFDTTIDRKRYTSTKEVLDATLIHQSITGLYETRIDLSQLGGDGGPAPAPAPGGLLGRDLLTKLKAQIQFSTEGPQVTWEDRPAMCLVLNLEEEYRLHEKPVPPSIDPSWLQLFPMVWAEKAGMGLANQVPPVVVELKSDASPVAVRQYPMSKEAREGIRPHIQRFLDLGILVPCQSPWNTPLLPVKKPGTNDYRPVQDLREVNKRVQDIHPTVPNPYNLLSSLPPSHTWYSVLDLKDAFFCLKLHPNSQPLFAFEWRDPEKGNTGQLTWTRLPQGFKNSPTLFNEALHRDLASFRALNPQVVMLQYVDDLLVAAPTYRDCKEGTRRLLQELSKLGYRVSAKKAQLCREEVTYLGYLLKGGKRWLTPARKATVMKIPTPTTPRQVREFLGKAGFCRLFIPGFASLAAPLYPLTRPKVPFTWTEAHQEAFGRIKEALLSAPALALPDLTKPFALYVDEKEGVARGVLTQTLGPWRRPVAYLSKKLDPVASGWPTCLKAIAAVALLLKDADKLTLGQNVLVIAPHNLESIVRQPPDRWMTNARMTHYQSLLLNERVSFAPPAILNPATLLPVESDDTPIHICSEILAEETGTRPDLRDQPLPGVPAWYTDGSSFIMDGRRQAGAAIVDNKRTVWASNLPEGTSAQKAELIALTQALRLAEGKSINIYTDSRYAFATAHVHGAIYKQRGWLTSAGKDIKNKEEILALLEAIHLPKRVAIIHCPGHQRGTDPVATGNRKADEAAKQAAQSTRILTETTKNAGKRTADGSEFEKRTADGSEFESPKKKAKVE

SEQ ID NO: 1681 - protein, 2131 aa, synthetic construct
MPAAKRVKLDGGDKKYSIGLDIGTNSVGWAVITDEYKVPSKKFKVLGNTDRHSIKKNLIGALLFDSGETAEATRLKRTARRRYTRRKNRICYLQEIFSNEMAKVDDSFFHRLEESFLVEEDKKHERHPIFGNIVDEVAYHEKYPTIYHLRKKLVDSTDKADLRLIYLALAHMIKFRGHFLIEGDLNPDNSDVDKLFIQLVQTYNQLFEENPINASGVDAKAILSARLSKSRRLENLIAQLPGEKKNGLFGNLIALSLGLTPNFKSNFDLAEDAKLQLSKDTYDDDLDNLLAQIGDQYADLFLAAKNLSDAILLSDILRVNTEITKAPLSASMIKRYDEHHQDLTLLKALVRQQLPEKYKEIFFDQSKNGYAGYIDGGASQEEFYKFIKPILEKMDGTEELLVKLNREDLLRKQRTFDNGSIPHQIHLGELHAILRRQEDFYPFLKDNREKIEKILTFRIPYYVGPLARGNSRFAWMTRKSEETITPWNFEEVVDKGASAQSFIERMTNFDKNLPNEKVLPKHSLLYEYFTVYNELTKVKYVTEGMRKPAFLSGEQKKAIVDLLFKTNRKVTVKQLKEDYFKKIECFDSVEISGVEDRFNASLGTYHDLLKIIKDKDFLDNEENEDILEDIVLTLTLFEDREMIEERLKTYAHLFDDKVMKQLKRRRYTGWGRLSRKLINGIRDKQSGKTILDFLKSDGFANRNFMQLIHDDSLTFKEDIQKAQVSGQGDSLHEHIANLAGSPAIKKGILQTVKVVDELVKVMGRHKPENIVIEMARENQTTQKGQKNSRERMKRIEEGIKELGSQILKEHPVENTQLQNEKLYLYYLQNGRDMYVDQELDINRLSDYDVDHIVPQSFLKDDSIDNKVLTRSDKARGKSDNVPSEEVVKKMKNYWRQLLNAKLITQRKFDNLTKAERGGLSELDKAGFIKRQLVETRQITKHVAQILDSRMNTKYDENDKLIREVKVITLKSKLVSDFRKDFQFYKVREINNYHHAHDAYLNAVVGTALIKKYPKLESEFVYGDYKVYDVRKMIAKSEQEIGKATAKYFFYSNIMNFFKTEITLANGEIRKRPLIETNGETGEIVWDKGRDFATVRKVLSMPQVNIVKKTEVQTGGFSKESILPKRNSDKLIARKKDWDPKKYGGFDSPTVAYSVLVVAKVEKGKSKKLKSVKELLGITIMERSSFEKNPIDFLEAKGYKEVKKDLIIKLPKYSLFELENGRKRMLASAGELQKGNELALPSKYVNFLYLASHYEKLKGSPEDNEQKQLFVEQHKHYLDEIIEQISEFSKRVILADANLDKVLSAYNKHRDKPIREQAENIIHLFTLTNLGAPAAFKYFDTTIDRKRYTSTKEVLDATLIHQSITGLYETRIDLSQLGGDGGGSSGSSGSSGSSGSSGGLLGRDLLTKLKAQIQFSTEGPQVTWEDRPAMCLVLNLEEEYRLHEKPVPPSIDPSWLQLFPMVWAEKAGMGLANQVPPVVVELKSDASPVAVRQYPMSKEAREGIRPHIQRFLDLGILVPCQSPWNTPLLPVKKPGTNDYRPVQDLREVNKRVQDIHPTVPNPYNLLSSLPPSHTWYSVLDLKDAFFCLKLHPNSQPLFAFEWRDPEKGNTGQLTWTRLPQGFKNSPTLFNEALHRDLASFRALNPQVVMLQYVDDLLVAAPTYRDCKEGTRRLLQELSKLGYRVSAKKAQLCREEVTYLGYLLKGGKRWLTPARKATVMKIPTPTTPRQVREFLGKAGFCRLFIPGFASLAAPLYPLTRPKVPFTWTEAHQEAFGRIKEALLSAPALALPDLTKPFALYVDEKEGVARGVLTQTLGPWRRPVAYLSKKLDPVASGWPTCLKAIAAVALLLKDADKLTLGQNVLVIAPHNLESIVRQPPDRWMTNARMTHYQSLLLNERVSFAPPAILNPATLLPVESDDTPIHICSEILAEETGTRPDLRDQPLPGVPAWYTDGSSFIMDGRRQAGAAIVDNKRTVWASNLPEGTSAQKAELIALTQALRLAEGKSINIYTDSRYAFATAHVHGAIYKQRGWLTSAGKDIKNKEEILALLEAIHLPKRVAIIHCPGHQRGTDPVATGNRKADEAAKQAAQSTRILTETTKNAGKRTADGSEFEKRTADGSEFESPKKKAKVE

SEQ ID NO: 1682 - protein, 2127 aa, synthetic construct
MPAAKRVKLDGGDKKYSIGLDIGTNSVGWAVITDEYKVPSKKFKVLGNTDRHSIKKNLIGALLFDSGETAEATRLKRTARRRYTRRKNRICYLQEIFSNEMAKVDDSFFHRLEESFLVEEDKKHERHPIFGNIVDEVAYHEKYPTIYHLRKKLVDSTDKADLRLIYLALAHMIKFRGHFLIEGDLNPDNSDVDKLFIQLVQTYNQLFEENPINASGVDAKAILSARLSKSRRLENLIAQLPGEKKNGLFGNLIALSLGLTPNFKSNFDLAEDAKLQLSKDTYDDDLDNLLAQIGDQYADLFLAAKNLSDAILLSDILRVNTEITKAPLSASMIKRYDEHHQDLTLLKALVRQQLPEKYKEIFFDQSKNGYAGYIDGGASQEEFYKFIKPILEKMDGTEELLVKLNREDLLRKQRTFDNGSIPHQIHLGELHAILRRQEDFYPFLKDNREKIEKILTFRIPYYVGPLARGNSRFAWMTRKSEETITPWNFEEVVDKGASAQSFIERMTNFDKNLPNEKVLPKHSLLYEYFTVYNELTKVKYVTEGMRKPAFLSGEQKKAIVDLLFKTNRKVTVKQLKEDYFKKIECFDSVEISGVEDRFNASLGTYHDLLKIIKDKDFLDNEENEDILEDIVLTLTLFEDREMIEERLKTYAHLFDDKVMKQLKRRRYTGWGRLSRKLINGIRDKQSGKTILDFLKSDGFANRNFMQLIHDDSLTFKEDIQKAQVSGQGDSLHEHIANLAGSPAIKKGILQTVKVVDELVKVMGRHKPENIVIEMARENQTTQKGQKNSRERMKRIEEGIKELGSQILKEHPVENTQLQNEKLYLYYLQNGRDMYVDQELDINRLSDYDVDHIVPQSFLKDDSIDNKVLTRSDKARGKSDNVPSEEVVKKMKNYWRQLLNAKLITQRKFDNLTKAERGGLSELDKAGFIKRQLVETRQITKHVAQILDSRMNTKYDENDKLIREVKVITLKSKLVSDFRKDFQFYKVREINNYHHAHDAYLNAVVGTALIKKYPKLESEFVYGDYKVYDVRKMIAKSEQEIGKATAKYFFYSNIMNFFKTEITLANGEIRKRPLIETNGETGEIVWDKGRDFATVRKVLSMPQVNIVKKTEVQTGGFSKESILPKRNSDKLIARKKDWDPKKYGGFDSPTVAYSVLVVAKVEKGKSKKLKSVKELLGITIMERSSFEKNPIDFLEAKGYKEVKKDLIIKLPKYSLFELENGRKRMLASAGELQKGNELALPSKYVNFLYLASHYEKLKGSPEDNEQKQLFVEQHKHYLDEIIEQISEFSKRVILADANLDKVLSAYNKHRDKPIREQAENIIHLFTLTNLGAPAAFKYFDTTIDRKRYTSTKEVLDATLIHQSITGLYETRIDLSQLGGDGGGGGGGSEAAAKGGLLGRDLLTKLKAQIQFSTEGPQVTWEDRPAMCLVLNLEEEYRLHEKPVPPSIDPSWLQLFPMVWAEKAGMGLANQVPPVVVELKSDASPVAVRQYPMSKEAREGIRPHIQRFLDLGILVPCQSPWNTPLLPVKKPGTNDYRPVQDLREVNKRVQDIHPTVPNPYNLLSSLPPSHTWYSVLDLKDAFFCLKLHPNSQPLFAFEWRDPEKGNTGQLTWTRLPQGFKNSPTLFNEALHRDLASFRALNPQVVMLQYVDDLLVAAPTYRDCKEGTRRLLQELSKLGYRVSAKKAQLCREEVTYLGYLLKGGKRWLTPARKATVMKIPTPTTPRQVREFLGKAGFCRLFIPGFASLAAPLYPLTRPKVPFTWTEAHQEAFGRIKEALLSAPALALPDLTKPFALYVDEKEGVARGVLTQTLGPWRRPVAYLSKKLDPVASGWPTCLKAIAAVALLLKDADKLTLGQNVLVIAPHNLESIVRQPPDRWMTNARMTHYQSLLLNERVSFAPPAILNPATLLPVESDDTPIHICSEILAEETGTRPDLRDQPLPGVPAWYTDGSSFIMDGRRQAGAAIVDNKRTVWASNLPEGTSAQKAELIALTQALRLAEGKSINIYTDSRYAFATAHVHGAIYKQRGWLTSAGKDIKNKEEILALLEAIHLPKRVAIIHCPGHQRGTDPVATGNRKADEAAKQAAQSTRILTETTKNAGKRTADGSEFEKRTADGSEFESPKKKAKVE

SEQ ID NO: 1683 - protein, 2125 aa, synthetic construct
MPAAKRVKLDGGDKKYSIGLDIGTNSVGWAVITDEYKVPSKKFKVLGNTDRHSIKKNLIGALLFDSGETAEATRLKRTARRRYTRRKNRICYLQEIFSNEMAKVDDSFFHRLEESFLVEEDKKHERHPIFGNIVDEVAYHEKYPTIYHLRKKLVDSTDKADLRLIYLALAHMIKFRGHFLIEGDLNPDNSDVDKLFIQLVQTYNQLFEENPINASGVDAKAILSARLSKSRRLENLIAQLPGEKKNGLFGNLIALSLGLTPNFKSNFDLAEDAKLQLSKDTYDDDLDNLLAQIGDQYADLFLAAKNLSDAILLSDILRVNTEITKAPLSASMIKRYDEHHQDLTLLKALVRQQLPEKYKEIFFDQSKNGYAGYIDGGASQEEFYKFIKPILEKMDGTEELLVKLNREDLLRKQRTFDNGSIPHQIHLGELHAILRRQEDFYPFLKDNREKIEKILTFRIPYYVGPLARGNSRFAWMTRKSEETITPWNFEEVVDKGASAQSFIERMTNFDKNLPNEKVLPKHSLLYEYFTVYNELTKVKYVTEGMRKPAFLSGEQKKAIVDLLFKTNRKVTVKQLKEDYFKKIECFDSVEISGVEDRFNASLGTYHDLLKIIKDKDFLDNEENEDILEDIVLTLTLFEDREMIEERLKTYAHLFDDKVMKQLKRRRYTGWGRLSRKLINGIRDKQSGKTILDFLKSDGFANRNFMQLIHDDSLTFKEDIQKAQVSGQGDSLHEHIANLAGSPAIKKGILQTVKVVDELVKVMGRHKPENIVIEMARENQTTQKGQKNSRERMKRIEEGIKELGSQILKEHPVENTQLQNEKLYLYYLQNGRDMYVDQELDINRLSDYDVDHIVPQSFLKDDSIDNKVLTRSDKARGKSDNVPSEEVVKKMKNYWRQLLNAKLITQRKFDNLTKAERGGLSELDKAGFIKRQLVETRQITKHVAQILDSRMNTKYDENDKLIREVKVITLKSKLVSDFRKDFQFYKVREINNYHHAHDAYLNAVVGTALIKKYPKLESEFVYGDYKVYDVRKMIAKSEQEIGKATAKYFFYSNIMNFFKTEITLANGEIRKRPLIETNGETGEIVWDKGRDFATVRKVLSMPQVNIVKKTEVQTGGFSKESILPKRNSDKLIARKKDWDPKKYGGFDSPTVAYSVLVVAKVEKGKSKKLKSVKELLGITIMERSSFEKNPIDFLEAKGYKEVKKDLIIKLPKYSLFELENGRKRMLASAGELQKGNELALPSKYVNFLYLASHYEKLKGSPEDNEQKQLFVEQHKHYLDEIIEQISEFSKRVILADANLDKVLSAYNKHRDKPIREQAENIIHLFTLTNLGAPAAFKYFDTTIDRKRYTSTKEVLDATLIHQSITGLYETRIDLSQLGGDGGPAPGGSGSSGGLLGRDLLTKLKAQIQFSTEGPQVTWEDRPAMCLVLNLEEEYRLHEKPVPPSIDPSWLQLFPMVWAEKAGMGLANQVPPVVVELKSDASPVAVRQYPMSKEAREGIRPHIQRFLDLGILVPCQSPWNTPLLPVKKPGTNDYRPVQDLREVNKRVQDIHPTVPNPYNLLSSLPPSHTWYSVLDLKDAFFCLKLHPNSQPLFAFEWRDPEKGNTGQLTWTRLPQGFKNSPTLFNEALHRDLASFRALNPQVVMLQYVDDLLVAAPTYRDCKEGTRRLLQELSKLGYRVSAKKAQLCREEVTYLGYLLKGGKRWLTPARKATVMKIPTPTTPRQVREFLGKAGFCRLFIPGFASLAAPLYPLTRPKVPFTWTEAHQEAFGRIKEALLSAPALALPDLTKPFALYVDEKEGVARGVLTQTLGPWRRPVAYLSKKLDPVASGWPTCLKAIAAVALLLKDADKLTLGQNVLVIAPHNLESIVRQPPDRWMTNARMTHYQSLLLNERVSFAPPAILNPATLLPVESDDTPIHICSEILAEETGTRPDLRDQPLPGVPAWYTDGSSFIMDGRRQAGAAIVDNKRTVWASNLPEGTSAQKAELIALTQALRLAEGKSINIYTDSRYAFATAHVHGAIYKQRGWLTSAGKDIKNKEEILALLEAIHLPKRVAIIHCPGHQRGTDPVATGNRKADEAAKQAAQSTRILTETTKNAGKRTADGSEFEKRTADGSEFESPKKKAKVE

SEQ ID NO: 1684 - protein, 2127 aa, synthetic construct
MPAAKRVKLDGGDKKYSIGLDIGTNSVGWAVITDEYKVPSKKFKVLGNTDRHSIKKNLIGALLFDSGETAEATRLKRTARRRYTRRKNRICYLQEIFSNEMAKVDDSFFHRLEESFLVEEDKKHERHPIFGNIVDEVAYHEKYPTIYHLRKKLVDSTDKADLRLIYLALAHMIKFRGHFLIEGDLNPDNSDVDKLFIQLVQTYNQLFEENPINASGVDAKAILSARLSKSRRLENLIAQLPGEKKNGLFGNLIALSLGLTPNFKSNFDLAEDAKLQLSKDTYDDDLDNLLAQIGDQYADLFLAAKNLSDAILLSDILRVNTEITKAPLSASMIKRYDEHHQDLTLLKALVRQQLPEKYKEIFFDQSKNGYAGYIDGGASQEEFYKFIKPILEKMDGTEELLVKLNREDLLRKQRTFDNGSIPHQIHLGELHAILRRQEDFYPFLKDNREKIEKILTFRIPYYVGPLARGNSRFAWMTRKSEETITPWNFEEVVDKGASAQSFIERMTNFDKNLPNEKVLPKHSLLYEYFTVYNELTKVKYVTEGMRKPAFLSGEQKKAIVDLLFKTNRKVTVKQLKEDYFKKIECFDSVEISGVEDRFNASLGTYHDLLKIIKDKDFLDNEENEDILEDIVLTLTLFEDREMIEERLKTYAHLFDDKVMKQLKRRRYTGWGRLSRKLINGIRDKQSGKTILDFLKSDGFANRNFMQLIHDDSLTFKEDIQKAQVSGQGDSLHEHIANLAGSPAIKKGILQTVKVVDELVKVMGRHKPENIVIEMARENQTTQKGQKNSRERMKRIEEGIKELGSQILKEHPVENTQLQNEKLYLYYLQNGRDMYVDQELDINRLSDYDVDHIVPQSFLKDDSIDNKVLTRSDKARGKSDNVPSEEVVKKMKNYWRQLLNAKLITQRKFDNLTKAERGGLSELDKAGFIKRQLVETRQITKHVAQILDSRMNTKYDENDKLIREVKVITLKSKLVSDFRKDFQFYKVREINNYHHAHDAYLNAVVGTALIKKYPKLESEFVYGDYKVYDVRKMIAKSEQEIGKATAKYFFYSNIMNFFKTEITLANGEIRKRPLIETNGETGEIVWDKGRDFATVRKVLSMPQVNIVKKTEVQTGGFSKESILPKRNSDKLIARKKDWDPKKYGGFDSPTVAYSVLVVAKVEKGKSKKLKSVKELLGITIMERSSFEKNPIDFLEAKGYKEVKKDLIIKLPKYSLFELENGRKRMLASAGELQKGNELALPSKYVNFLYLASHYEKLKGSPEDNEQKQLFVEQHKHYLDEIIEQISEFSKRVILADANLDKVLSAYNKHRDKPIREQAENIIHLFTLTNLGAPAAFKYFDTTIDRKRYTSTKEVLDATLIHQSITGLYETRIDLSQLGGDGGPAPAPAPAPAPGGLLGRDLLTKLKAQIQFSTEGPQVTWEDRPAMCLVLNLEEEYRLHEKPVPPSIDPSWLQLFPMVWAEKAGMGLANQVPPVVVELKSDASPVAVRQYPMSKEAREGIRPHIQRFLDLGILVPCQSPWNTPLLPVKKPGTNDYRPVQDLREVNKRVQDIHPTVPNPYNLLSSLPPSHTWYSVLDLKDAFFCLKLHPNSQPLFAFEWRDPEKGNTGQLTWTRLPQGFKNSPTLFNEALHRDLASFRALNPQVVMLQYVDDLLVAAPTYRDCKEGTRRLLQELSKLGYRVSAKKAQLCREEVTYLGYLLKGGKRWLTPARKATVMKIPTPTTPRQVREFLGKAGFCRLFIPGFASLAAPLYPLTRPKVPFTWTEAHQEAFGRIKEALLSAPALALPDLTKPFALYVDEKEGVARGVLTQTLGPWRRPVAYLSKKLDPVASGWPTCLKAIAAVALLLKDADKLTLGQNVLVIAPHNLESIVRQPPDRWMTNARMTHYQSLLLNERVSFAPPAILNPATLLPVESDDTPIHICSEILAEETGTRPDLRDQPLPGVPAWYTDGSSFIMDGRRQAGAAIVDNKRTVWASNLPEGTSAQKAELIALTQALRLAEGKSINIYTDSRYAFATAHVHGAIYKQRGWLTSAGKDIKNKEEILALLEAIHLPKRVAIIHCPGHQRGTDPVATGNRKADEAAKQAAQSTRILTETTKNAGKRTADGSEFEKRTADGSEFESPKKKAKVE

SEQ ID NO: 1685 - protein, 2127 aa, synthetic construct
MPAAKRVKLDGGDKKYSIGLDIGTNSVGWAVITDEYKVPSKKFKVLGNTDRHSIKKNLIGALLFDSGETAEATRLKRTARRRYTRRKNRICYLQEIFSNEMAKVDDSFFHRLEESFLVEEDKKHERHPIFGNIVDEVAYHEKYPTIYHLRKKLVDSTDKADLRLIYLALAHMIKFRGHFLIEGDLNPDNSDVDKLFIQLVQTYNQLFEENPINASGVDAKAILSARLSKSRRLENLIAQLPGEKKNGLFGNLIALSLGLTPNFKSNFDLAEDAKLQLSKDTYDDDLDNLLAQIGDQYADLFLAAKNLSDAILLSDILRVNTEITKAPLSASMIKRYDEHHQDLTLLKALVRQQLPEKYKEIFFDQSKNGYAGYIDGGASQEEFYKFIKPILEKMDGTEELLVKLNREDLLRKQRTFDNGSIPHQIHLGELHAILRRQEDFYPFLKDNREKIEKILTFRIPYYVGPLARGNSRFAWMTRKSEETITPWNFEEVVDKGASAQSFIERMTNFDKNLPNEKVLPKHSLLYEYFTVYNELTKVKYVTEGMRKPAFLSGEQKKAIVDLLFKTNRKVTVKQLKEDYFKKIECFDSVEISGVEDRFNASLGTYHDLLKIIKDKDFLDNEENEDILEDIVLTLTLFEDREMIEERLKTYAHLFDDKVMKQLKRRRYTGWGRLSRKLINGIRDKQSGKTILDFLKSDGFANRNFMQLIHDDSLTFKEDIQKAQVSGQGDSLHEHIANLAGSPAIKKGILQTVKVVDELVKVMGRHKPENIVIEMARENQTTQKGQKNSRERMKRIEEGIKELGSQILKEHPVENTQLQNEKLYLYYLQNGRDMYVDQELDINRLSDYDVDHIVPQSFLKDDSIDNKVLTRSDKARGKSDNVPSEEVVKKMKNYWRQLLNAKLITQRKFDNLTKAERGGLSELDKAGFIKRQLVETRQITKHVAQILDSRMNTKYDENDKLIREVKVITLKSKLVSDFRKDFQFYKVREINNYHHAHDAYLNAVVGTALIKKYPKLESEFVYGDYKVYDVRKMIAKSEQEIGKATAKYFFYSNIMNFFKTEITLANGEIRKRPLIETNGETGEIVWDKGRDFATVRKVLSMPQVNIVKKTEVQTGGFSKESILPKRNSDKLIARKKDWDPKKYGGFDSPTVAYSVLVVAKVEKGKSKKLKSVKELLGITIMERSSFEKNPIDFLEAKGYKEVKKDLIIKLPKYSLFELENGRKRMLASAGELQKGNELALPSKYVNFLYLASHYEKLKGSPEDNEQKQLFVEQHKHYLDEIIEQISEFSKRVILADANLDKVLSAYNKHRDKPIREQAENIIHLFTLTNLGAPAAFKYFDTTIDRKRYTSTKEVLDATLIHQSITGLYETRIDLSQLGGDGGEAAAKPAPGGGGGLLGRDLLTKLKAQIQFSTEGPQVTWEDRPAMCLVLNLEEEYRLHEKPVPPSIDPSWLQLFPMVWAEKAGMGLANQVPPVVVELKSDASPVAVRQYPMSKEAREGIRPHIQRFLDLGILVPCQSPWNTPLLPVKKPGTNDYRPVQDLREVNKRVQDIHPTVPNPYNLLSSLPPSHTWYSVLDLKDAFFCLKLHPNSQPLFAFEWRDPEKGNTGQLTWTRLPQGFKNSPTLFNEALHRDLASFRALNPQVVMLQYVDDLLVAAPTYRDCKEGTRRLLQELSKLGYRVSAKKAQLCREEVTYLGYLLKGGKRWLTPARKATVMKIPTPTTPRQVREFLGKAGFCRLFIPGFASLAAPLYPLTRPKVPFTWTEAHQEAFGRIKEALLSAPALALPDLTKPFALYVDEKEGVARGVLTQTLGPWRRPVAYLSKKLDPVASGWPTCLKAIAAVALLLKDADKLTLGQNVLVIAPHNLESIVRQPPDRWMTNARMTHYQSLLLNERVSFAPPAILNPATLLPVESDDTPIHICSEILAEETGTRPDLRDQPLPGVPAWYTDGSSFIMDGRRQAGAAIVDNKRTVWASNLPEGTSAQKAELIALTQALRLAEGKSINIYTDSRYAFATAHVHGAIYKQRGWLTSAGKDIKNKEEILALLEAIHLPKRVAIIHCPGHQRGTDPVATGNRKADEAAKQAAQSTRILTETTKNAGKRTADGSEFEKRTADGSEFESPKKKAKVE

SEQ ID NO: 1686 - protein, 2125 aa, synthetic construct
MPAAKRVKLDGGDKKYSIGLDIGTNSVGWAVITDEYKVPSKKFKVLGNTDRHSIKKNLIGALLFDSGETAEATRLKRTARRRYTRRKNRICYLQEIFSNEMAKVDDSFFHRLEESFLVEEDKKHERHPIFGNIVDEVAYHEKYPTIYHLRKKLVDSTDKADLRLIYLALAHMIKFRGHFLIEGDLNPDNSDVDKLFIQLVQTYNQLFEENPINASGVDAKAILSARLSKSRRLENLIAQLPGEKKNGLFGNLIALSLGLTPNFKSNFDLAEDAKLQLSKDTYDDDLDNLLAQIGDQYADLFLAAKNLSDAILLSDILRVNTEITKAPLSASMIKRYDEHHQDLTLLKALVRQQLPEKYKEIFFDQSKNGYAGYIDGGASQEEFYKFIKPILEKMDGTEELLVKLNREDLLRKQRTFDNGSIPHQIHLGELHAILRRQEDFYPFLKDNREKIEKILTFRIPYYVGPLARGNSRFAWMTRKSEETITPWNFEEVVDKGASAQSFIERMTNFDKNLPNEKVLPKHSLLYEYFTVYNELTKVKYVTEGMRKPAFLSGEQKKAIVDLLFKTNRKVTVKQLKEDYFKKIECFDSVEISGVEDRFNASLGTYHDLLKIIKDKDFLDNEENEDILEDIVLTLTLFEDREMIEERLKTYAHLFDDKVMKQLKRRRYTGWGRLSRKLINGIRDKQSGKTILDFLKSDGFANRNFMQLIHDDSLTFKEDIQKAQVSGQGDSLHEHIANLAGSPAIKKGILQTVKVVDELVKVMGRHKPENIVIEMARENQTTQKGQKNSRERMKRIEEGIKELGSQILKEHPVENTQLQNEKLYLYYLQNGRDMYVDQELDINRLSDYDVDHIVPQSFLKDDSIDNKVLTRSDKARGKSDNVPSEEVVKKMKNYWRQLLNAKLITQRKFDNLTKAERGGLSELDKAGFIKRQLVETRQITKHVAQILDSRMNTKYDENDKLIREVKVITLKSKLVSDFRKDFQFYKVREINNYHHAHDAYLNAVVGTALIKKYPKLESEFVYGDYKVYDVRKMIAKSEQEIGKATAKYFFYSNIMNFFKTEITLANGEIRKRPLIETNGETGEIVWDKGRDFATVRKVLSMPQVNIVKKTEVQTGGFSKESILPKRNSDKLIARKKDWDPKKYGGFDSPTVAYSVLVVAKVEKGKSKKLKSVKELLGITIMERSSFEKNPIDFLEAKGYKEVKKDLIIKLPKYSLFELENGRKRMLASAGELQKGNELALPSKYVNFLYLASHYEKLKGSPEDNEQKQLFVEQHKHYLDEIIEQISEFSKRVILADANLDKVLSAYNKHRDKPIREQAENIIHLFTLTNLGAPAAFKYFDTTIDRKRYTSTKEVLDATLIHQSITGLYETRIDLSQLGGDGGGGSGGSGGSGGLLGRDLLTKLKAQIQFSTEGPQVTWEDRPAMCLVLNLEEEYRLHEKPVPPSIDPSWLQLFPMVWAEKAGMGLANQVPPVVVELKSDASPVAVRQYPMSKEAREGIRPHIQRFLDLGILVPCQSPWNTPLLPVKKPGTNDYRPVQDLREVNKRVQDIHPTVPNPYNLLSSLPPSHTWYSVLDLKDAFFCLKLHPNSQPLFAFEWRDPEKGNTGQLTWTRLPQGFKNSPTLFNEALHRDLASFRALNPQVVMLQYVDDLLVAAPTYRDCKEGTRRLLQELSKLGYRVSAKKAQLCREEVTYLGYLLKGGKRWLTPARKATVMKIPTPTTPRQVREFLGKAGFCRLFIPGFASLAAPLYPLTRPKVPFTWTEAHQEAFGRIKEALLSAPALALPDLTKPFALYVDEKEGVARGVLTQTLGPWRRPVAYLSKKLDPVASGWPTCLKAIAAVALLLKDADKLTLGQNVLVIAPHNLESIVRQPPDRWMTNARMTHYQSLLLNERVSFAPPAILNPATLLPVESDDTPIHICSEILAEETGTRPDLRDQPLPGVPAWYTDGSSFIMDGRRQAGAAIVDNKRTVWASNLPEGTSAQKAELIALTQALRLAEGKSINIYTDSRYAFATAHVHGAIYKQRGWLTSAGKDIKNKEEILALLEAIHLPKRVAIIHCPGHQRGTDPVATGNRKADEAAKQAAQSTRILTETTKNAGKRTADGSEFEKRTADGSEFESPKKKAKVE

SEQ ID NO: 1687 - protein, 2127 aa, synthetic construct
MPAAKRVKLDGGDKKYSIGLDIGTNSVGWAVITDEYKVPSKKFKVLGNTDRHSIKKNLIGALLFDSGETAEATRLKRTARRRYTRRKNRICYLQEIFSNEMAKVDDSFFHRLEESFLVEEDKKHERHPIFGNIVDEVAYHEKYPTIYHLRKKLVDSTDKADLRLIYLALAHMIKFRGHFLIEGDLNPDNSDVDKLFIQLVQTYNQLFEENPINASGVDAKAILSARLSKSRRLENLIAQLPGEKKNGLFGNLIALSLGLTPNFKSNFDLAEDAKLQLSKDTYDDDLDNLLAQIGDQYADLFLAAKNLSDAILLSDILRVNTEITKAPLSASMIKRYDEHHQDLTLLKALVRQQLPEKYKEIFFDQSKNGYAGYIDGGASQEEFYKFIKPILEKMDGTEELLVKLNREDLLRKQRTFDNGSIPHQIHLGELHAILRRQEDFYPFLKDNREKIEKILTFRIPYYVGPLARGNSRFAWMTRKSEETITPWNFEEVVDKGASAQSFIERMTNFDKNLPNEKVLPKHSLLYEYFTVYNELTKVKYVTEGMRKPAFLSGEQKKAIVDLLFKTNRKVTVKQLKEDYFKKIECFDSVEISGVEDRFNASLGTYHDLLKIIKDKDFLDNEENEDILEDIVLTLTLFEDREMIEERLKTYAHLFDDKVMKQLKRRRYTGWGRLSRKLINGIRDKQSGKTILDFLKSDGFANRNFMQLIHDDSLTFKEDIQKAQVSGQGDSLHEHIANLAGSPAIKKGILQTVKVVDELVKVMGRHKPENIVIEMARENQTTQKGQKNSRERMKRIEEGIKELGSQILKEHPVENTQLQNEKLYLYYLQNGRDMYVDQELDINRLSDYDVDHIVPQSFLKDDSIDNKVLTRSDKARGKSDNVPSEEVVKKMKNYWRQLLNAKLITQRKFDNLTKAERGGLSELDKAGFIKRQLVETRQITKHVAQILDSRMNTKYDENDKLIREVKVITLKSKLVSDFRKDFQFYKVREINNYHHAHDAYLNAVVGTALIKKYPKLESEFVYGDYKVYDVRKMIAKSEQEIGKATAKYFFYSNIMNFFKTEITLANGEIRKRPLIETNGETGEIVWDKGRDFATVRKVLSMPQVNIVKKTEVQTGGFSKESILPKRNSDKLIARKKDWDPKKYGGFDSPTVAYSVLVVAKVEKGKSKKLKSVKELLGITIMERSSFEKNPIDFLEAKGYKEVKKDLIIKLPKYSLFELENGRKRMLASAGELQKGNELALPSKYVNFLYLASHYEKLKGSPEDNEQKQLFVEQHKHYLDEIIEQISEFSKRVILADANLDKVLSAYNKHRDKPIREQAENIIHLFTLTNLGAPAAFKYFDTTIDRKRYTSTKEVLDATLIHQSITGLYETRIDLSQLGGDGGEAAAKPAPGSSGGLLGRDLLTKLKAQIQFSTEGPQVTWEDRPAMCLVLNLEEEYRLHEKPVPPSIDPSWLQLFPMVWAEKAGMGLANQVPPVVVELKSDASPVAVRQYPMSKEAREGIRPHIQRFLDLGILVPCQSPWNTPLLPVKKPGTNDYRPVQDLREVNKRVQDIHPTVPNPYNLLSSLPPSHTWYSVLDLKDAFFCLKLHPNSQPLFAFEWRDPEKGNTGQLTWTRLPQGFKNSPTLFNEALHRDLASFRALNPQVVMLQYVDDLLVAAPTYRDCKEGTRRLLQELSKLGYRVSAKKAQLCREEVTYLGYLLKGGKRWLTPARKATVMKIPTPTTPRQVREFLGKAGFCRLFIPGFASLAAPLYPLTRPKVPFTWTEAHQEAFGRIKEALLSAPALALPDLTKPFALYVDEKEGVARGVLTQTLGPWRRPVAYLSKKLDPVASGWPTCLKAIAAVALLLKDADKLTLGQNVLVIAPHNLESIVRQPPDRWMTNARMTHYQSLLLNERVSFAPPAILNPATLLPVESDDTPIHICSEILAEETGTRPDLRDQPLPGVPAWYTDGSSFIMDGRRQAGAAIVDNKRTVWASNLPEGTSAQKAELIALTQALRLAEGKSINIYTDSRYAFATAHVHGAIYKQRGWLTSAGKDIKNKEEILALLEAIHLPKRVAIIHCPGHQRGTDPVATGNRKADEAAKQAAQSTRILTETTKNAGKRTADGSEFEKRTADGSEFESPKKKAKVE

SEQ ID NO: 1688 - protein, 2127 aa, synthetic construct
MPAAKRVKLDGGDKKYSIGLDIGTNSVGWAVITDEYKVPSKKFKVLGNTDRHSIKKNLIGALLFDSGETAEATRLKRTARRRYTRRKNRICYLQEIFSNEMAKVDDSFFHRLEESFLVEEDKKHERHPIFGNIVDEVAYHEKYPTIYHLRKKLVDSTDKADLRLIYLALAHMIKFRGHFLIEGDLNPDNSDVDKLFIQLVQTYNQLFEENPINASGVDAKAILSARLSKSRRLENLIAQLPGEKKNGLFGNLIALSLGLTPNFKSNFDLAEDAKLQLSKDTYDDDLDNLLAQIGDQYADLFLAAKNLSDAILLSDILRVNTEITKAPLSASMIKRYDEHHQDLTLLKALVRQQLPEKYKEIFFDQSKNGYAGYIDGGASQEEFYKFIKPILEKMDGTEELLVKLNREDLLRKQRTFDNGSIPHQIHLGELHAILRRQEDFYPFLKDNREKIEKILTFRIPYYVGPLARGNSRFAWMTRKSEETITPWNFEEVVDKGASAQSFIERMTNFDKNLPNEKVLPKHSLLYEYFTVYNELTKVKYVTEGMRKPAFLSGEQKKAIVDLLFKTNRKVTVKQLKEDYFKKIECFDSVEISGVEDRFNASLGTYHDLLKIIKDKDFLDNEENEDILEDIVLTLTLFEDREMIEERLKTYAHLFDDKVMKQLKRRRYTGWGRLSRKLINGIRDKQSGKTILDFLKSDGFANRNFMQLIHDDSLTFKEDIQKAQVSGQGDSLHEHIANLAGSPAIKKGILQTVKVVDELVKVMGRHKPENIVIEMARENQTTQKGQKNSRERMKRIEEGIKELGSQILKEHPVENTQLQNEKLYLYYLQNGRDMYVDQELDINRLSDYDVDHIVPQSFLKDDSIDNKVLTRSDKARGKSDNVPSEEVVKKMKNYWRQLLNAKLITQRKFDNLTKAERGGLSELDKAGFIKRQLVETRQITKHVAQILDSRMNTKYDENDKLIREVKVITLKSKLVSDFRKDFQFYKVREINNYHHAHDAYLNAVVGTALIKKYPKLESEFVYGDYKVYDVRKMIAKSEQEIGKATAKYFFYSNIMNFFKTEITLANGEIRKRPLIETNGETGEIVWDKGRDFATVRKVLSMPQVNIVKKTEVQTGGFSKESILPKRNSDKLIARKKDWDPKKYGGFDSPTVAYSVLVVAKVEKGKSKKLKSVKELLGITIMERSSFEKNPIDFLEAKGYKEVKKDLIIKLPKYSLFELENGRKRMLASAGELQKGNELALPSKYVNFLYLASHYEKLKGSPEDNEQKQLFVEQHKHYLDEIIEQISEFSKRVILADANLDKVLSAYNKHRDKPIREQAENIIHLFTLTNLGAPAAFKYFDTTIDRKRYTSTKEVLDATLIHQSITGLYETRIDLSQLGGDGGGGGEAAAKGSSGGLLGRDLLTKLKAQIQFSTEGPQVTWEDRPAMCLVLNLEEEYRLHEKPVPPSIDPSWLQLFPMVWAEKAGMGLANQVPPVVVELKSDASPVAVRQYPMSKEAREGIRPHIQRFLDLGILVPCQSPWNTPLLPVKKPGTNDYRPVQDLREVNKRVQDIHPTVPNPYNLLSSLPPSHTWYSVLDLKDAFFCLKLHPNSQPLFAFEWRDPEKGNTGQLTWTRLPQGFKNSPTLFNEALHRDLASFRALNPQVVMLQYVDDLLVAAPTYRDCKEGTRRLLQELSKLGYRVSAKKAQLCREEVTYLGYLLKGGKRWLTPARKATVMKIPTPTTPRQVREFLGKAGFCRLFIPGFASLAAPLYPLTRPKVPFTWTEAHQEAFGRIKEALLSAPALALPDLTKPFALYVDEKEGVARGVLTQTLGPWRRPVAYLSKKLDPVASGWPTCLKAIAAVALLLKDADKLTLGQNVLVIAPHNLESIVRQPPDRWMTNARMTHYQSLLLNERVSFAPPAILNPATLLPVESDDTPIHICSEILAEETGTRPDLRDQPLPGVPAWYTDGSSFIMDGRRQAGAAIVDNKRTVWASNLPEGTSAQKAELIALTQALRLAEGKSINIYTDSRYAFATAHVHGAIYKQRGWLTSAGKDIKNKEEILALLEAIHLPKRVAIIHCPGHQRGTDPVATGNRKADEAAKQAAQSTRILTETTKNAGKRTADGSEFEKRTADGSEFESPKKKAKVE

SEQ ID NO: 1689 - protein, 2121 aa, synthetic construct
MPAAKRVKLDGGDKKYSIGLDIGTNSVGWAVITDEYKVPSKKFKVLGNTDRHSIKKNLIGALLFDSGETAEATRLKRTARRRYTRRKNRICYLQEIFSNEMAKVDDSFFHRLEESFLVEEDKKHERHPIFGNIVDEVAYHEKYPTIYHLRKKLVDSTDKADLRLIYLALAHMIKFRGHFLIEGDLNPDNSDVDKLFIQLVQTYNQLFEENPINASGVDAKAILSARLSKSRRLENLIAQLPGEKKNGLFGNLIALSLGLTPNFKSNFDLAEDAKLQLSKDTYDDDLDNLLAQIGDQYADLFLAAKNLSDAILLSDILRVNTEITKAPLSASMIKRYDEHHQDLTLLKALVRQQLPEKYKEIFFDQSKNGYAGYIDGGASQEEFYKFIKPILEKMDGTEELLVKLNREDLLRKQRTFDNGSIPHQIHLGELHAILRRQEDFYPFLKDNREKIEKILTFRIPYYVGPLARGNSRFAWMTRKSEETITPWNFEEVVDKGASAQSFIERMTNFDKNLPNEKVLPKHSLLYEYFTVYNELTKVKYVTEGMRKPAFLSGEQKKAIVDLLFKTNRKVTVKQLKEDYFKKIECFDSVEISGVEDRFNASLGTYHDLLKIIKDKDFLDNEENEDILEDIVLTLTLFEDREMIEERLKTYAHLFDDKVMKQLKRRRYTGWGRLSRKLINGIRDKQSGKTILDFLKSDGFANRNFMQLIHDDSLTFKEDIQKAQVSGQGDSLHEHIANLAGSPAIKKGILQTVKVVDELVKVMGRHKPENIVIEMARENQTTQKGQKNSRERMKRIEEGIKELGSQILKEHPVENTQLQNEKLYLYYLQNGRDMYVDQELDINRLSDYDVDHIVPQSFLKDDSIDNKVLTRSDKARGKSDNVPSEEVVKKMKNYWRQLLNAKLITQRKFDNLTKAERGGLSELDKAGFIKRQLVETRQITKHVAQILDSRMNTKYDENDKLIREVKVITLKSKLVSDFRKDFQFYKVREINNYHHAHDAYLNAVVGTALIKKYPKLESEFVYGDYKVYDVRKMIAKSEQEIGKATAKYFFYSNIMNFFKTEITLANGEIRKRPLIETNGETGEIVWDKGRDFATVRKVLSMPQVNIVKKTEVQTGGFSKESILPKRNSDKLIARKKDWDPKKYGGFDSPTVAYSVLVVAKVEKGKSKKLKSVKELLGITIMERSSFEKNPIDFLEAKGYKEVKKDLIIKLPKYSLFELENGRKRMLASAGELQKGNELALPSKYVNFLYLASHYEKLKGSPEDNEQKQLFVEQHKHYLDEIIEQISEFSKRVILADANLDKVLSAYNKHRDKPIREQAENIIHLFTLTNLGAPAAFKYFDTTIDRKRYTSTKEVLDATLIHQSITGLYETRIDLSQLGGDGGEAAAKGGLLGRDLLTKLKAQIQFSTEGPQVTWEDRPAMCLVLNLEEEYRLHEKPVPPSIDPSWLQLFPMVWAEKAGMGLANQVPPVVVELKSDASPVAVRQYPMSKEAREGIRPHIQRFLDLGILVPCQSPWNTPLLPVKKPGTNDYRPVQDLREVNKRVQDIHPTVPNPYNLLSSLPPSHTWYSVLDLKDAFFCLKLHPNSQPLFAFEWRDPEKGNTGQLTWTRLPQGFKNSPTLFNEALHRDLASFRALNPQVVMLQYVDDLLVAAPTYRDCKEGTRRLLQELSKLGYRVSAKKAQLCREEVTYLGYLLKGGKRWLTPARKATVMKIPTPTTPRQVREFLGKAGFCRLFIPGFASLAAPLYPLTRPKVPFTWTEAHQEAFGRIKEALLSAPALALPDLTKPFALYVDEKEGVARGVLTQTLGPWRRPVAYLSKKLDPVASGWPTCLKAIAAVALLLKDADKLTLGQNVLVIAPHNLESIVRQPPDRWMTNARMTHYQSLLLNERVSFAPPAILNPATLLPVESDDTPIHICSEILAEETGTRPDLRDQPLPGVPAWYTDGSSFIMDGRRQAGAAIVDNKRTVWASNLPEGTSAQKAELIALTQALRLAEGKSINIYTDSRYAFATAHVHGAIYKQRGWLTSAGKDIKNKEEILALLEAIHLPKRVAIIHCPGHQRGTDPVATGNRKADEAAKQAAQSTRILTETTKNAGKRTADGSEFEKRTADGSEFESPKKKAKVE

SEQ ID NO: 1690 - protein, 2127 aa, synthetic construct
MPAAKRVKLDGGDKKYSIGLDIGTNSVGWAVITDEYKVPSKKFKVLGNTDRHSIKKNLIGALLFDSGETAEATRLKRTARRRYTRRKNRICYLQEIFSNEMAKVDDSFFHRLEESFLVEEDKKHERHPIFGNIVDEVAYHEKYPTIYHLRKKLVDSTDKADLRLIYLALAHMIKFRGHFLIEGDLNPDNSDVDKLFIQLVQTYNQLFEENPINASGVDAKAILSARLSKSRRLENLIAQLPGEKKNGLFGNLIALSLGLTPNFKSNFDLAEDAKLQLSKDTYDDDLDNLLAQIGDQYADLFLAAKNLSDAILLSDILRVNTEITKAPLSASMIKRYDEHHQDLTLLKALVRQQLPEKYKEIFFDQSKNGYAGYIDGGASQEEFYKFIKPILEKMDGTEELLVKLNREDLLRKQRTFDNGSIPHQIHLGELHAILRRQEDFYPFLKDNREKIEKILTFRIPYYVGPLARGNSRFAWMTRKSEETITPWNFEEVVDKGASAQSFIERMTNFDKNLPNEKVLPKHSLLYEYFTVYNELTKVKYVTEGMRKPAFLSGEQKKAIVDLLFKTNRKVTVKQLKEDYFKKIECFDSVEISGVEDRFNASLGTYHDLLKIIKDKDFLDNEENEDILEDIVLTLTLFEDREMIEERLKTYAHLFDDKVMKQLKRRRYTGWGRLSRKLINGIRDKQSGKTILDFLKSDGFANRNFMQLIHDDSLTFKEDIQKAQVSGQGDSLHEHIANLAGSPAIKKGILQTVKVVDELVKVMGRHKPENIVIEMARENQTTQKGQKNSRERMKRIEEGIKELGSQILKEHPVENTQLQNEKLYLYYLQNGRDMYVDQELDINRLSDYDVDHIVPQSFLKDDSIDNKVLTRSDKARGKSDNVPSEEVVKKMKNYWRQLLNAKLITQRKFDNLTKAERGGLSELDKAGFIKRQLVETRQITKHVAQILDSRMNTKYDENDKLIREVKVITLKSKLVSDFRKDFQFYKVREINNYHHAHDAYLNAVVGTALIKKYPKLESEFVYGDYKVYDVRKMIAKSEQEIGKATAKYFFYSNIMNFFKTEITLANGEIRKRPLIETNGETGEIVWDKGRDFATVRKVLSMPQVNIVKKTEVQTGGFSKESILPKRNSDKLIARKKDWDPKKYGGFDSPTVAYSVLVVAKVEKGKSKKLKSVKELLGITIMERSSFEKNPIDFLEAKGYKEVKKDLIIKLPKYSLFELENGRKRMLASAGELQKGNELALPSKYVNFLYLASHYEKLKGSPEDNEQKQLFVEQHKHYLDEIIEQISEFSKRVILADANLDKVLSAYNKHRDKPIREQAENIIHLFTLTNLGAPAAFKYFDTTIDRKRYTSTKEVLDATLIHQSITGLYETRIDLSQLGGDGGEAAAKGSSGGSGGLLGRDLLTKLKAQIQFSTEGPQVTWEDRPAMCLVLNLEEEYRLHEKPVPPSIDPSWLQLFPMVWAEKAGMGLANQVPPVVVELKSDASPVAVRQYPMSKEAREGIRPHIQRFLDLGILVPCQSPWNTPLLPVKKPGTNDYRPVQDLREVNKRVQDIHPTVPNPYNLLSSLPPSHTWYSVLDLKDAFFCLKLHPNSQPLFAFEWRDPEKGNTGQLTWTRLPQGFKNSPTLFNEALHRDLASFRALNPQVVMLQYVDDLLVAAPTYRDCKEGTRRLLQELSKLGYRVSAKKAQLCREEVTYLGYLLKGGKRWLTPARKATVMKIPTPTTPRQVREFLGKAGFCRLFIPGFASLAAPLYPLTRPKVPFTWTEAHQEAFGRIKEALLSAPALALPDLTKPFALYVDEKEGVARGVLTQTLGPWRRPVAYLSKKLDPVASGWPTCLKAIAAVALLLKDADKLTLGQNVLVIAPHNLESIVRQPPDRWMTNARMTHYQSLLLNERVSFAPPAILNPATLLPVESDDTPIHICSEILAEETGTRPDLRDQPLPGVPAWYTDGSSFIMDGRRQAGAAIVDNKRTVWASNLPEGTSAQKAELIALTQALRLAEGKSINIYTDSRYAFATAHVHGAIYKQRGWLTSAGKDIKNKEEILALLEAIHLPKRVAIIHCPGHQRGTDPVATGNRKADEAAKQAAQSTRILTETTKNAGKRTADGSEFEKRTADGSEFESPKKKAKVE

SEQ ID NO: 1691 - protein, 2125 aa, synthetic construct
MPAAKRVKLDGGDKKYSIGLDIGTNSVGWAVITDEYKVPSKKFKVLGNTDRHSIKKNLIGALLFDSGETAEATRLKRTARRRYTRRKNRICYLQEIFSNEMAKVDDSFFHRLEESFLVEEDKKHERHPIFGNIVDEVAYHEKYPTIYHLRKKLVDSTDKADLRLIYLALAHMIKFRGHFLIEGDLNPDNSDVDKLFIQLVQTYNQLFEENPINASGVDAKAILSARLSKSRRLENLIAQLPGEKKNGLFGNLIALSLGLTPNFKSNFDLAEDAKLQLSKDTYDDDLDNLLAQIGDQYADLFLAAKNLSDAILLSDILRVNTEITKAPLSASMIKRYDEHHQDLTLLKALVRQQLPEKYKEIFFDQSKNGYAGYIDGGASQEEFYKFIKPILEKMDGTEELLVKLNREDLLRKQRTFDNGSIPHQIHLGELHAILRRQEDFYPFLKDNREKIEKILTFRIPYYVGPLARGNSRFAWMTRKSEETITPWNFEEVVDKGASAQSFIERMTNFDKNLPNEKVLPKHSLLYEYFTVYNELTKVKYVTEGMRKPAFLSGEQKKAIVDLLFKTNRKVTVKQLKEDYFKKIECFDSVEISGVEDRFNASLGTYHDLLKIIKDKDFLDNEENEDILEDIVLTLTLFEDREMIEERLKTYAHLFDDKVMKQLKRRRYTGWGRLSRKLINGIRDKQSGKTILDFLKSDGFANRNFMQLIHDDSLTFKEDIQKAQVSGQGDSLHEHIANLAGSPAIKKGILQTVKVVDELVKVMGRHKPENIVIEMARENQTTQKGQKNSRERMKRIEEGIKELGSQILKEHPVENTQLQNEKLYLYYLQNGRDMYVDQELDINRLSDYDVDHIVPQSFLKDDSIDNKVLTRSDKARGKSDNVPSEEVVKKMKNYWRQLLNAKLITQRKFDNLTKAERGGLSELDKAGFIKRQLVETRQITKHVAQILDSRMNTKYDENDKLIREVKVITLKSKLVSDFRKDFQFYKVREINNYHHAHDAYLNAVVGTALIKKYPKLESEFVYGDYKVYDVRKMIAKSEQEIGKATAKYFFYSNIMNFFKTEITLANGEIRKRPLIETNGETGEIVWDKGRDFATVRKVLSMPQVNIVKKTEVQTGGFSKESILPKRNSDKLIARKKDWDPKKYGGFDSPTVAYSVLVVAKVEKGKSKKLKSVKELLGITIMERSSFEKNPIDFLEAKGYKEVKKDLIIKLPKYSLFELENGRKRMLASAGELQKGNELALPSKYVNFLYLASHYEKLKGSPEDNEQKQLFVEQHKHYLDEIIEQISEFSKRVILADANLDKVLSAYNKHRDKPIREQAENIIHLFTLTNLGAPAAFKYFDTTIDRKRYTSTKEVLDATLIHQSITGLYETRIDLSQLGGDGGPAPGGGGSSGGLLGRDLLTKLKAQIQFSTEGPQVTWEDRPAMCLVLNLEEEYRLHEKPVPPSIDPSWLQLFPMVWAEKAGMGLANQVPPVVVELKSDASPVAVRQYPMSKEAREGIRPHIQRFLDLGILVPCQSPWNTPLLPVKKPGTNDYRPVQDLREVNKRVQDIHPTVPNPYNLLSSLPPSHTWYSVLDLKDAFFCLKLHPNSQPLFAFEWRDPEKGNTGQLTWTRLPQGFKNSPTLFNEALHRDLASFRALNPQVVMLQYVDDLLVAAPTYRDCKEGTRRLLQELSKLGYRVSAKKAQLCREEVTYLGYLLKGGKRWLTPARKATVMKIPTPTTPRQVREFLGKAGFCRLFIPGFASLAAPLYPLTRPKVPFTWTEAHQEAFGRIKEALLSAPALALPDLTKPFALYVDEKEGVARGVLTQTLGPWRRPVAYLSKKLDPVASGWPTCLKAIAAVALLLKDADKLTLGQNVLVIAPHNLESIVRQPPDRWMTNARMTHYQSLLLNERVSFAPPAILNPATLLPVESDDTPIHICSEILAEETGTRPDLRDQPLPGVPAWYTDGSSFIMDGRRQAGAAIVDNKRTVWASNLPEGTSAQKAELIALTQALRLAEGKSINIYTDSRYAFATAHVHGAIYKQRGWLTSAGKDIKNKEEILALLEAIHLPKRVAIIHCPGHQRGTDPVATGNRKADEAAKQAAQSTRILTETTKNAGKRTADGSEFEKRTADGSEFESPKKKAKVE

SEQ ID NO: 1692 - protein, 2119 aa, synthetic construct
MPAAKRVKLDGGDKKYSIGLDIGTNSVGWAVITDEYKVPSKKFKVLGNTDRHSIKKNLIGALLFDSGETAEATRLKRTARRRYTRRKNRICYLQEIFSNEMAKVDDSFFHRLEESFLVEEDKKHERHPIFGNIVDEVAYHEKYPTIYHLRKKLVDSTDKADLRLIYLALAHMIKFRGHFLIEGDLNPDNSDVDKLFIQLVQTYNQLFEENPINASGVDAKAILSARLSKSRRLENLIAQLPGEKKNGLFGNLIALSLGLTPNFKSNFDLAEDAKLQLSKDTYDDDLDNLLAQIGDQYADLFLAAKNLSDAILLSDILRVNTEITKAPLSASMIKRYDEHHQDLTLLKALVRQQLPEKYKEIFFDQSKNGYAGYIDGGASQEEFYKFIKPILEKMDGTEELLVKLNREDLLRKQRTFDNGSIPHQIHLGELHAILRRQEDFYPFLKDNREKIEKILTFRIPYYVGPLARGNSRFAWMTRKSEETITPWNFEEVVDKGASAQSFIERMTNFDKNLPNEKVLPKHSLLYEYFTVYNELTKVKYVTEGMRKPAFLSGEQKKAIVDLLFKTNRKVTVKQLKEDYFKKIECFDSVEISGVEDRFNASLGTYHDLLKIIKDKDFLDNEENEDILEDIVLTLTLFEDREMIEERLKTYAHLFDDKVMKQLKRRRYTGWGRLSRKLINGIRDKQSGKTILDFLKSDGFANRNFMQLIHDDSLTFKEDIQKAQVSGQGDSLHEHIANLAGSPAIKKGILQTVKVVDELVKVMGRHKPENIVIEMARENQTTQKGQKNSRERMKRIEEGIKELGSQILKEHPVENTQLQNEKLYLYYLQNGRDMYVDQELDINRLSDYDVDHIVPQSFLKDDSIDNKVLTRSDKARGKSDNVPSEEVVKKMKNYWRQLLNAKLITQRKFDNLTKAERGGLSELDKAGFIKRQLVETRQITKHVAQILDSRMNTKYDENDKLIREVKVITLKSKLVSDFRKDFQFYKVREINNYHHAHDAYLNAVVGTALIKKYPKLESEFVYGDYKVYDVRKMIAKSEQEIGKATAKYFFYSNIMNFFKTEITLANGEIRKRPLIETNGETGEIVWDKGRDFATVRKVLSMPQVNIVKKTEVQTGGFSKESILPKRNSDKLIARKKDWDPKKYGGFDSPTVAYSVLVVAKVEKGKSKKLKSVKELLGITIMERSSFEKNPIDFLEAKGYKEVKKDLIIKLPKYSLFELENGRKRMLASAGELQKGNELALPSKYVNFLYLASHYEKLKGSPEDNEQKQLFVEQHKHYLDEIIEQISEFSKRVILADANLDKVLSAYNKHRDKPIREQAENIIHLFTLTNLGAPAAFKYFDTTIDRKRYTSTKEVLDATLIHQSITGLYETRIDLSQLGGDGGPAPGGLLGRDLLTKLKAQIQFSTEGPQVTWEDRPAMCLVLNLEEEYRLHEKPVPPSIDPSWLQLFPMVWAEKAGMGLANQVPPVVVELKSDASPVAVRQYPMSKEAREGIRPHIQRFLDLGILVPCQSPWNTPLLPVKKPGTNDYRPVQDLREVNKRVQDIHPTVPNPYNLLSSLPPSHTWYSVLDLKDAFFCLKLHPNSQPLFAFEWRDPEKGNTGQLTWTRLPQGFKNSPTLFNEALHRDLASFRALNPQVVMLQYVDDLLVAAPTYRDCKEGTRRLLQELSKLGYRVSAKKAQLCREEVTYLGYLLKGGKRWLTPARKATVMKIPTPTTPRQVREFLGKAGFCRLFIPGFASLAAPLYPLTRPKVPFTWTEAHQEAFGRIKEALLSAPALALPDLTKPFALYVDEKEGVARGVLTQTLGPWRRPVAYLSKKLDPVASGWPTCLKAIAAVALLLKDADKLTLGQNVLVIAPHNLESIVRQPPDRWMTNARMTHYQSLLLNERVSFAPPAILNPATLLPVESDDTPIHICSEILAEETGTRPDLRDQPLPGVPAWYTDGSSFIMDGRRQAGAAIVDNKRTVWASNLPEGTSAQKAELIALTQALRLAEGKSINIYTDSRYAFATAHVHGAIYKQRGWLTSAGKDIKNKEEILALLEAIHLPKRVAIIHCPGHQRGTDPVATGNRKADEAAKQAAQSTRILTETTKNAGKRTADGSEFEKRTADGSEFESPKKKAKVE

SEQ ID NO: 1693 - protein, 2128 aa, synthetic construct
MPAAKRVKLDGGDKKYSIGLDIGTNSVGWAVITDEYKVPSKKFKVLGNTDRHSIKKNLIGALLFDSGETAEATRLKRTARRRYTRRKNRICYLQEIFSNEMAKVDDSFFHRLEESFLVEEDKKHERHPIFGNIVDEVAYHEKYPTIYHLRKKLVDSTDKADLRLIYLALAHMIKFRGHFLIEGDLNPDNSDVDKLFIQLVQTYNQLFEENPINASGVDAKAILSARLSKSRRLENLIAQLPGEKKNGLFGNLIALSLGLTPNFKSNFDLAEDAKLQLSKDTYDDDLDNLLAQIGDQYADLFLAAKNLSDAILLSDILRVNTEITKAPLSASMIKRYDEHHQDLTLLKALVRQQLPEKYKEIFFDQSKNGYAGYIDGGASQEEFYKFIKPILEKMDGTEELLVKLNREDLLRKQRTFDNGSIPHQIHLGELHAILRRQEDFYPFLKDNREKIEKILTFRIPYYVGPLARGNSRFAWMTRKSEETITPWNFEEVVDKGASAQSFIERMTNFDKNLPNEKVLPKHSLLYEYFTVYNELTKVKYVTEGMRKPAFLSGEQKKAIVDLLFKTNRKVTVKQLKEDYFKKIECFDSVEISGVEDRFNASLGTYHDLLKIIKDKDFLDNEENEDILEDIVLTLTLFEDREMIEERLKTYAHLFDDKVMKQLKRRRYTGWGRLSRKLINGIRDKQSGKTILDFLKSDGFANRNFMQLIHDDSLTFKEDIQKAQVSGQGDSLHEHIANLAGSPAIKKGILQTVKVVDELVKVMGRHKPENIVIEMARENQTTQKGQKNSRERMKRIEEGIKELGSQILKEHPVENTQLQNEKLYLYYLQNGRDMYVDQELDINRLSDYDVDHIVPQSFLKDDSIDNKVLTRSDKARGKSDNVPSEEVVKKMKNYWRQLLNAKLITQRKFDNLTKAERGGLSELDKAGFIKRQLVETRQITKHVAQILDSRMNTKYDENDKLIREVKVITLKSKLVSDFRKDFQFYKVREINNYHHAHDAYLNAVVGTALIKKYPKLESEFVYGDYKVYDVRKMIAKSEQEIGKATAKYFFYSNIMNFFKTEITLANGEIRKRPLIETNGETGEIVWDKGRDFATVRKVLSMPQVNIVKKTEVQTGGFSKESILPKRNSDKLIARKKDWDPKKYGGFDSPTVAYSVLVVAKVEKGKSKKLKSVKELLGITIMERSSFEKNPIDFLEAKGYKEVKKDLIIKLPKYSLFELENGRKRMLASAGELQKGNELALPSKYVNFLYLASHYEKLKGSPEDNEQKQLFVEQHKHYLDEIIEQISEFSKRVILADANLDKVLSAYNKHRDKPIREQAENIIHLFTLTNLGAPAAFKYFDTTIDRKRYTSTKEVLDATLIHQSITGLYETRIDLSQLGGDGGGSAGSAAGSGEFGGLLGRDLLTKLKAQIQFSTEGPQVTWEDRPAMCLVLNLEEEYRLHEKPVPPSIDPSWLQLFPMVWAEKAGMGLANQVPPVVVELKSDASPVAVRQYPMSKEAREGIRPHIQRFLDLGILVPCQSPWNTPLLPVKKPGTNDYRPVQDLREVNKRVQDIHPTVPNPYNLLSSLPPSHTWYSVLDLKDAFFCLKLHPNSQPLFAFEWRDPEKGNTGQLTWTRLPQGFKNSPTLFNEALHRDLASFRALNPQVVMLQYVDDLLVAAPTYRDCKEGTRRLLQELSKLGYRVSAKKAQLCREEVTYLGYLLKGGKRWLTPARKATVMKIPTPTTPRQVREFLGKAGFCRLFIPGFASLAAPLYPLTRPKVPFTWTEAHQEAFGRIKEALLSAPALALPDLTKPFALYVDEKEGVARGVLTQTLGPWRRPVAYLSKKLDPVASGWPTCLKAIAAVALLLKDADKLTLGQNVLVIAPHNLESIVRQPPDRWMTNARMTHYQSLLLNERVSFAPPAILNPATLLPVESDDTPIHICSEILAEETGTRPDLRDQPLPGVPAWYTDGSSFIMDGRRQAGAAIVDNKRTVWASNLPEGTSAQKAELIALTQALRLAEGKSINIYTDSRYAFATAHVHGAIYKQRGWLTSAGKDIKNKEEILALLEAIHLPKRVAIIHCPGHQRGTDPVATGNRKADEAAKQAAQSTRILTETTKNAGKRTADGSEFEKRTADGSEFESPKKKAKVE

SEQ ID NO: 1694 - protein, 2125 aa, synthetic construct
MPAAKRVKLDGGDKKYSIGLDIGTNSVGWAVITDEYKVPSKKFKVLGNTDRHSIKKNLIGALLFDSGETAEATRLKRTARRRYTRRKNRICYLQEIFSNEMAKVDDSFFHRLEESFLVEEDKKHERHPIFGNIVDEVAYHEKYPTIYHLRKKLVDSTDKADLRLIYLALAHMIKFRGHFLIEGDLNPDNSDVDKLFIQLVQTYNQLFEENPINASGVDAKAILSARLSKSRRLENLIAQLPGEKKNGLFGNLIALSLGLTPNFKSNFDLAEDAKLQLSKDTYDDDLDNLLAQIGDQYADLFLAAKNLSDAILLSDILRVNTEITKAPLSASMIKRYDEHHQDLTLLKALVRQQLPEKYKEIFFDQSKNGYAGYIDGGASQEEFYKFIKPILEKMDGTEELLVKLNREDLLRKQRTFDNGSIPHQIHLGELHAILRRQEDFYPFLKDNREKIEKILTFRIPYYVGPLARGNSRFAWMTRKSEETITPWNFEEVVDKGASAQSFIERMTNFDKNLPNEKVLPKHSLLYEYFTVYNELTKVKYVTEGMRKPAFLSGEQKKAIVDLLFKTNRKVTVKQLKEDYFKKIECFDSVEISGVEDRFNASLGTYHDLLKIIKDKDFLDNEENEDILEDIVLTLTLFEDREMIEERLKTYAHLFDDKVMKQLKRRRYTGWGRLSRKLINGIRDKQSGKTILDFLKSDGFANRNFMQLIHDDSLTFKEDIQKAQVSGQGDSLHEHIANLAGSPAIKKGILQTVKVVDELVKVMGRHKPENIVIEMARENQTTQKGQKNSRERMKRIEEGIKELGSQILKEHPVENTQLQNEKLYLYYLQNGRDMYVDQELDINRLSDYDVDHIVPQSFLKDDSIDNKVLTRSDKARGKSDNVPSEEVVKKMKNYWRQLLNAKLITQRKFDNLTKAERGGLSELDKAGFIKRQLVETRQITKHVAQILDSRMNTKYDENDKLIREVKVITLKSKLVSDFRKDFQFYKVREINNYHHAHDAYLNAVVGTALIKKYPKLESEFVYGDYKVYDVRKMIAKSEQEIGKATAKYFFYSNIMNFFKTEITLANGEIRKRPLIETNGETGEIVWDKGRDFATVRKVLSMPQVNIVKKTEVQTGGFSKESILPKRNSDKLIARKKDWDPKKYGGFDSPTVAYSVLVVAKVEKGKSKKLKSVKELLGITIMERSSFEKNPIDFLEAKGYKEVKKDLIIKLPKYSLFELENGRKRMLASAGELQKGNELALPSKYVNFLYLASHYEKLKGSPEDNEQKQLFVEQHKHYLDEIIEQISEFSKRVILADANLDKVLSAYNKHRDKPIREQAENIIHLFTLTNLGAPAAFKYFDTTIDRKRYTSTKEVLDATLIHQSITGLYETRIDLSQLGGDGGGSSPAPGGGGGLLGRDLLTKLKAQIQFSTEGPQVTWEDRPAMCLVLNLEEEYRLHEKPVPPSIDPSWLQLFPMVWAEKAGMGLANQVPPVVVELKSDASPVAVRQYPMSKEAREGIRPHIQRFLDLGILVPCQSPWNTPLLPVKKPGTNDYRPVQDLREVNKRVQDIHPTVPNPYNLLSSLPPSHTWYSVLDLKDAFFCLKLHPNSQPLFAFEWRDPEKGNTGQLTWTRLPQGFKNSPTLFNEALHRDLASFRALNPQVVMLQYVDDLLVAAPTYRDCKEGTRRLLQELSKLGYRVSAKKAQLCREEVTYLGYLLKGGKRWLTPARKATVMKIPTPTTPRQVREFLGKAGFCRLFIPGFASLAAPLYPLTRPKVPFTWTEAHQEAFGRIKEALLSAPALALPDLTKPFALYVDEKEGVARGVLTQTLGPWRRPVAYLSKKLDPVASGWPTCLKAIAAVALLLKDADKLTLGQNVLVIAPHNLESIVRQPPDRWMTNARMTHYQSLLLNERVSFAPPAILNPATLLPVESDDTPIHICSEILAEETGTRPDLRDQPLPGVPAWYTDGSSFIMDGRRQAGAAIVDNKRTVWASNLPEGTSAQKAELIALTQALRLAEGKSINIYTDSRYAFATAHVHGAIYKQRGWLTSAGKDIKNKEEILALLEAIHLPKRVAIIHCPGHQRGTDPVATGNRKADEAAKQAAQSTRILTETTKNAGKRTADGSEFEKRTADGSEFESPKKKAKVE

SEQ ID NO: 1695 - protein, 2122 aa, synthetic construct
MPAAKRVKLDGGDKKYSIGLDIGTNSVGWAVITDEYKVPSKKFKVLGNTDRHSIKKNLIGALLFDSGETAEATRLKRTARRRYTRRKNRICYLQEIFSNEMAKVDDSFFHRLEESFLVEEDKKHERHPIFGNIVDEVAYHEKYPTIYHLRKKLVDSTDKADLRLIYLALAHMIKFRGHFLIEGDLNPDNSDVDKLFIQLVQTYNQLFEENPINASGVDAKAILSARLSKSRRLENLIAQLPGEKKNGLFGNLIALSLGLTPNFKSNFDLAEDAKLQLSKDTYDDDLDNLLAQIGDQYADLFLAAKNLSDAILLSDILRVNTEITKAPLSASMIKRYDEHHQDLTLLKALVRQQLPEKYKEIFFDQSKNGYAGYIDGGASQEEFYKFIKPILEKMDGTEELLVKLNREDLLRKQRTFDNGSIPHQIHLGELHAILRRQEDFYPFLKDNREKIEKILTFRIPYYVGPLARGNSRFAWMTRKSEETITPWNFEEVVDKGASAQSFIERMTNFDKNLPNEKVLPKHSLLYEYFTVYNELTKVKYVTEGMRKPAFLSGEQKKAIVDLLFKTNRKVTVKQLKEDYFKKIECFDSVEISGVEDRFNASLGTYHDLLKIIKDKDFLDNEENEDILEDIVLTLTLFEDREMIEERLKTYAHLFDDKVMKQLKRRRYTGWGRLSRKLINGIRDKQSGKTILDFLKSDGFANRNFMQLIHDDSLTFKEDIQKAQVSGQGDSLHEHIANLAGSPAIKKGILQTVKVVDELVKVMGRHKPENIVIEMARENQTTQKGQKNSRERMKRIEEGIKELGSQILKEHPVENTQLQNEKLYLYYLQNGRDMYVDQELDINRLSDYDVDHIVPQSFLKDDSIDNKVLTRSDKARGKSDNVPSEEVVKKMKNYWRQLLNAKLITQRKFDNLTKAERGGLSELDKAGFIKRQLVETRQITKHVAQILDSRMNTKYDENDKLIREVKVITLKSKLVSDFRKDFQFYKVREINNYHHAHDAYLNAVVGTALIKKYPKLESEFVYGDYKVYDVRKMIAKSEQEIGKATAKYFFYSNIMNFFKTEITLANGEIRKRPLIETNGETGEIVWDKGRDFATVRKVLSMPQVNIVKKTEVQTGGFSKESILPKRNSDKLIARKKDWDPKKYGGFDSPTVAYSVLVVAKVEKGKSKKLKSVKELLGITIMERSSFEKNPIDFLEAKGYKEVKKDLIIKLPKYSLFELENGRKRMLASAGELQKGNELALPSKYVNFLYLASHYEKLKGSPEDNEQKQLFVEQHKHYLDEIIEQISEFSKRVILADANLDKVLSAYNKHRDKPIREQAENIIHLFTLTNLGAPAAFKYFDTTIDRKRYTSTKEVLDATLIHQSITGLYETRIDLSQLGGDGGPAPGSSGGLLGRDLLTKLKAQIQFSTEGPQVTWEDRPAMCLVLNLEEEYRLHEKPVPPSIDPSWLQLFPMVWAEKAGMGLANQVPPVVVELKSDASPVAVRQYPMSKEAREGIRPHIQRFLDLGILVPCQSPWNTPLLPVKKPGTNDYRPVQDLREVNKRVQDIHPTVPNPYNLLSSLPPSHTWYSVLDLKDAFFCLKLHPNSQPLFAFEWRDPEKGNTGQLTWTRLPQGFKNSPTLFNEALHRDLASFRALNPQVVMLQYVDDLLVAAPTYRDCKEGTRRLLQELSKLGYRVSAKKAQLCREEVTYLGYLLKGGKRWLTPARKATVMKIPTPTTPRQVREFLGKAGFCRLFIPGFASLAAPLYPLTRPKVPFTWTEAHQEAFGRIKEALLSAPALALPDLTKPFALYVDEKEGVARGVLTQTLGPWRRPVAYLSKKLDPVASGWPTCLKAIAAVALLLKDADKLTLGQNVLVIAPHNLESIVRQPPDRWMTNARMTHYQSLLLNERVSFAPPAILNPATLLPVESDDTPIHICSEILAEETGTRPDLRDQPLPGVPAWYTDGSSFIMDGRRQAGAAIVDNKRTVWASNLPEGTSAQKAELIALTQALRLAEGKSINIYTDSRYAFATAHVHGAIYKQRGWLTSAGKDIKNKEEILALLEAIHLPKRVAIIHCPGHQRGTDPVATGNRKADEAAKQAAQSTRILTETTKNAGKRTADGSEFEKRTADGSEFESPKKKAKVE

SEQ ID NO: 1696 - protein, 2125 aa, synthetic construct
MPAAKRVKLDGGDKKYSIGLDIGTNSVGWAVITDEYKVPSKKFKVLGNTDRHSIKKNLIGALLFDSGETAEATRLKRTARRRYTRRKNRICYLQEIFSNEMAKVDDSFFHRLEESFLVEEDKKHERHPIFGNIVDEVAYHEKYPTIYHLRKKLVDSTDKADLRLIYLALAHMIKFRGHFLIEGDLNPDNSDVDKLFIQLVQTYNQLFEENPINASGVDAKAILSARLSKSRRLENLIAQLPGEKKNGLFGNLIALSLGLTPNFKSNFDLAEDAKLQLSKDTYDDDLDNLLAQIGDQYADLFLAAKNLSDAILLSDILRVNTEITKAPLSASMIKRYDEHHQDLTLLKALVRQQLPEKYKEIFFDQSKNGYAGYIDGGASQEEFYKFIKPILEKMDGTEELLVKLNREDLLRKQRTFDNGSIPHQIHLGELHAILRRQEDFYPFLKDNREKIEKILTFRIPYYVGPLARGNSRFAWMTRKSEETITPWNFEEVVDKGASAQSFIERMTNFDKNLPNEKVLPKHSLLYEYFTVYNELTKVKYVTEGMRKPAFLSGEQKKAIVDLLFKTNRKVTVKQLKEDYFKKIECFDSVEISGVEDRFNASLGTYHDLLKIIKDKDFLDNEENEDILEDIVLTLTLFEDREMIEERLKTYAHLFDDKVMKQLKRRRYTGWGRLSRKLINGIRDKQSGKTILDFLKSDGFANRNFMQLIHDDSLTFKEDIQKAQVSGQGDSLHEHIANLAGSPAIKKGILQTVKVVDELVKVMGRHKPENIVIEMARENQTTQKGQKNSRERMKRIEEGIKELGSQILKEHPVENTQLQNEKLYLYYLQNGRDMYVDQELDINRLSDYDVDHIVPQSFLKDDSIDNKVLTRSDKARGKSDNVPSEEVVKKMKNYWRQLLNAKLITQRKFDNLTKAERGGLSELDKAGFIKRQLVETRQITKHVAQILDSRMNTKYDENDKLIREVKVITLKSKLVSDFRKDFQFYKVREINNYHHAHDAYLNAVVGTALIKKYPKLESEFVYGDYKVYDVRKMIAKSEQEIGKATAKYFFYSNIMNFFKTEITLANGEIRKRPLIETNGETGEIVWDKGRDFATVRKVLSMPQVNIVKKTEVQTGGFSKESILPKRNSDKLIARKKDWDPKKYGGFDSPTVAYSVLVVAKVEKGKSKKLKSVKELLGITIMERSSFEKNPIDFLEAKGYKEVKKDLIIKLPKYSLFELENGRKRMLASAGELQKGNELALPSKYVNFLYLASHYEKLKGSPEDNEQKQLFVEQHKHYLDEIIEQISEFSKRVILADANLDKVLSAYNKHRDKPIREQAENIIHLFTLTNLGAPAAFKYFDTTIDRKRYTSTKEVLDATLIHQSITGLYETRIDLSQLGGDGGPAPAPAPAPGGLLGRDLLTKLKAQIQFSTEGPQVTWEDRPAMCLVLNLEEEYRLHEKPVPPSIDPSWLQLFPMVWAEKAGMGLANQVPPVVVELKSDASPVAVRQYPMSKEAREGIRPHIQRFLDLGILVPCQSPWNTPLLPVKKPGTNDYRPVQDLREVNKRVQDIHPTVPNPYNLLSSLPPSHTWYSVLDLKDAFFCLKLHPNSQPLFAFEWRDPEKGNTGQLTWTRLPQGFKNSPTLFNEALHRDLASFRALNPQVVMLQYVDDLLVAAPTYRDCKEGTRRLLQELSKLGYRVSAKKAQLCREEVTYLGYLLKGGKRWLTPARKATVMKIPTPTTPRQVREFLGKAGFCRLFIPGFASLAAPLYPLTRPKVPFTWTEAHQEAFGRIKEALLSAPALALPDLTKPFALYVDEKEGVARGVLTQTLGPWRRPVAYLSKKLDPVASGWPTCLKAIAAVALLLKDADKLTLGQNVLVIAPHNLESIVRQPPDRWMTNARMTHYQSLLLNERVSFAPPAILNPATLLPVESDDTPIHICSEILAEETGTRPDLRDQPLPGVPAWYTDGSSFIMDGRRQAGAAIVDNKRTVWASNLPEGTSAQKAELIALTQALRLAEGKSINIYTDSRYAFATAHVHGAIYKQRGWLTSAGKDIKNKEEILALLEAIHLPKRVAIIHCPGHQRGTDPVATGNRKADEAAKQAAQSTRILTETTKNAGKRTADGSEFEKRTADGSEFESPKKKAKVE

SEQ ID NO: 1697 - protein, 2119 aa, synthetic construct
MPAAKRVKLDGGDKKYSIGLDIGTNSVGWAVITDEYKVPSKKFKVLGNTDRHSIKKNLIGALLFDSGETAEATRLKRTARRRYTRRKNRICYLQEIFSNEMAKVDDSFFHRLEESFLVEEDKKHERHPIFGNIVDEVAYHEKYPTIYHLRKKLVDSTDKADLRLIYLALAHMIKFRGHFLIEGDLNPDNSDVDKLFIQLVQTYNQLFEENPINASGVDAKAILSARLSKSRRLENLIAQLPGEKKNGLFGNLIALSLGLTPNFKSNFDLAEDAKLQLSKDTYDDDLDNLLAQIGDQYADLFLAAKNLSDAILLSDILRVNTEITKAPLSASMIKRYDEHHQDLTLLKALVRQQLPEKYKEIFFDQSKNGYAGYIDGGASQEEFYKFIKPILEKMDGTEELLVKLNREDLLRKQRTFDNGSIPHQIHLGELHAILRRQEDFYPFLKDNREKIEKILTFRIPYYVGPLARGNSRFAWMTRKSEETITPWNFEEVVDKGASAQSFIERMTNFDKNLPNEKVLPKHSLLYEYFTVYNELTKVKYVTEGMRKPAFLSGEQKKAIVDLLFKTNRKVTVKQLKEDYFKKIECFDSVEISGVEDRFNASLGTYHDLLKIIKDKDFLDNEENEDILEDIVLTLTLFEDREMIEERLKTYAHLFDDKVMKQLKRRRYTGWGRLSRKLINGIRDKQSGKTILDFLKSDGFANRNFMQLIHDDSLTFKEDIQKAQVSGQGDSLHEHIANLAGSPAIKKGILQTVKVVDELVKVMGRHKPENIVIEMARENQTTQKGQKNSRERMKRIEEGIKELGSQILKEHPVENTQLQNEKLYLYYLQNGRDMYVDQELDINRLSDYDVDHIVPQSFLKDDSIDNKVLTRSDKARGKSDNVPSEEVVKKMKNYWRQLLNAKLITQRKFDNLTKAERGGLSELDKAGFIKRQLVETRQITKHVAQILDSRMNTKYDENDKLIREVKVITLKSKLVSDFRKDFQFYKVREINNYHHAHDAYLNAVVGTALIKKYPKLESEFVYGDYKVYDVRKMIAKSEQEIGKATAKYFFYSNIMNFFKTEITLANGEIRKRPLIETNGETGEIVWDKGRDFATVRKVLSMPQVNIVKKTEVQTGGFSKESILPKRNSDKLIARKKDWDPKKYGGFDSPTVAYSVLVVAKVEKGKSKKLKSVKELLGITIMERSSFEKNPIDFLEAKGYKEVKKDLIIKLPKYSLFELENGRKRMLASAGELQKGNELALPSKYVNFLYLASHYEKLKGSPEDNEQKQLFVEQHKHYLDEIIEQISEFSKRVILADANLDKVLSAYNKHRDKPIREQAENIIHLFTLTNLGAPAAFKYFDTTIDRKRYTSTKEVLDATLIHQSITGLYETRIDLSQLGGDGGGSSGGLLGRDLLTKLKAQIQFSTEGPQVTWEDRPAMCLVLNLEEEYRLHEKPVPPSIDPSWLQLFPMVWAEKAGMGLANQVPPVVVELKSDASPVAVRQYPMSKEAREGIRPHIQRFLDLGILVPCQSPWNTPLLPVKKPGTNDYRPVQDLREVNKRVQDIHPTVPNPYNLLSSLPPSHTWYSVLDLKDAFFCLKLHPNSQPLFAFEWRDPEKGNTGQLTWTRLPQGFKNSPTLFNEALHRDLASFRALNPQVVMLQYVDDLLVAAPTYRDCKEGTRRLLQELSKLGYRVSAKKAQLCREEVTYLGYLLKGGKRWLTPARKATVMKIPTPTTPRQVREFLGKAGFCRLFIPGFASLAAPLYPLTRPKVPFTWTEAHQEAFGRIKEALLSAPALALPDLTKPFALYVDEKEGVARGVLTQTLGPWRRPVAYLSKKLDPVASGWPTCLKAIAAVALLLKDADKLTLGQNVLVIAPHNLESIVRQPPDRWMTNARMTHYQSLLLNERVSFAPPAILNPATLLPVESDDTPIHICSEILAEETGTRPDLRDQPLPGVPAWYTDGSSFIMDGRRQAGAAIVDNKRTVWASNLPEGTSAQKAELIALTQALRLAEGKSINIYTDSRYAFATAHVHGAIYKQRGWLTSAGKDIKNKEEILALLEAIHLPKRVAIIHCPGHQRGTDPVATGNRKADEAAKQAAQSTRILTETTKNAGKRTADGSEFEKRTADGSEFESPKKKAKVE

SEQ ID NO: 1698 - protein, 2122 aa, synthetic construct
MPAAKRVKLDGGDKKYSIGLDIGTNSVGWAVITDEYKVPSKKFKVLGNTDRHSIKKNLIGALLFDSGETAEATRLKRTARRRYTRRKNRICYLQEIFSNEMAKVDDSFFHRLEESFLVEEDKKHERHPIFGNIVDEVAYHEKYPTIYHLRKKLVDSTDKADLRLIYLALAHMIKFRGHFLIEGDLNPDNSDVDKLFIQLVQTYNQLFEENPINASGVDAKAILSARLSKSRRLENLIAQLPGEKKNGLFGNLIALSLGLTPNFKSNFDLAEDAKLQLSKDTYDDDLDNLLAQIGDQYADLFLAAKNLSDAILLSDILRVNTEITKAPLSASMIKRYDEHHQDLTLLKALVRQQLPEKYKEIFFDQSKNGYAGYIDGGASQEEFYKFIKPILEKMDGTEELLVKLNREDLLRKQRTFDNGSIPHQIHLGELHAILRRQEDFYPFLKDNREKIEKILTFRIPYYVGPLARGNSRFAWMTRKSEETITPWNFEEVVDKGASAQSFIERMTNFDKNLPNEKVLPKHSLLYEYFTVYNELTKVKYVTEGMRKPAFLSGEQKKAIVDLLFKTNRKVTVKQLKEDYFKKIECFDSVEISGVEDRFNASLGTYHDLLKIIKDKDFLDNEENEDILEDIVLTLTLFEDREMIEERLKTYAHLFDDKVMKQLKRRRYTGWGRLSRKLINGIRDKQSGKTILDFLKSDGFANRNFMQLIHDDSLTFKEDIQKAQVSGQGDSLHEHIANLAGSPAIKKGILQTVKVVDELVKVMGRHKPENIVIEMARENQTTQKGQKNSRERMKRIEEGIKELGSQILKEHPVENTQLQNEKLYLYYLQNGRDMYVDQELDINRLSDYDVDHIVPQSFLKDDSIDNKVLTRSDKARGKSDNVPSEEVVKKMKNYWRQLLNAKLITQRKFDNLTKAERGGLSELDKAGFIKRQLVETRQITKHVAQILDSRMNTKYDENDKLIREVKVITLKSKLVSDFRKDFQFYKVREINNYHHAHDAYLNAVVGTALIKKYPKLESEFVYGDYKVYDVRKMIAKSEQEIGKATAKYFFYSNIMNFFKTEITLANGEIRKRPLIETNGETGEIVWDKGRDFATVRKVLSMPQVNIVKKTEVQTGGFSKESILPKRNSDKLIARKKDWDPKKYGGFDSPTVAYSVLVVAKVEKGKSKKLKSVKELLGITIMERSSFEKNPIDFLEAKGYKEVKKDLIIKLPKYSLFELENGRKRMLASAGELQKGNELALPSKYVNFLYLASHYEKLKGSPEDNEQKQLFVEQHKHYLDEIIEQISEFSKRVILADANLDKVLSAYNKHRDKPIREQAENIIHLFTLTNLGAPAAFKYFDTTIDRKRYTSTKEVLDATLIHQSITGLYETRIDLSQLGGDGGGSSGGGGGLLGRDLLTKLKAQIQFSTEGPQVTWEDRPAMCLVLNLEEEYRLHEKPVPPSIDPSWLQLFPMVWAEKAGMGLANQVPPVVVELKSDASPVAVRQYPMSKEAREGIRPHIQRFLDLGILVPCQSPWNTPLLPVKKPGTNDYRPVQDLREVNKRVQDIHPTVPNPYNLLSSLPPSHTWYSVLDLKDAFFCLKLHPNSQPLFAFEWRDPEKGNTGQLTWTRLPQGFKNSPTLFNEALHRDLASFRALNPQVVMLQYVDDLLVAAPTYRDCKEGTRRLLQELSKLGYRVSAKKAQLCREEVTYLGYLLKGGKRWLTPARKATVMKIPTPTTPRQVREFLGKAGFCRLFIPGFASLAAPLYPLTRPKVPFTWTEAHQEAFGRIKEALLSAPALALPDLTKPFALYVDEKEGVARGVLTQTLGPWRRPVAYLSKKLDPVASGWPTCLKAIAAVALLLKDADKLTLGQNVLVIAPHNLESIVRQPPDRWMTNARMTHYQSLLLNERVSFAPPAILNPATLLPVESDDTPIHICSEILAEETGTRPDLRDQPLPGVPAWYTDGSSFIMDGRRQAGAAIVDNKRTVWASNLPEGTSAQKAELIALTQALRLAEGKSINIYTDSRYAFATAHVHGAIYKQRGWLTSAGKDIKNKEEILALLEAIHLPKRVAIIHCPGHQRGTDPVATGNRKADEAAKQAAQSTRILTETTKNAGKRTADGSEFEKRTADGSEFESPKKKAKVE

SEQ ID NO: 1699 - protein, 2127 aa, synthetic construct
MPAAKRVKLDGGDKKYSIGLDIGTNSVGWAVITDEYKVPSKKFKVLGNTDRHSIKKNLIGALLFDSGETAEATRLKRTARRRYTRRKNRICYLQEIFSNEMAKVDDSFFHRLEESFLVEEDKKHERHPIFGNIVDEVAYHEKYPTIYHLRKKLVDSTDKADLRLIYLALAHMIKFRGHFLIEGDLNPDNSDVDKLFIQLVQTYNQLFEENPINASGVDAKAILSARLSKSRRLENLIAQLPGEKKNGLFGNLIALSLGLTPNFKSNFDLAEDAKLQLSKDTYDDDLDNLLAQIGDQYADLFLAAKNLSDAILLSDILRVNTEITKAPLSASMIKRYDEHHQDLTLLKALVRQQLPEKYKEIFFDQSKNGYAGYIDGGASQEEFYKFIKPILEKMDGTEELLVKLNREDLLRKQRTFDNGSIPHQIHLGELHAILRRQEDFYPFLKDNREKIEKILTFRIPYYVGPLARGNSRFAWMTRKSEETITPWNFEEVVDKGASAQSFIERMTNFDKNLPNEKVLPKHSLLYEYFTVYNELTKVKYVTEGMRKPAFLSGEQKKAIVDLLFKTNRKVTVKQLKEDYFKKIECFDSVEISGVEDRFNASLGTYHDLLKIIKDKDFLDNEENEDILEDIVLTLTLFEDREMIEERLKTYAHLFDDKVMKQLKRRRYTGWGRLSRKLINGIRDKQSGKTILDFLKSDGFANRNFMQLIHDDSLTFKEDIQKAQVSGQGDSLHEHIANLAGSPAIKKGILQTVKVVDELVKVMGRHKPENIVIEMARENQTTQKGQKNSRERMKRIEEGIKELGSQILKEHPVENTQLQNEKLYLYYLQNGRDMYVDQELDINRLSDYDVDHIVPQSFLKDDSIDNKVLTRSDKARGKSDNVPSEEVVKKMKNYWRQLLNAKLITQRKFDNLTKAERGGLSELDKAGFIKRQLVETRQITKHVAQILDSRMNTKYDENDKLIREVKVITLKSKLVSDFRKDFQFYKVREINNYHHAHDAYLNAVVGTALIKKYPKLESEFVYGDYKVYDVRKMIAKSEQEIGKATAKYFFYSNIMNFFKTEITLANGEIRKRPLIETNGETGEIVWDKGRDFATVRKVLSMPQVNIVKKTEVQTGGFSKESILPKRNSDKLIARKKDWDPKKYGGFDSPTVAYSVLVVAKVEKGKSKKLKSVKELLGITIMERSSFEKNPIDFLEAKGYKEVKKDLIIKLPKYSLFELENGRKRMLASAGELQKGNELALPSKYVNFLYLASHYEKLKGSPEDNEQKQLFVEQHKHYLDEIIEQISEFSKRVILADANLDKVLSAYNKHRDKPIREQAENIIHLFTLTNLGAPAAFKYFDTTIDRKRYTSTKEVLDATLIHQSITGLYETRIDLSQLGGDGGPAPEAAAKGSSGGLLGRDLLTKLKAQIQFSTEGPQVTWEDRPAMCLVLNLEEEYRLHEKPVPPSIDPSWLQLFPMVWAEKAGMGLANQVPPVVVELKSDASPVAVRQYPMSKEAREGIRPHIQRFLDLGILVPCQSPWNTPLLPVKKPGTNDYRPVQDLREVNKRVQDIHPTVPNPYNLLSSLPPSHTWYSVLDLKDAFFCLKLHPNSQPLFAFEWRDPEKGNTGQLTWTRLPQGFKNSPTLFNEALHRDLASFRALNPQVVMLQYVDDLLVAAPTYRDCKEGTRRLLQELSKLGYRVSAKKAQLCREEVTYLGYLLKGGKRWLTPARKATVMKIPTPTTPRQVREFLGKAGFCRLFIPGFASLAAPLYPLTRPKVPFTWTEAHQEAFGRIKEALLSAPALALPDLTKPFALYVDEKEGVARGVLTQTLGPWRRPVAYLSKKLDPVASGWPTCLKAIAAVALLLKDADKLTLGQNVLVIAPHNLESIVRQPPDRWMTNARMTHYQSLLLNERVSFAPPAILNPATLLPVESDDTPIHICSEILAEETGTRPDLRDQPLPGVPAWYTDGSSFIMDGRRQAGAAIVDNKRTVWASNLPEGTSAQKAELIALTQALRLAEGKSINIYTDSRYAFATAHVHGAIYKQRGWLTSAGKDIKNKEEILALLEAIHLPKRVAIIHCPGHQRGTDPVATGNRKADEAAKQAAQSTRILTETTKNAGKRTADGSEFEKRTADGSEFESPKKKAKVE

SEQ ID NO: 1700 - protein, 2127 aa, synthetic construct
MPAAKRVKLDGGDKKYSIGLDIGTNSVGWAVITDEYKVPSKKFKVLGNTDRHSIKKNLIGALLFDSGETAEATRLKRTARRRYTRRKNRICYLQEIFSNEMAKVDDSFFHRLEESFLVEEDKKHERHPIFGNIVDEVAYHEKYPTIYHLRKKLVDSTDKADLRLIYLALAHMIKFRGHFLIEGDLNPDNSDVDKLFIQLVQTYNQLFEENPINASGVDAKAILSARLSKSRRLENLIAQLPGEKKNGLFGNLIALSLGLTPNFKSNFDLAEDAKLQLSKDTYDDDLDNLLAQIGDQYADLFLAAKNLSDAILLSDILRVNTEITKAPLSASMIKRYDEHHQDLTLLKALVRQQLPEKYKEIFFDQSKNGYAGYIDGGASQEEFYKFIKPILEKMDGTEELLVKLNREDLLRKQRTFDNGSIPHQIHLGELHAILRRQEDFYPFLKDNREKIEKILTFRIPYYVGPLARGNSRFAWMTRKSEETITPWNFEEVVDKGASAQSFIERMTNFDKNLPNEKVLPKHSLLYEYFTVYNELTKVKYVTEGMRKPAFLSGEQKKAIVDLLFKTNRKVTVKQLKEDYFKKIECFDSVEISGVEDRFNASLGTYHDLLKIIKDKDFLDNEENEDILEDIVLTLTLFEDREMIEERLKTYAHLFDDKVMKQLKRRRYTGWGRLSRKLINGIRDKQSGKTILDFLKSDGFANRNFMQLIHDDSLTFKEDIQKAQVSGQGDSLHEHIANLAGSPAIKKGILQTVKVVDELVKVMGRHKPENIVIEMARENQTTQKGQKNSRERMKRIEEGIKELGSQILKEHPVENTQLQNEKLYLYYLQNGRDMYVDQELDINRLSDYDVDHIVPQSFLKDDSIDNKVLTRSDKARGKSDNVPSEEVVKKMKNYWRQLLNAKLITQRKFDNLTKAERGGLSELDKAGFIKRQLVETRQITKHVAQILDSRMNTKYDENDKLIREVKVITLKSKLVSDFRKDFQFYKVREINNYHHAHDAYLNAVVGTALIKKYPKLESEFVYGDYKVYDVRKMIAKSEQEIGKATAKYFFYSNIMNFFKTEITLANGEIRKRPLIETNGETGEIVWDKGRDFATVRKVLSMPQVNIVKKTEVQTGGFSKESILPKRNSDKLIARKKDWDPKKYGGFDSPTVAYSVLVVAKVEKGKSKKLKSVKELLGITIMERSSFEKNPIDFLEAKGYKEVKKDLIIKLPKYSLFELENGRKRMLASAGELQKGNELALPSKYVNFLYLASHYEKLKGSPEDNEQKQLFVEQHKHYLDEIIEQISEFSKRVILADANLDKVLSAYNKHRDKPIREQAENIIHLFTLTNLGAPAAFKYFDTTIDRKRYTSTKEVLDATLIHQSITGLYETRIDLSQLGGDGGEAAAKGSSGGGGGLLGRDLLTKLKAQIQFSTEGPQVTWEDRPAMCLVLNLEEEYRLHEKPVPPSIDPSWLQLFPMVWAEKAGMGLANQVPPVVVELKSDASPVAVRQYPMSKEAREGIRPHIQRFLDLGILVPCQSPWNTPLLPVKKPGTNDYRPVQDLREVNKRVQDIHPTVPNPYNLLSSLPPSHTWYSVLDLKDAFFCLKLHPNSQPLFAFEWRDPEKGNTGQLTWTRLPQGFKNSPTLFNEALHRDLASFRALNPQVVMLQYVDDLLVAAPTYRDCKEGTRRLLQELSKLGYRVSAKKAQLCREEVTYLGYLLKGGKRWLTPARKATVMKIPTPTTPRQVREFLGKAGFCRLFIPGFASLAAPLYPLTRPKVPFTWTEAHQEAFGRIKEALLSAPALALPDLTKPFALYVDEKEGVARGVLTQTLGPWRRPVAYLSKKLDPVASGWPTCLKAIAAVALLLKDADKLTLGQNVLVIAPHNLESIVRQPPDRWMTNARMTHYQSLLLNERVSFAPPAILNPATLLPVESDDTPIHICSEILAEETGTRPDLRDQPLPGVPAWYTDGSSFIMDGRRQAGAAIVDNKRTVWASNLPEGTSAQKAELIALTQALRLAEGKSINIYTDSRYAFATAHVHGAIYKQRGWLTSAGKDIKNKEEILALLEAIHLPKRVAIIHCPGHQRGTDPVATGNRKADEAAKQAAQSTRILTETTKNAGKRTADGSEFEKRTADGSEFESPKKKAKVE

SEQ ID NO: 1701 - protein, 2129 aa, synthetic construct
MPAAKRVKLDGGDKKYSIGLDIGTNSVGWAVITDEYKVPSKKFKVLGNTDRHSIKKNLIGALLFDSGETAEATRLKRTARRRYTRRKNRICYLQEIFSNEMAKVDDSFFHRLEESFLVEEDKKHERHPIFGNIVDEVAYHEKYPTIYHLRKKLVDSTDKADLRLIYLALAHMIKFRGHFLIEGDLNPDNSDVDKLFIQLVQTYNQLFEENPINASGVDAKAILSARLSKSRRLENLIAQLPGEKKNGLFGNLIALSLGLTPNFKSNFDLAEDAKLQLSKDTYDDDLDNLLAQIGDQYADLFLAAKNLSDAILLSDILRVNTEITKAPLSASMIKRYDEHHQDLTLLKALVRQQLPEKYKEIFFDQSKNGYAGYIDGGASQEEFYKFIKPILEKMDGTEELLVKLNREDLLRKQRTFDNGSIPHQIHLGELHAILRRQEDFYPFLKDNREKIEKILTFRIPYYVGPLARGNSRFAWMTRKSEETITPWNFEEVVDKGASAQSFIERMTNFDKNLPNEKVLPKHSLLYEYFTVYNELTKVKYVTEGMRKPAFLSGEQKKAIVDLLFKTNRKVTVKQLKEDYFKKIECFDSVEISGVEDRFNASLGTYHDLLKIIKDKDFLDNEENEDILEDIVLTLTLFEDREMIEERLKTYAHLFDDKVMKQLKRRRYTGWGRLSRKLINGIRDKQSGKTILDFLKSDGFANRNFMQLIHDDSLTFKEDIQKAQVSGQGDSLHEHIANLAGSPAIKKGILQTVKVVDELVKVMGRHKPENIVIEMARENQTTQKGQKNSRERMKRIEEGIKELGSQILKEHPVENTQLQNEKLYLYYLQNGRDMYVDQELDINRLSDYDVDHIVPQSFLKDDSIDNKVLTRSDKARGKSDNVPSEEVVKKMKNYWRQLLNAKLITQRKFDNLTKAERGGLSELDKAGFIKRQLVETRQITKHVAQILDSRMNTKYDENDKLIREVKVITLKSKLVSDFRKDFQFYKVREINNYHHAHDAYLNAVVGTALIKKYPKLESEFVYGDYKVYDVRKMIAKSEQEIGKATAKYFFYSNIMNFFKTEITLANGEIRKRPLIETNGETGEIVWDKGRDFATVRKVLSMPQVNIVKKTEVQTGGFSKESILPKRNSDKLIARKKDWDPKKYGGFDSPTVAYSVLVVAKVEKGKSKKLKSVKELLGITIMERSSFEKNPIDFLEAKGYKEVKKDLIIKLPKYSLFELENGRKRMLASAGELQKGNELALPSKYVNFLYLASHYEKLKGSPEDNEQKQLFVEQHKHYLDEIIEQISEFSKRVILADANLDKVLSAYNKHRDKPIREQAENIIHLFTLTNLGAPAAFKYFDTTIDRKRYTSTKEVLDATLIHQSITGLYETRIDLSQLGGDGGPAPAPAPAPAPAPGGLLGRDLLTKLKAQIQFSTEGPQVTWEDRPAMCLVLNLEEEYRLHEKPVPPSIDPSWLQLFPMVWAEKAGMGLANQVPPVVVELKSDASPVAVRQYPMSKEAREGIRPHIQRFLDLGILVPCQSPWNTPLLPVKKPGTNDYRPVQDLREVNKRVQDIHPTVPNPYNLLSSLPPSHTWYSVLDLKDAFFCLKLHPNSQPLFAFEWRDPEKGNTGQLTWTRLPQGFKNSPTLFNEALHRDLASFRALNPQVVMLQYVDDLLVAAPTYRDCKEGTRRLLQELSKLGYRVSAKKAQLCREEVTYLGYLLKGGKRWLTPARKATVMKIPTPTTPRQVREFLGKAGFCRLFIPGFASLAAPLYPLTRPKVPFTWTEAHQEAFGRIKEALLSAPALALPDLTKPFALYVDEKEGVARGVLTQTLGPWRRPVAYLSKKLDPVASGWPTCLKAIAAVALLLKDADKLTLGQNVLVIAPHNLESIVRQPPDRWMTNARMTHYQSLLLNERVSFAPPAILNPATLLPVESDDTPIHICSEILAEETGTRPDLRDQPLPGVPAWYTDGSSFIMDGRRQAGAAIVDNKRTVWASNLPEGTSAQKAELIALTQALRLAEGKSINIYTDSRYAFATAHVHGAIYKQRGWLTSAGKDIKNKEEILALLEAIHLPKRVAIIHCPGHQRGTDPVATGNRKADEAAKQAAQSTRILTETTKNAGKRTADGSEFEKRTADGSEFESPKKKAKVE

SEQ ID NO: 1702 - protein, 2127 aa, synthetic construct
MPAAKRVKLDGGDKKYSIGLDIGTNSVGWAVITDEYKVPSKKFKVLGNTDRHSIKKNLIGALLFDSGETAEATRLKRTARRRYTRRKNRICYLQEIFSNEMAKVDDSFFHRLEESFLVEEDKKHERHPIFGNIVDEVAYHEKYPTIYHLRKKLVDSTDKADLRLIYLALAHMIKFRGHFLIEGDLNPDNSDVDKLFIQLVQTYNQLFEENPINASGVDAKAILSARLSKSRRLENLIAQLPGEKKNGLFGNLIALSLGLTPNFKSNFDLAEDAKLQLSKDTYDDDLDNLLAQIGDQYADLFLAAKNLSDAILLSDILRVNTEITKAPLSASMIKRYDEHHQDLTLLKALVRQQLPEKYKEIFFDQSKNGYAGYIDGGASQEEFYKFIKPILEKMDGTEELLVKLNREDLLRKQRTFDNGSIPHQIHLGELHAILRRQEDFYPFLKDNREKIEKILTFRIPYYVGPLARGNSRFAWMTRKSEETITPWNFEEVVDKGASAQSFIERMTNFDKNLPNEKVLPKHSLLYEYFTVYNELTKVKYVTEGMRKPAFLSGEQKKAIVDLLFKTNRKVTVKQLKEDYFKKIECFDSVEISGVEDRFNASLGTYHDLLKIIKDKDFLDNEENEDILEDIVLTLTLFEDREMIEERLKTYAHLFDDKVMKQLKRRRYTGWGRLSRKLINGIRDKQSGKTILDFLKSDGFANRNFMQLIHDDSLTFKEDIQKAQVSGQGDSLHEHIANLAGSPAIKKGILQTVKVVDELVKVMGRHKPENIVIEMARENQTTQKGQKNSRERMKRIEEGIKELGSQILKEHPVENTQLQNEKLYLYYLQNGRDMYVDQELDINRLSDYDVDHIVPQSFLKDDSIDNKVLTRSDKARGKSDNVPSEEVVKKMKNYWRQLLNAKLITQRKFDNLTKAERGGLSELDKAGFIKRQLVETRQITKHVAQILDSRMNTKYDENDKLIREVKVITLKSKLVSDFRKDFQFYKVREINNYHHAHDAYLNAVVGTALIKKYPKLESEFVYGDYKVYDVRKMIAKSEQEIGKATAKYFFYSNIMNFFKTEITLANGEIRKRPLIETNGETGEIVWDKGRDFATVRKVLSMPQVNIVKKTEVQTGGFSKESILPKRNSDKLIARKKDWDPKKYGGFDSPTVAYSVLVVAKVEKGKSKKLKSVKELLGITIMERSSFEKNPIDFLEAKGYKEVKKDLIIKLPKYSLFELENGRKRMLASAGELQKGNELALPSKYVNFLYLASHYEKLKGSPEDNEQKQLFVEQHKHYLDEIIEQISEFSKRVILADANLDKVLSAYNKHRDKPIREQAENIIHLFTLTNLGAPAAFKYFDTTIDRKRYTSTKEVLDATLIHQSITGLYETRIDLSQLGGDGGGGGEAAAKGGSGGLLGRDLLTKLKAQIQFSTEGPQVTWEDRPAMCLVLNLEEEYRLHEKPVPPSIDPSWLQLFPMVWAEKAGMGLANQVPPVVVELKSDASPVAVRQYPMSKEAREGIRPHIQRFLDLGILVPCQSPWNTPLLPVKKPGTNDYRPVQDLREVNKRVQDIHPTVPNPYNLLSSLPPSHTWYSVLDLKDAFFCLKLHPNSQPLFAFEWRDPEKGNTGQLTWTRLPQGFKNSPTLFNEALHRDLASFRALNPQVVMLQYVDDLLVAAPTYRDCKEGTRRLLQELSKLGYRVSAKKAQLCREEVTYLGYLLKGGKRWLTPARKATVMKIPTPTTPRQVREFLGKAGFCRLFIPGFASLAAPLYPLTRPKVPFTWTEAHQEAFGRIKEALLSAPALALPDLTKPFALYVDEKEGVARGVLTQTLGPWRRPVAYLSKKLDPVASGWPTCLKAIAAVALLLKDADKLTLGQNVLVIAPHNLESIVRQPPDRWMTNARMTHYQSLLLNERVSFAPPAILNPATLLPVESDDTPIHICSEILAEETGTRPDLRDQPLPGVPAWYTDGSSFIMDGRRQAGAAIVDNKRTVWASNLPEGTSAQKAELIALTQALRLAEGKSINIYTDSRYAFATAHVHGAIYKQRGWLTSAGKDIKNKEEILALLEAIHLPKRVAIIHCPGHQRGTDPVATGNRKADEAAKQAAQSTRILTETTKNAGKRTADGSEFEKRTADGSEFESPKKKAKVE

SEQ ID NO: 1703 - protein, 2122 aa, synthetic construct
MPAAKRVKLDGGDKKYSIGLDIGTNSVGWAVITDEYKVPSKKFKVLGNTDRHSIKKNLIGALLFDSGETAEATRLKRTARRRYTRRKNRICYLQEIFSNEMAKVDDSFFHRLEESFLVEEDKKHERHPIFGNIVDEVAYHEKYPTIYHLRKKLVDSTDKADLRLIYLALAHMIKFRGHFLIEGDLNPDNSDVDKLFIQLVQTYNQLFEENPINASGVDAKAILSARLSKSRRLENLIAQLPGEKKNGLFGNLIALSLGLTPNFKSNFDLAEDAKLQLSKDTYDDDLDNLLAQIGDQYADLFLAAKNLSDAILLSDILRVNTEITKAPLSASMIKRYDEHHQDLTLLKALVRQQLPEKYKEIFFDQSKNGYAGYIDGGASQEEFYKFIKPILEKMDGTEELLVKLNREDLLRKQRTFDNGSIPHQIHLGELHAILRRQEDFYPFLKDNREKIEKILTFRIPYYVGPLARGNSRFAWMTRKSEETITPWNFEEVVDKGASAQSFIERMTNFDKNLPNEKVLPKHSLLYEYFTVYNELTKVKYVTEGMRKPAFLSGEQKKAIVDLLFKTNRKVTVKQLKEDYFKKIECFDSVEISGVEDRFNASLGTYHDLLKIIKDKDFLDNEENEDILEDIVLTLTLFEDREMIEERLKTYAHLFDDKVMKQLKRRRYTGWGRLSRKLINGIRDKQSGKTILDFLKSDGFANRNFMQLIHDDSLTFKEDIQKAQVSGQGDSLHEHIANLAGSPAIKKGILQTVKVVDELVKVMGRHKPENIVIEMARENQTTQKGQKNSRERMKRIEEGIKELGSQILKEHPVENTQLQNEKLYLYYLQNGRDMYVDQELDINRLSDYDVDHIVPQSFLKDDSIDNKVLTRSDKARGKSDNVPSEEVVKKMKNYWRQLLNAKLITQRKFDNLTKAERGGLSELDKAGFIKRQLVETRQITKHVAQILDSRMNTKYDENDKLIREVKVITLKSKLVSDFRKDFQFYKVREINNYHHAHDAYLNAVVGTALIKKYPKLESEFVYGDYKVYDVRKMIAKSEQEIGKATAKYFFYSNIMNFFKTEITLANGEIRKRPLIETNGETGEIVWDKGRDFATVRKVLSMPQVNIVKKTEVQTGGFSKESILPKRNSDKLIARKKDWDPKKYGGFDSPTVAYSVLVVAKVEKGKSKKLKSVKELLGITIMERSSFEKNPIDFLEAKGYKEVKKDLIIKLPKYSLFELENGRKRMLASAGELQKGNELALPSKYVNFLYLASHYEKLKGSPEDNEQKQLFVEQHKHYLDEIIEQISEFSKRVILADANLDKVLSAYNKHRDKPIREQAENIIHLFTLTNLGAPAAFKYFDTTIDRKRYTSTKEVLDATLIHQSITGLYETRIDLSQLGGDGGGGSPAPGGLLGRDLLTKLKAQIQFSTEGPQVTWEDRPAMCLVLNLEEEYRLHEKPVPPSIDPSWLQLFPMVWAEKAGMGLANQVPPVVVELKSDASPVAVRQYPMSKEAREGIRPHIQRFLDLGILVPCQSPWNTPLLPVKKPGTNDYRPVQDLREVNKRVQDIHPTVPNPYNLLSSLPPSHTWYSVLDLKDAFFCLKLHPNSQPLFAFEWRDPEKGNTGQLTWTRLPQGFKNSPTLFNEALHRDLASFRALNPQVVMLQYVDDLLVAAPTYRDCKEGTRRLLQELSKLGYRVSAKKAQLCREEVTYLGYLLKGGKRWLTPARKATVMKIPTPTTPRQVREFLGKAGFCRLFIPGFASLAAPLYPLTRPKVPFTWTEAHQEAFGRIKEALLSAPALALPDLTKPFALYVDEKEGVARGVLTQTLGPWRRPVAYLSKKLDPVASGWPTCLKAIAAVALLLKDADKLTLGQNVLVIAPHNLESIVRQPPDRWMTNARMTHYQSLLLNERVSFAPPAILNPATLLPVESDDTPIHICSEILAEETGTRPDLRDQPLPGVPAWYTDGSSFIMDGRRQAGAAIVDNKRTVWASNLPEGTSAQKAELIALTQALRLAEGKSINIYTDSRYAFATAHVHGAIYKQRGWLTSAGKDIKNKEEILALLEAIHLPKRVAIIHCPGHQRGTDPVATGNRKADEAAKQAAQSTRILTETTKNAGKRTADGSEFEKRTADGSEFESPKKKAKVE

SEQ ID NO: 1704 - protein, 2127 aa, synthetic construct
MPAAKRVKLDGGDKKYSIGLDIGTNSVGWAVITDEYKVPSKKFKVLGNTDRHSIKKNLIGALLFDSGETAEATRLKRTARRRYTRRKNRICYLQEIFSNEMAKVDDSFFHRLEESFLVEEDKKHERHPIFGNIVDEVAYHEKYPTIYHLRKKLVDSTDKADLRLIYLALAHMIKFRGHFLIEGDLNPDNSDVDKLFIQLVQTYNQLFEENPINASGVDAKAILSARLSKSRRLENLIAQLPGEKKNGLFGNLIALSLGLTPNFKSNFDLAEDAKLQLSKDTYDDDLDNLLAQIGDQYADLFLAAKNLSDAILLSDILRVNTEITKAPLSASMIKRYDEHHQDLTLLKALVRQQLPEKYKEIFFDQSKNGYAGYIDGGASQEEFYKFIKPILEKMDGTEELLVKLNREDLLRKQRTFDNGSIPHQIHLGELHAILRRQEDFYPFLKDNREKIEKILTFRIPYYVGPLARGNSRFAWMTRKSEETITPWNFEEVVDKGASAQSFIERMTNFDKNLPNEKVLPKHSLLYEYFTVYNELTKVKYVTEGMRKPAFLSGEQKKAIVDLLFKTNRKVTVKQLKEDYFKKIECFDSVEISGVEDRFNASLGTYHDLLKIIKDKDFLDNEENEDILEDIVLTLTLFEDREMIEERLKTYAHLFDDKVMKQLKRRRYTGWGRLSRKLINGIRDKQSGKTILDFLKSDGFANRNFMQLIHDDSLTFKEDIQKAQVSGQGDSLHEHIANLAGSPAIKKGILQTVKVVDELVKVMGRHKPENIVIEMARENQTTQKGQKNSRERMKRIEEGIKELGSQILKEHPVENTQLQNEKLYLYYLQNGRDMYVDQELDINRLSDYDVDHIVPQSFLKDDSIDNKVLTRSDKARGKSDNVPSEEVVKKMKNYWRQLLNAKLITQRKFDNLTKAERGGLSELDKAGFIKRQLVETRQITKHVAQILDSRMNTKYDENDKLIREVKVITLKSKLVSDFRKDFQFYKVREINNYHHAHDAYLNAVVGTALIKKYPKLESEFVYGDYKVYDVRKMIAKSEQEIGKATAKYFFYSNIMNFFKTEITLANGEIRKRPLIETNGETGEIVWDKGRDFATVRKVLSMPQVNIVKKTEVQTGGFSKESILPKRNSDKLIARKKDWDPKKYGGFDSPTVAYSVLVVAKVEKGKSKKLKSVKELLGITIMERSSFEKNPIDFLEAKGYKEVKKDLIIKLPKYSLFELENGRKRMLASAGELQKGNELALPSKYVNFLYLASHYEKLKGSPEDNEQKQLFVEQHKHYLDEIIEQISEFSKRVILADANLDKVLSAYNKHRDKPIREQAENIIHLFTLTNLGAPAAFKYFDTTIDRKRYTSTKEVLDATLIHQSITGLYETRIDLSQLGGDGGGGSEAAAKPAPGGLLGRDLLTKLKAQIQFSTEGPQVTWEDRPAMCLVLNLEEEYRLHEKPVPPSIDPSWLQLFPMVWAEKAGMGLANQVPPVVVELKSDASPVAVRQYPMSKEAREGIRPHIQRFLDLGILVPCQSPWNTPLLPVKKPGTNDYRPVQDLREVNKRVQDIHPTVPNPYNLLSSLPPSHTWYSVLDLKDAFFCLKLHPNSQPLFAFEWRDPEKGNTGQLTWTRLPQGFKNSPTLFNEALHRDLASFRALNPQVVMLQYVDDLLVAAPTYRDCKEGTRRLLQELSKLGYRVSAKKAQLCREEVTYLGYLLKGGKRWLTPARKATVMKIPTPTTPRQVREFLGKAGFCRLFIPGFASLAAPLYPLTRPKVPFTWTEAHQEAFGRIKEALLSAPALALPDLTKPFALYVDEKEGVARGVLTQTLGPWRRPVAYLSKKLDPVASGWPTCLKAIAAVALLLKDADKLTLGQNVLVIAPHNLESIVRQPPDRWMTNARMTHYQSLLLNERVSFAPPAILNPATLLPVESDDTPIHICSEILAEETGTRPDLRDQPLPGVPAWYTDGSSFIMDGRRQAGAAIVDNKRTVWASNLPEGTSAQKAELIALTQALRLAEGKSINIYTDSRYAFATAHVHGAIYKQRGWLTSAGKDIKNKEEILALLEAIHLPKRVAIIHCPGHQRGTDPVATGNRKADEAAKQAAQSTRILTETTKNAGKRTADGSEFEKRTADGSEFESPKKKAKVE

SEQ ID NO: 1705 - protein, 2121 aa, synthetic construct
MPAAKRVKLDGGDKKYSIGLDIGTNSVGWAVITDEYKVPSKKFKVLGNTDRHSIKKNLIGALLFDSGETAEATRLKRTARRRYTRRKNRICYLQEIFSNEMAKVDDSFFHRLEESFLVEEDKKHERHPIFGNIVDEVAYHEKYPTIYHLRKKLVDSTDKADLRLIYLALAHMIKFRGHFLIEGDLNPDNSDVDKLFIQLVQTYNQLFEENPINASGVDAKAILSARLSKSRRLENLIAQLPGEKKNGLFGNLIALSLGLTPNFKSNFDLAEDAKLQLSKDTYDDDLDNLLAQIGDQYADLFLAAKNLSDAILLSDILRVNTEITKAPLSASMIKRYDEHHQDLTLLKALVRQQLPEKYKEIFFDQSKNGYAGYIDGGASQEEFYKFIKPILEKMDGTEELLVKLNREDLLRKQRTFDNGSIPHQIHLGELHAILRRQEDFYPFLKDNREKIEKILTFRIPYYVGPLARGNSRFAWMTRKSEETITPWNFEEVVDKGASAQSFIERMTNFDKNLPNEKVLPKHSLLYEYFTVYNELTKVKYVTEGMRKPAFLSGEQKKAIVDLLFKTNRKVTVKQLKEDYFKKIECFDSVEISGVEDRFNASLGTYHDLLKIIKDKDFLDNEENEDILEDIVLTLTLFEDREMIEERLKTYAHLFDDKVMKQLKRRRYTGWGRLSRKLINGIRDKQSGKTILDFLKSDGFANRNFMQLIHDDSLTFKEDIQKAQVSGQGDSLHEHIANLAGSPAIKKGILQTVKVVDELVKVMGRHKPENIVIEMARENQTTQKGQKNSRERMKRIEEGIKELGSQILKEHPVENTQLQNEKLYLYYLQNGRDMYVDQELDINRLSDYDVDHIVPQSFLKDDSIDNKVLTRSDKARGKSDNVPSEEVVKKMKNYWRQLLNAKLITQRKFDNLTKAERGGLSELDKAGFIKRQLVETRQITKHVAQILDSRMNTKYDENDKLIREVKVITLKSKLVSDFRKDFQFYKVREINNYHHAHDAYLNAVVGTALIKKYPKLESEFVYGDYKVYDVRKMIAKSEQEIGKATAKYFFYSNIMNFFKTEITLANGEIRKRPLIETNGETGEIVWDKGRDFATVRKVLSMPQVNIVKKTEVQTGGFSKESILPKRNSDKLIARKKDWDPKKYGGFDSPTVAYSVLVVAKVEKGKSKKLKSVKELLGITIMERSSFEKNPIDFLEAKGYKEVKKDLIIKLPKYSLFELENGRKRMLASAGELQKGNELALPSKYVNFLYLASHYEKLKGSPEDNEQKQLFVEQHKHYLDEIIEQISEFSKRVILADANLDKVLSAYNKHRDKPIREQAENIIHLFTLTNLGAPAAFKYFDTTIDRKRYTSTKEVLDATLIHQSITGLYETRIDLSQLGGDGGGGGGSGGLLGRDLLTKLKAQIQFSTEGPQVTWEDRPAMCLVLNLEEEYRLHEKPVPPSIDPSWLQLFPMVWAEKAGMGLANQVPPVVVELKSDASPVAVRQYPMSKEAREGIRPHIQRFLDLGILVPCQSPWNTPLLPVKKPGTNDYRPVQDLREVNKRVQDIHPTVPNPYNLLSSLPPSHTWYSVLDLKDAFFCLKLHPNSQPLFAFEWRDPEKGNTGQLTWTRLPQGFKNSPTLFNEALHRDLASFRALNPQVVMLQYVDDLLVAAPTYRDCKEGTRRLLQELSKLGYRVSAKKAQLCREEVTYLGYLLKGGKRWLTPARKATVMKIPTPTTPRQVREFLGKAGFCRLFIPGFASLAAPLYPLTRPKVPFTWTEAHQEAFGRIKEALLSAPALALPDLTKPFALYVDEKEGVARGVLTQTLGPWRRPVAYLSKKLDPVASGWPTCLKAIAAVALLLKDADKLTLGQNVLVIAPHNLESIVRQPPDRWMTNARMTHYQSLLLNERVSFAPPAILNPATLLPVESDDTPIHICSEILAEETGTRPDLRDQPLPGVPAWYTDGSSFIMDGRRQAGAAIVDNKRTVWASNLPEGTSAQKAELIALTQALRLAEGKSINIYTDSRYAFATAHVHGAIYKQRGWLTSAGKDIKNKEEILALLEAIHLPKRVAIIHCPGHQRGTDPVATGNRKADEAAKQAAQSTRILTETTKNAGKRTADGSEFEKRTADGSEFESPKKKAKVE

SEQ ID NO: 1706 - protein, 2146 aa, synthetic construct
MPAAKRVKLDGGDKKYSIGLDIGTNSVGWAVITDEYKVPSKKFKVLGNTDRHSIKKNLIGALLFDSGETAEATRLKRTARRRYTRRKNRICYLQEIFSNEMAKVDDSFFHRLEESFLVEEDKKHERHPIFGNIVDEVAYHEKYPTIYHLRKKLVDSTDKADLRLIYLALAHMIKFRGHFLIEGDLNPDNSDVDKLFIQLVQTYNQLFEENPINASGVDAKAILSARLSKSRRLENLIAQLPGEKKNGLFGNLIALSLGLTPNFKSNFDLAEDAKLQLSKDTYDDDLDNLLAQIGDQYADLFLAAKNLSDAILLSDILRVNTEITKAPLSASMIKRYDEHHQDLTLLKALVRQQLPEKYKEIFFDQSKNGYAGYIDGGASQEEFYKFIKPILEKMDGTEELLVKLNREDLLRKQRTFDNGSIPHQIHLGELHAILRRQEDFYPFLKDNREKIEKILTFRIPYYVGPLARGNSRFAWMTRKSEETITPWNFEEVVDKGASAQSFIERMTNFDKNLPNEKVLPKHSLLYEYFTVYNELTKVKYVTEGMRKPAFLSGEQKKAIVDLLFKTNRKVTVKQLKEDYFKKIECFDSVEISGVEDRFNASLGTYHDLLKIIKDKDFLDNEENEDILEDIVLTLTLFEDREMIEERLKTYAHLFDDKVMKQLKRRRYTGWGRLSRKLINGIRDKQSGKTILDFLKSDGFANRNFMQLIHDDSLTFKEDIQKAQVSGQGDSLHEHIANLAGSPAIKKGILQTVKVVDELVKVMGRHKPENIVIEMARENQTTQKGQKNSRERMKRIEEGIKELGSQILKEHPVENTQLQNEKLYLYYLQNGRDMYVDQELDINRLSDYDVDHIVPQSFLKDDSIDNKVLTRSDKARGKSDNVPSEEVVKKMKNYWRQLLNAKLITQRKFDNLTKAERGGLSELDKAGFIKRQLVETRQITKHVAQILDSRMNTKYDENDKLIREVKVITLKSKLVSDFRKDFQFYKVREINNYHHAHDAYLNAVVGTALIKKYPKLESEFVYGDYKVYDVRKMIAKSEQEIGKATAKYFFYSNIMNFFKTEITLANGEIRKRPLIETNGETGEIVWDKGRDFATVRKVLSMPQVNIVKKTEVQTGGFSKESILPKRNSDKLIARKKDWDPKKYGGFDSPTVAYSVLVVAKVEKGKSKKLKSVKELLGITIMERSSFEKNPIDFLEAKGYKEVKKDLIIKLPKYSLFELENGRKRMLASAGELQKGNELALPSKYVNFLYLASHYEKLKGSPEDNEQKQLFVEQHKHYLDEIIEQISEFSKRVILADANLDKVLSAYNKHRDKPIREQAENIIHLFTLTNLGAPAAFKYFDTTIDRKRYTSTKEVLDATLIHQSITGLYETRIDLSQLGGDGGEAAAKEAAAKEAAAKEAAAKEAAAKEAAAKGGLLGRDLLTKLKAQIQFSTEGPQVTWEDRPAMCLVLNLEEEYRLHEKPVPPSIDPSWLQLFPMVWAEKAGMGLANQVPPVVVELKSDASPVAVRQYPMSKEAREGIRPHIQRFLDLGILVPCQSPWNTPLLPVKKPGTNDYRPVQDLREVNKRVQDIHPTVPNPYNLLSSLPPSHTWYSVLDLKDAFFCLKLHPNSQPLFAFEWRDPEKGNTGQLTWTRLPQGFKNSPTLFNEALHRDLASFRALNPQVVMLQYVDDLLVAAPTYRDCKEGTRRLLQELSKLGYRVSAKKAQLCREEVTYLGYLLKGGKRWLTPARKATVMKIPTPTTPRQVREFLGKAGFCRLFIPGFASLAAPLYPLTRPKVPFTWTEAHQEAFGRIKEALLSAPALALPDLTKPFALYVDEKEGVARGVLTQTLGPWRRPVAYLSKKLDPVASGWPTCLKAIAAVALLLKDADKLTLGQNVLVIAPHNLESIVRQPPDRWMTNARMTHYQSLLLNERVSFAPPAILNPATLLPVESDDTPIHICSEILAEETGTRPDLRDQPLPGVPAWYTDGSSFIMDGRRQAGAAIVDNKRTVWASNLPEGTSAQKAELIALTQALRLAEGKSINIYTDSRYAFATAHVHGAIYKQRGWLTSAGKDIKNKEEILALLEAIHLPKRVAIIHCPGHQRGTDPVATGNRKADEAAKQAAQSTRILTETTKNAGKRTADGSEFEKRTADGSEFESPKKKAKVE

SEQ ID NO: 1707 - protein, 2122 aa, synthetic construct
MPAAKRVKLDGGDKKYSIGLDIGTNSVGWAVITDEYKVPSKKFKVLGNTDRHSIKKNLIGALLFDSGETAEATRLKRTARRRYTRRKNRICYLQEIFSNEMAKVDDSFFHRLEESFLVEEDKKHERHPIFGNIVDEVAYHEKYPTIYHLRKKLVDSTDKADLRLIYLALAHMIKFRGHFLIEGDLNPDNSDVDKLFIQLVQTYNQLFEENPINASGVDAKAILSARLSKSRRLENLIAQLPGEKKNGLFGNLIALSLGLTPNFKSNFDLAEDAKLQLSKDTYDDDLDNLLAQIGDQYADLFLAAKNLSDAILLSDILRVNTEITKAPLSASMIKRYDEHHQDLTLLKALVRQQLPEKYKEIFFDQSKNGYAGYIDGGASQEEFYKFIKPILEKMDGTEELLVKLNREDLLRKQRTFDNGSIPHQIHLGELHAILRRQEDFYPFLKDNREKIEKILTFRIPYYVGPLARGNSRFAWMTRKSEETITPWNFEEVVDKGASAQSFIERMTNFDKNLPNEKVLPKHSLLYEYFTVYNELTKVKYVTEGMRKPAFLSGEQKKAIVDLLFKTNRKVTVKQLKEDYFKKIECFDSVEISGVEDRFNASLGTYHDLLKIIKDKDFLDNEENEDILEDIVLTLTLFEDREMIEERLKTYAHLFDDKVMKQLKRRRYTGWGRLSRKLINGIRDKQSGKTILDFLKSDGFANRNFMQLIHDDSLTFKEDIQKAQVSGQGDSLHEHIANLAGSPAIKKGILQTVKVVDELVKVMGRHKPENIVIEMARENQTTQKGQKNSRERMKRIEEGIKELGSQILKEHPVENTQLQNEKLYLYYLQNGRDMYVDQELDINRLSDYDVDHIVPQSFLKDDSIDNKVLTRSDKARGKSDNVPSEEVVKKMKNYWRQLLNAKLITQRKFDNLTKAERGGLSELDKAGFIKRQLVETRQITKHVAQILDSRMNTKYDENDKLIREVKVITLKSKLVSDFRKDFQFYKVREINNYHHAHDAYLNAVVGTALIKKYPKLESEFVYGDYKVYDVRKMIAKSEQEIGKATAKYFFYSNIMNFFKTEITLANGEIRKRPLIETNGETGEIVWDKGRDFATVRKVLSMPQVNIVKKTEVQTGGFSKESILPKRNSDKLIARKKDWDPKKYGGFDSPTVAYSVLVVAKVEKGKSKKLKSVKELLGITIMERSSFEKNPIDFLEAKGYKEVKKDLIIKLPKYSLFELENGRKRMLASAGELQKGNELALPSKYVNFLYLASHYEKLKGSPEDNEQKQLFVEQHKHYLDEIIEQISEFSKRVILADANLDKVLSAYNKHRDKPIREQAENIIHLFTLTNLGAPAAFKYFDTTIDRKRYTSTKEVLDATLIHQSITGLYETRIDLSQLGGDGGGGGGGGGGLLGRDLLTKLKAQIQFSTEGPQVTWEDRPAMCLVLNLEEEYRLHEKPVPPSIDPSWLQLFPMVWAEKAGMGLANQVPPVVVELKSDASPVAVRQYPMSKEAREGIRPHIQRFLDLGILVPCQSPWNTPLLPVKKPGTNDYRPVQDLREVNKRVQDIHPTVPNPYNLLSSLPPSHTWYSVLDLKDAFFCLKLHPNSQPLFAFEWRDPEKGNTGQLTWTRLPQGFKNSPTLFNEALHRDLASFRALNPQVVMLQYVDDLLVAAPTYRDCKEGTRRLLQELSKLGYRVSAKKAQLCREEVTYLGYLLKGGKRWLTPARKATVMKIPTPTTPRQVREFLGKAGFCRLFIPGFASLAAPLYPLTRPKVPFTWTEAHQEAFGRIKEALLSAPALALPDLTKPFALYVDEKEGVARGVLTQTLGPWRRPVAYLSKKLDPVASGWPTCLKAIAAVALLLKDADKLTLGQNVLVIAPHNLESIVRQPPDRWMTNARMTHYQSLLLNERVSFAPPAILNPATLLPVESDDTPIHICSEILAEETGTRPDLRDQPLPGVPAWYTDGSSFIMDGRRQAGAAIVDNKRTVWASNLPEGTSAQKAELIALTQALRLAEGKSINIYTDSRYAFATAHVHGAIYKQRGWLTSAGKDIKNKEEILALLEAIHLPKRVAIIHCPGHQRGTDPVATGNRKADEAAKQAAQSTRILTETTKNAGKRTADGSEFEKRTADGSEFESPKKKAKVE

SEQ ID NO: 1708 - protein, 2127 aa, synthetic construct
MPAAKRVKLDGGDKKYSIGLDIGTNSVGWAVITDEYKVPSKKFKVLGNTDRHSIKKNLIGALLFDSGETAEATRLKRTARRRYTRRKNRICYLQEIFSNEMAKVDDSFFHRLEESFLVEEDKKHERHPIFGNIVDEVAYHEKYPTIYHLRKKLVDSTDKADLRLIYLALAHMIKFRGHFLIEGDLNPDNSDVDKLFIQLVQTYNQLFEENPINASGVDAKAILSARLSKSRRLENLIAQLPGEKKNGLFGNLIALSLGLTPNFKSNFDLAEDAKLQLSKDTYDDDLDNLLAQIGDQYADLFLAAKNLSDAILLSDILRVNTEITKAPLSASMIKRYDEHHQDLTLLKALVRQQLPEKYKEIFFDQSKNGYAGYIDGGASQEEFYKFIKPILEKMDGTEELLVKLNREDLLRKQRTFDNGSIPHQIHLGELHAILRRQEDFYPFLKDNREKIEKILTFRIPYYVGPLARGNSRFAWMTRKSEETITPWNFEEVVDKGASAQSFIERMTNFDKNLPNEKVLPKHSLLYEYFTVYNELTKVKYVTEGMRKPAFLSGEQKKAIVDLLFKTNRKVTVKQLKEDYFKKIECFDSVEISGVEDRFNASLGTYHDLLKIIKDKDFLDNEENEDILEDIVLTLTLFEDREMIEERLKTYAHLFDDKVMKQLKRRRYTGWGRLSRKLINGIRDKQSGKTILDFLKSDGFANRNFMQLIHDDSLTFKEDIQKAQVSGQGDSLHEHIANLAGSPAIKKGILQTVKVVDELVKVMGRHKPENIVIEMARENQTTQKGQKNSRERMKRIEEGIKELGSQILKEHPVENTQLQNEKLYLYYLQNGRDMYVDQELDINRLSDYDVDHIVPQSFLKDDSIDNKVLTRSDKARGKSDNVPSEEVVKKMKNYWRQLLNAKLITQRKFDNLTKAERGGLSELDKAGFIKRQLVETRQITKHVAQILDSRMNTKYDENDKLIREVKVITLKSKLVSDFRKDFQFYKVREINNYHHAHDAYLNAVVGTALIKKYPKLESEFVYGDYKVYDVRKMIAKSEQEIGKATAKYFFYSNIMNFFKTEITLANGEIRKRPLIETNGETGEIVWDKGRDFATVRKVLSMPQVNIVKKTEVQTGGFSKESILPKRNSDKLIARKKDWDPKKYGGFDSPTVAYSVLVVAKVEKGKSKKLKSVKELLGITIMERSSFEKNPIDFLEAKGYKEVKKDLIIKLPKYSLFELENGRKRMLASAGELQKGNELALPSKYVNFLYLASHYEKLKGSPEDNEQKQLFVEQHKHYLDEIIEQISEFSKRVILADANLDKVLSAYNKHRDKPIREQAENIIHLFTLTNLGAPAAFKYFDTTIDRKRYTSTKEVLDATLIHQSITGLYETRIDLSQLGGDGGGSSGGGEAAAKGGLLGRDLLTKLKAQIQFSTEGPQVTWEDRPAMCLVLNLEEEYRLHEKPVPPSIDPSWLQLFPMVWAEKAGMGLANQVPPVVVELKSDASPVAVRQYPMSKEAREGIRPHIQRFLDLGILVPCQSPWNTPLLPVKKPGTNDYRPVQDLREVNKRVQDIHPTVPNPYNLLSSLPPSHTWYSVLDLKDAFFCLKLHPNSQPLFAFEWRDPEKGNTGQLTWTRLPQGFKNSPTLFNEALHRDLASFRALNPQVVMLQYVDDLLVAAPTYRDCKEGTRRLLQELSKLGYRVSAKKAQLCREEVTYLGYLLKGGKRWLTPARKATVMKIPTPTTPRQVREFLGKAGFCRLFIPGFASLAAPLYPLTRPKVPFTWTEAHQEAFGRIKEALLSAPALALPDLTKPFALYVDEKEGVARGVLTQTLGPWRRPVAYLSKKLDPVASGWPTCLKAIAAVALLLKDADKLTLGQNVLVIAPHNLESIVRQPPDRWMTNARMTHYQSLLLNERVSFAPPAILNPATLLPVESDDTPIHICSEILAEETGTRPDLRDQPLPGVPAWYTDGSSFIMDGRRQAGAAIVDNKRTVWASNLPEGTSAQKAELIALTQALRLAEGKSINIYTDSRYAFATAHVHGAIYKQRGWLTSAGKDIKNKEEILALLEAIHLPKRVAIIHCPGHQRGTDPVATGNRKADEAAKQAAQSTRILTETTKNAGKRTADGSEFEKRTADGSEFESPKKKAKVE

SEQ ID NO: 1709 - protein, 2124 aa, synthetic construct
MPAAKRVKLDGGDKKYSIGLDIGTNSVGWAVITDEYKVPSKKFKVLGNTDRHSIKKNLIGALLFDSGETAEATRLKRTARRRYTRRKNRICYLQEIFSNEMAKVDDSFFHRLEESFLVEEDKKHERHPIFGNIVDEVAYHEKYPTIYHLRKKLVDSTDKADLRLIYLALAHMIKFRGHFLIEGDLNPDNSDVDKLFIQLVQTYNQLFEENPINASGVDAKAILSARLSKSRRLENLIAQLPGEKKNGLFGNLIALSLGLTPNFKSNFDLAEDAKLQLSKDTYDDDLDNLLAQIGDQYADLFLAAKNLSDAILLSDILRVNTEITKAPLSASMIKRYDEHHQDLTLLKALVRQQLPEKYKEIFFDQSKNGYAGYIDGGASQEEFYKFIKPILEKMDGTEELLVKLNREDLLRKQRTFDNGSIPHQIHLGELHAILRRQEDFYPFLKDNREKIEKILTFRIPYYVGPLARGNSRFAWMTRKSEETITPWNFEEVVDKGASAQSFIERMTNFDKNLPNEKVLPKHSLLYEYFTVYNELTKVKYVTEGMRKPAFLSGEQKKAIVDLLFKTNRKVTVKQLKEDYFKKIECFDSVEISGVEDRFNASLGTYHDLLKIIKDKDFLDNEENEDILEDIVLTLTLFEDREMIEERLKTYAHLFDDKVMKQLKRRRYTGWGRLSRKLINGIRDKQSGKTILDFLKSDGFANRNFMQLIHDDSLTFKEDIQKAQVSGQGDSLHEHIANLAGSPAIKKGILQTVKVVDELVKVMGRHKPENIVIEMARENQTTQKGQKNSRERMKRIEEGIKELGSQILKEHPVENTQLQNEKLYLYYLQNGRDMYVDQELDINRLSDYDVDHIVPQSFLKDDSIDNKVLTRSDKARGKSDNVPSEEVVKKMKNYWRQLLNAKLITQRKFDNLTKAERGGLSELDKAGFIKRQLVETRQITKHVAQILDSRMNTKYDENDKLIREVKVITLKSKLVSDFRKDFQFYKVREINNYHHAHDAYLNAVVGTALIKKYPKLESEFVYGDYKVYDVRKMIAKSEQEIGKATAKYFFYSNIMNFFKTEITLANGEIRKRPLIETNGETGEIVWDKGRDFATVRKVLSMPQVNIVKKTEVQTGGFSKESILPKRNSDKLIARKKDWDPKKYGGFDSPTVAYSVLVVAKVEKGKSKKLKSVKELLGITIMERSSFEKNPIDFLEAKGYKEVKKDLIIKLPKYSLFELENGRKRMLASAGELQKGNELALPSKYVNFLYLASHYEKLKGSPEDNEQKQLFVEQHKHYLDEIIEQISEFSKRVILADANLDKVLSAYNKHRDKPIREQAENIIHLFTLTNLGAPAAFKYFDTTIDRKRYTSTKEVLDATLIHQSITGLYETRIDLSQLGGDGGGSSEAAAKGGLLGRDLLTKLKAQIQFSTEGPQVTWEDRPAMCLVLNLEEEYRLHEKPVPPSIDPSWLQLFPMVWAEKAGMGLANQVPPVVVELKSDASPVAVRQYPMSKEAREGIRPHIQRFLDLGILVPCQSPWNTPLLPVKKPGTNDYRPVQDLREVNKRVQDIHPTVPNPYNLLSSLPPSHTWYSVLDLKDAFFCLKLHPNSQPLFAFEWRDPEKGNTGQLTWTRLPQGFKNSPTLFNEALHRDLASFRALNPQVVMLQYVDDLLVAAPTYRDCKEGTRRLLQELSKLGYRVSAKKAQLCREEVTYLGYLLKGGKRWLTPARKATVMKIPTPTTPRQVREFLGKAGFCRLFIPGFASLAAPLYPLTRPKVPFTWTEAHQEAFGRIKEALLSAPALALPDLTKPFALYVDEKEGVARGVLTQTLGPWRRPVAYLSKKLDPVASGWPTCLKAIAAVALLLKDADKLTLGQNVLVIAPHNLESIVRQPPDRWMTNARMTHYQSLLLNERVSFAPPAILNPATLLPVESDDTPIHICSEILAEETGTRPDLRDQPLPGVPAWYTDGSSFIMDGRRQAGAAIVDNKRTVWASNLPEGTSAQKAELIALTQALRLAEGKSINIYTDSRYAFATAHVHGAIYKQRGWLTSAGKDIKNKEEILALLEAIHLPKRVAIIHCPGHQRGTDPVATGNRKADEAAKQAAQSTRILTETTKNAGKRTADGSEFEKRTADGSEFESPKKKAKVE

SEQ ID NO: 1710 - protein, 2125 aa, synthetic construct
MPAAKRVKLDGGDKKYSIGLDIGTNSVGWAVITDEYKVPSKKFKVLGNTDRHSIKKNLIGALLFDSGETAEATRLKRTARRRYTRRKNRICYLQEIFSNEMAKVDDSFFHRLEESFLVEEDKKHERHPIFGNIVDEVAYHEKYPTIYHLRKKLVDSTDKADLRLIYLALAHMIKFRGHFLIEGDLNPDNSDVDKLFIQLVQTYNQLFEENPINASGVDAKAILSARLSKSRRLENLIAQLPGEKKNGLFGNLIALSLGLTPNFKSNFDLAEDAKLQLSKDTYDDDLDNLLAQIGDQYADLFLAAKNLSDAILLSDILRVNTEITKAPLSASMIKRYDEHHQDLTLLKALVRQQLPEKYKEIFFDQSKNGYAGYIDGGASQEEFYKFIKPILEKMDGTEELLVKLNREDLLRKQRTFDNGSIPHQIHLGELHAILRRQEDFYPFLKDNREKIEKILTFRIPYYVGPLARGNSRFAWMTRKSEETITPWNFEEVVDKGASAQSFIERMTNFDKNLPNEKVLPKHSLLYEYFTVYNELTKVKYVTEGMRKPAFLSGEQKKAIVDLLFKTNRKVTVKQLKEDYFKKIECFDSVEISGVEDRFNASLGTYHDLLKIIKDKDFLDNEENEDILEDIVLTLTLFEDREMIEERLKTYAHLFDDKVMKQLKRRRYTGWGRLSRKLINGIRDKQSGKTILDFLKSDGFANRNFMQLIHDDSLTFKEDIQKAQVSGQGDSLHEHIANLAGSPAIKKGILQTVKVVDELVKVMGRHKPENIVIEMARENQTTQKGQKNSRERMKRIEEGIKELGSQILKEHPVENTQLQNEKLYLYYLQNGRDMYVDQELDINRLSDYDVDHIVPQSFLKDDSIDNKVLTRSDKARGKSDNVPSEEVVKKMKNYWRQLLNAKLITQRKFDNLTKAERGGLSELDKAGFIKRQLVETRQITKHVAQILDSRMNTKYDENDKLIREVKVITLKSKLVSDFRKDFQFYKVREINNYHHAHDAYLNAVVGTALIKKYPKLESEFVYGDYKVYDVRKMIAKSEQEIGKATAKYFFYSNIMNFFKTEITLANGEIRKRPLIETNGETGEIVWDKGRDFATVRKVLSMPQVNIVKKTEVQTGGFSKESILPKRNSDKLIARKKDWDPKKYGGFDSPTVAYSVLVVAKVEKGKSKKLKSVKELLGITIMERSSFEKNPIDFLEAKGYKEVKKDLIIKLPKYSLFELENGRKRMLASAGELQKGNELALPSKYVNFLYLASHYEKLKGSPEDNEQKQLFVEQHKHYLDEIIEQISEFSKRVILADANLDKVLSAYNKHRDKPIREQAENIIHLFTLTNLGAPAAFKYFDTTIDRKRYTSTKEVLDATLIHQSITGLYETRIDLSQLGGDGGGGGPAPGGSGGLLGRDLLTKLKAQIQFSTEGPQVTWEDRPAMCLVLNLEEEYRLHEKPVPPSIDPSWLQLFPMVWAEKAGMGLANQVPPVVVELKSDASPVAVRQYPMSKEAREGIRPHIQRFLDLGILVPCQSPWNTPLLPVKKPGTNDYRPVQDLREVNKRVQDIHPTVPNPYNLLSSLPPSHTWYSVLDLKDAFFCLKLHPNSQPLFAFEWRDPEKGNTGQLTWTRLPQGFKNSPTLFNEALHRDLASFRALNPQVVMLQYVDDLLVAAPTYRDCKEGTRRLLQELSKLGYRVSAKKAQLCREEVTYLGYLLKGGKRWLTPARKATVMKIPTPTTPRQVREFLGKAGFCRLFIPGFASLAAPLYPLTRPKVPFTWTEAHQEAFGRIKEALLSAPALALPDLTKPFALYVDEKEGVARGVLTQTLGPWRRPVAYLSKKLDPVASGWPTCLKAIAAVALLLKDADKLTLGQNVLVIAPHNLESIVRQPPDRWMTNARMTHYQSLLLNERVSFAPPAILNPATLLPVESDDTPIHICSEILAEETGTRPDLRDQPLPGVPAWYTDGSSFIMDGRRQAGAAIVDNKRTVWASNLPEGTSAQKAELIALTQALRLAEGKSINIYTDSRYAFATAHVHGAIYKQRGWLTSAGKDIKNKEEILALLEAIHLPKRVAIIHCPGHQRGTDPVATGNRKADEAAKQAAQSTRILTETTKNAGKRTADGSEFEKRTADGSEFESPKKKAKVE

SEQ ID NO: 1711 - protein, 2127 aa, synthetic construct
MPAAKRVKLDGGDKKYSIGLDIGTNSVGWAVITDEYKVPSKKFKVLGNTDRHSIKKNLIGALLFDSGETAEATRLKRTARRRYTRRKNRICYLQEIFSNEMAKVDDSFFHRLEESFLVEEDKKHERHPIFGNIVDEVAYHEKYPTIYHLRKKLVDSTDKADLRLIYLALAHMIKFRGHFLIEGDLNPDNSDVDKLFIQLVQTYNQLFEENPINASGVDAKAILSARLSKSRRLENLIAQLPGEKKNGLFGNLIALSLGLTPNFKSNFDLAEDAKLQLSKDTYDDDLDNLLAQIGDQYADLFLAAKNLSDAILLSDILRVNTEITKAPLSASMIKRYDEHHQDLTLLKALVRQQLPEKYKEIFFDQSKNGYAGYIDGGASQEEFYKFIKPILEKMDGTEELLVKLNREDLLRKQRTFDNGSIPHQIHLGELHAILRRQEDFYPFLKDNREKIEKILTFRIPYYVGPLARGNSRFAWMTRKSEETITPWNFEEVVDKGASAQSFIERMTNFDKNLPNEKVLPKHSLLYEYFTVYNELTKVKYVTEGMRKPAFLSGEQKKAIVDLLFKTNRKVTVKQLKEDYFKKIECFDSVEISGVEDRFNASLGTYHDLLKIIKDKDFLDNEENEDILEDIVLTLTLFEDREMIEERLKTYAHLFDDKVMKQLKRRRYTGWGRLSRKLINGIRDKQSGKTILDFLKSDGFANRNFMQLIHDDSLTFKEDIQKAQVSGQGDSLHEHIANLAGSPAIKKGILQTVKVVDELVKVMGRHKPENIVIEMARENQTTQKGQKNSRERMKRIEEGIKELGSQILKEHPVENTQLQNEKLYLYYLQNGRDMYVDQELDINRLSDYDVDHIVPQSFLKDDSIDNKVLTRSDKARGKSDNVPSEEVVKKMKNYWRQLLNAKLITQRKFDNLTKAERGGLSELDKAGFIKRQLVETRQITKHVAQILDSRMNTKYDENDKLIREVKVITLKSKLVSDFRKDFQFYKVREINNYHHAHDAYLNAVVGTALIKKYPKLESEFVYGDYKVYDVRKMIAKSEQEIGKATAKYFFYSNIMNFFKTEITLANGEIRKRPLIETNGETGEIVWDKGRDFATVRKVLSMPQVNIVKKTEVQTGGFSKESILPKRNSDKLIARKKDWDPKKYGGFDSPTVAYSVLVVAKVEKGKSKKLKSVKELLGITIMERSSFEKNPIDFLEAKGYKEVKKDLIIKLPKYSLFELENGRKRMLASAGELQKGNELALPSKYVNFLYLASHYEKLKGSPEDNEQKQLFVEQHKHYLDEIIEQISEFSKRVILADANLDKVLSAYNKHRDKPIREQAENIIHLFTLTNLGAPAAFKYFDTTIDRKRYTSTKEVLDATLIHQSITGLYETRIDLSQLGGDGGGSSEAAAKPAPGGLLGRDLLTKLKAQIQFSTEGPQVTWEDRPAMCLVLNLEEEYRLHEKPVPPSIDPSWLQLFPMVWAEKAGMGLANQVPPVVVELKSDASPVAVRQYPMSKEAREGIRPHIQRFLDLGILVPCQSPWNTPLLPVKKPGTNDYRPVQDLREVNKRVQDIHPTVPNPYNLLSSLPPSHTWYSVLDLKDAFFCLKLHPNSQPLFAFEWRDPEKGNTGQLTWTRLPQGFKNSPTLFNEALHRDLASFRALNPQVVMLQYVDDLLVAAPTYRDCKEGTRRLLQELSKLGYRVSAKKAQLCREEVTYLGYLLKGGKRWLTPARKATVMKIPTPTTPRQVREFLGKAGFCRLFIPGFASLAAPLYPLTRPKVPFTWTEAHQEAFGRIKEALLSAPALALPDLTKPFALYVDEKEGVARGVLTQTLGPWRRPVAYLSKKLDPVASGWPTCLKAIAAVALLLKDADKLTLGQNVLVIAPHNLESIVRQPPDRWMTNARMTHYQSLLLNERVSFAPPAILNPATLLPVESDDTPIHICSEILAEETGTRPDLRDQPLPGVPAWYTDGSSFIMDGRRQAGAAIVDNKRTVWASNLPEGTSAQKAELIALTQALRLAEGKSINIYTDSRYAFATAHVHGAIYKQRGWLTSAGKDIKNKEEILALLEAIHLPKRVAIIHCPGHQRGTDPVATGNRKADEAAKQAAQSTRILTETTKNAGKRTADGSEFEKRTADGSEFESPKKKAKVE

SEQ ID NO: 1712 - protein, 2131 aa, synthetic construct
MPAAKRVKLDGGDKKYSIGLDIGTNSVGWAVITDEYKVPSKKFKVLGNTDRHSIKKNLIGALLFDSGETAEATRLKRTARRRYTRRKNRICYLQEIFSNEMAKVDDSFFHRLEESFLVEEDKKHERHPIFGNIVDEVAYHEKYPTIYHLRKKLVDSTDKADLRLIYLALAHMIKFRGHFLIEGDLNPDNSDVDKLFIQLVQTYNQLFEENPINASGVDAKAILSARLSKSRRLENLIAQLPGEKKNGLFGNLIALSLGLTPNFKSNFDLAEDAKLQLSKDTYDDDLDNLLAQIGDQYADLFLAAKNLSDAILLSDILRVNTEITKAPLSASMIKRYDEHHQDLTLLKALVRQQLPEKYKEIFFDQSKNGYAGYIDGGASQEEFYKFIKPILEKMDGTEELLVKLNREDLLRKQRTFDNGSIPHQIHLGELHAILRRQEDFYPFLKDNREKIEKILTFRIPYYVGPLARGNSRFAWMTRKSEETITPWNFEEVVDKGASAQSFIERMTNFDKNLPNEKVLPKHSLLYEYFTVYNELTKVKYVTEGMRKPAFLSGEQKKAIVDLLFKTNRKVTVKQLKEDYFKKIECFDSVEISGVEDRFNASLGTYHDLLKIIKDKDFLDNEENEDILEDIVLTLTLFEDREMIEERLKTYAHLFDDKVMKQLKRRRYTGWGRLSRKLINGIRDKQSGKTILDFLKSDGFANRNFMQLIHDDSLTFKEDIQKAQVSGQGDSLHEHIANLAGSPAIKKGILQTVKVVDELVKVMGRHKPENIVIEMARENQTTQKGQKNSRERMKRIEEGIKELGSQILKEHPVENTQLQNEKLYLYYLQNGRDMYVDQELDINRLSDYDVDHIVPQSFLKDDSIDNKVLTRSDKARGKSDNVPSEEVVKKMKNYWRQLLNAKLITQRKFDNLTKAERGGLSELDKAGFIKRQLVETRQITKHVAQILDSRMNTKYDENDKLIREVKVITLKSKLVSDFRKDFQFYKVREINNYHHAHDAYLNAVVGTALIKKYPKLESEFVYGDYKVYDVRKMIAKSEQEIGKATAKYFFYSNIMNFFKTEITLANGEIRKRPLIETNGETGEIVWDKGRDFATVRKVLSMPQVNIVKKTEVQTGGFSKESILPKRNSDKLIARKKDWDPKKYGGFDSPTVAYSVLVVAKVEKGKSKKLKSVKELLGITIMERSSFEKNPIDFLEAKGYKEVKKDLIIKLPKYSLFELENGRKRMLASAGELQKGNELALPSKYVNFLYLASHYEKLKGSPEDNEQKQLFVEQHKHYLDEIIEQISEFSKRVILADANLDKVLSAYNKHRDKPIREQAENIIHLFTLTNLGAPAAFKYFDTTIDRKRYTSTKEVLDATLIHQSITGLYETRIDLSQLGGDGGEAAAKGGGGSEAAAKGGLLGRDLLTKLKAQIQFSTEGPQVTWEDRPAMCLVLNLEEEYRLHEKPVPPSIDPSWLQLFPMVWAEKAGMGLANQVPPVVVELKSDASPVAVRQYPMSKEAREGIRPHIQRFLDLGILVPCQSPWNTPLLPVKKPGTNDYRPVQDLREVNKRVQDIHPTVPNPYNLLSSLPPSHTWYSVLDLKDAFFCLKLHPNSQPLFAFEWRDPEKGNTGQLTWTRLPQGFKNSPTLFNEALHRDLASFRALNPQVVMLQYVDDLLVAAPTYRDCKEGTRRLLQELSKLGYRVSAKKAQLCREEVTYLGYLLKGGKRWLTPARKATVMKIPTPTTPRQVREFLGKAGFCRLFIPGFASLAAPLYPLTRPKVPFTWTEAHQEAFGRIKEALLSAPALALPDLTKPFALYVDEKEGVARGVLTQTLGPWRRPVAYLSKKLDPVASGWPTCLKAIAAVALLLKDADKLTLGQNVLVIAPHNLESIVRQPPDRWMTNARMTHYQSLLLNERVSFAPPAILNPATLLPVESDDTPIHICSEILAEETGTRPDLRDQPLPGVPAWYTDGSSFIMDGRRQAGAAIVDNKRTVWASNLPEGTSAQKAELIALTQALRLAEGKSINIYTDSRYAFATAHVHGAIYKQRGWLTSAGKDIKNKEEILALLEAIHLPKRVAIIHCPGHQRGTDPVATGNRKADEAAKQAAQSTRILTETTKNAGKRTADGSEFEKRTADGSEFESPKKKAKVE

SEQ ID NO: 1713 - protein, 2127 aa, synthetic construct
MPAAKRVKLDGGDKKYSIGLDIGTNSVGWAVITDEYKVPSKKFKVLGNTDRHSIKKNLIGALLFDSGETAEATRLKRTARRRYTRRKNRICYLQEIFSNEMAKVDDSFFHRLEESFLVEEDKKHERHPIFGNIVDEVAYHEKYPTIYHLRKKLVDSTDKADLRLIYLALAHMIKFRGHFLIEGDLNPDNSDVDKLFIQLVQTYNQLFEENPINASGVDAKAILSARLSKSRRLENLIAQLPGEKKNGLFGNLIALSLGLTPNFKSNFDLAEDAKLQLSKDTYDDDLDNLLAQIGDQYADLFLAAKNLSDAILLSDILRVNTEITKAPLSASMIKRYDEHHQDLTLLKALVRQQLPEKYKEIFFDQSKNGYAGYIDGGASQEEFYKFIKPILEKMDGTEELLVKLNREDLLRKQRTFDNGSIPHQIHLGELHAILRRQEDFYPFLKDNREKIEKILTFRIPYYVGPLARGNSRFAWMTRKSEETITPWNFEEVVDKGASAQSFIERMTNFDKNLPNEKVLPKHSLLYEYFTVYNELTKVKYVTEGMRKPAFLSGEQKKAIVDLLFKTNRKVTVKQLKEDYFKKIECFDSVEISGVEDRFNASLGTYHDLLKIIKDKDFLDNEENEDILEDIVLTLTLFEDREMIEERLKTYAHLFDDKVMKQLKRRRYTGWGRLSRKLINGIRDKQSGKTILDFLKSDGFANRNFMQLIHDDSLTFKEDIQKAQVSGQGDSLHEHIANLAGSPAIKKGILQTVKVVDELVKVMGRHKPENIVIEMARENQTTQKGQKNSRERMKRIEEGIKELGSQILKEHPVENTQLQNEKLYLYYLQNGRDMYVDQELDINRLSDYDVDHIVPQSFLKDDSIDNKVLTRSDKARGKSDNVPSEEVVKKMKNYWRQLLNAKLITQRKFDNLTKAERGGLSELDKAGFIKRQLVETRQITKHVAQILDSRMNTKYDENDKLIREVKVITLKSKLVSDFRKDFQFYKVREINNYHHAHDAYLNAVVGTALIKKYPKLESEFVYGDYKVYDVRKMIAKSEQEIGKATAKYFFYSNIMNFFKTEITLANGEIRKRPLIETNGETGEIVWDKGRDFATVRKVLSMPQVNIVKKTEVQTGGFSKESILPKRNSDKLIARKKDWDPKKYGGFDSPTVAYSVLVVAKVEKGKSKKLKSVKELLGITIMERSSFEKNPIDFLEAKGYKEVKKDLIIKLPKYSLFELENGRKRMLASAGELQKGNELALPSKYVNFLYLASHYEKLKGSPEDNEQKQLFVEQHKHYLDEIIEQISEFSKRVILADANLDKVLSAYNKHRDKPIREQAENIIHLFTLTNLGAPAAFKYFDTTIDRKRYTSTKEVLDATLIHQSITGLYETRIDLSQLGGDGGGSSGGSEAAAKGGLLGRDLLTKLKAQIQFSTEGPQVTWEDRPAMCLVLNLEEEYRLHEKPVPPSIDPSWLQLFPMVWAEKAGMGLANQVPPVVVELKSDASPVAVRQYPMSKEAREGIRPHIQRFLDLGILVPCQSPWNTPLLPVKKPGTNDYRPVQDLREVNKRVQDIHPTVPNPYNLLSSLPPSHTWYSVLDLKDAFFCLKLHPNSQPLFAFEWRDPEKGNTGQLTWTRLPQGFKNSPTLFNEALHRDLASFRALNPQVVMLQYVDDLLVAAPTYRDCKEGTRRLLQELSKLGYRVSAKKAQLCREEVTYLGYLLKGGKRWLTPARKATVMKIPTPTTPRQVREFLGKAGFCRLFIPGFASLAAPLYPLTRPKVPFTWTEAHQEAFGRIKEALLSAPALALPDLTKPFALYVDEKEGVARGVLTQTLGPWRRPVAYLSKKLDPVASGWPTCLKAIAAVALLLKDADKLTLGQNVLVIAPHNLESIVRQPPDRWMTNARMTHYQSLLLNERVSFAPPAILNPATLLPVESDDTPIHICSEILAEETGTRPDLRDQPLPGVPAWYTDGSSFIMDGRRQAGAAIVDNKRTVWASNLPEGTSAQKAELIALTQALRLAEGKSINIYTDSRYAFATAHVHGAIYKQRGWLTSAGKDIKNKEEILALLEAIHLPKRVAIIHCPGHQRGTDPVATGNRKADEAAKQAAQSTRILTETTKNAGKRTADGSEFEKRTADGSEFESPKKKAKVE

SEQ ID NO: 1714 - protein, 2125 aa, synthetic construct
MPAAKRVKLDGGDKKYSIGLDIGTNSVGWAVITDEYKVPSKKFKVLGNTDRHSIKKNLIGALLFDSGETAEATRLKRTARRRYTRRKNRICYLQEIFSNEMAKVDDSFFHRLEESFLVEEDKKHERHPIFGNIVDEVAYHEKYPTIYHLRKKLVDSTDKADLRLIYLALAHMIKFRGHFLIEGDLNPDNSDVDKLFIQLVQTYNQLFEENPINASGVDAKAILSARLSKSRRLENLIAQLPGEKKNGLFGNLIALSLGLTPNFKSNFDLAEDAKLQLSKDTYDDDLDNLLAQIGDQYADLFLAAKNLSDAILLSDILRVNTEITKAPLSASMIKRYDEHHQDLTLLKALVRQQLPEKYKEIFFDQSKNGYAGYIDGGASQEEFYKFIKPILEKMDGTEELLVKLNREDLLRKQRTFDNGSIPHQIHLGELHAILRRQEDFYPFLKDNREKIEKILTFRIPYYVGPLARGNSRFAWMTRKSEETITPWNFEEVVDKGASAQSFIERMTNFDKNLPNEKVLPKHSLLYEYFTVYNELTKVKYVTEGMRKPAFLSGEQKKAIVDLLFKTNRKVTVKQLKEDYFKKIECFDSVEISGVEDRFNASLGTYHDLLKIIKDKDFLDNEENEDILEDIVLTLTLFEDREMIEERLKTYAHLFDDKVMKQLKRRRYTGWGRLSRKLINGIRDKQSGKTILDFLKSDGFANRNFMQLIHDDSLTFKEDIQKAQVSGQGDSLHEHIANLAGSPAIKKGILQTVKVVDELVKVMGRHKPENIVIEMARENQTTQKGQKNSRERMKRIEEGIKELGSQILKEHPVENTQLQNEKLYLYYLQNGRDMYVDQELDINRLSDYDVDHIVPQSFLKDDSIDNKVLTRSDKARGKSDNVPSEEVVKKMKNYWRQLLNAKLITQRKFDNLTKAERGGLSELDKAGFIKRQLVETRQITKHVAQILDSRMNTKYDENDKLIREVKVITLKSKLVSDFRKDFQFYKVREINNYHHAHDAYLNAVVGTALIKKYPKLESEFVYGDYKVYDVRKMIAKSEQEIGKATAKYFFYSNIMNFFKTEITLANGEIRKRPLIETNGETGEIVWDKGRDFATVRKVLSMPQVNIVKKTEVQTGGFSKESILPKRNSDKLIARKKDWDPKKYGGFDSPTVAYSVLVVAKVEKGKSKKLKSVKELLGITIMERSSFEKNPIDFLEAKGYKEVKKDLIIKLPKYSLFELENGRKRMLASAGELQKGNELALPSKYVNFLYLASHYEKLKGSPEDNEQKQLFVEQHKHYLDEIIEQISEFSKRVILADANLDKVLSAYNKHRDKPIREQAENIIHLFTLTNLGAPAAFKYFDTTIDRKRYTSTKEVLDATLIHQSITGLYETRIDLSQLGGDGGGSSGSSGSSGGLLGRDLLTKLKAQIQFSTEGPQVTWEDRPAMCLVLNLEEEYRLHEKPVPPSIDPSWLQLFPMVWAEKAGMGLANQVPPVVVELKSDASPVAVRQYPMSKEAREGIRPHIQRFLDLGILVPCQSPWNTPLLPVKKPGTNDYRPVQDLREVNKRVQDIHPTVPNPYNLLSSLPPSHTWYSVLDLKDAFFCLKLHPNSQPLFAFEWRDPEKGNTGQLTWTRLPQGFKNSPTLFNEALHRDLASFRALNPQVVMLQYVDDLLVAAPTYRDCKEGTRRLLQELSKLGYRVSAKKAQLCREEVTYLGYLLKGGKRWLTPARKATVMKIPTPTTPRQVREFLGKAGFCRLFIPGFASLAAPLYPLTRPKVPFTWTEAHQEAFGRIKEALLSAPALALPDLTKPFALYVDEKEGVARGVLTQTLGPWRRPVAYLSKKLDPVASGWPTCLKAIAAVALLLKDADKLTLGQNVLVIAPHNLESIVRQPPDRWMTNARMTHYQSLLLNERVSFAPPAILNPATLLPVESDDTPIHICSEILAEETGTRPDLRDQPLPGVPAWYTDGSSFIMDGRRQAGAAIVDNKRTVWASNLPEGTSAQKAELIALTQALRLAEGKSINIYTDSRYAFATAHVHGAIYKQRGWLTSAGKDIKNKEEILALLEAIHLPKRVAIIHCPGHQRGTDPVATGNRKADEAAKQAAQSTRILTETTKNAGKRTADGSEFEKRTADGSEFESPKKKAKVE

SEQ ID NO: 1715 - protein, 2127 aa, synthetic construct
MPAAKRVKLDGGDKKYSIGLDIGTNSVGWAVITDEYKVPSKKFKVLGNTDRHSIKKNLIGALLFDSGETAEATRLKRTARRRYTRRKNRICYLQEIFSNEMAKVDDSFFHRLEESFLVEEDKKHERHPIFGNIVDEVAYHEKYPTIYHLRKKLVDSTDKADLRLIYLALAHMIKFRGHFLIEGDLNPDNSDVDKLFIQLVQTYNQLFEENPINASGVDAKAILSARLSKSRRLENLIAQLPGEKKNGLFGNLIALSLGLTPNFKSNFDLAEDAKLQLSKDTYDDDLDNLLAQIGDQYADLFLAAKNLSDAILLSDILRVNTEITKAPLSASMIKRYDEHHQDLTLLKALVRQQLPEKYKEIFFDQSKNGYAGYIDGGASQEEFYKFIKPILEKMDGTEELLVKLNREDLLRKQRTFDNGSIPHQIHLGELHAILRRQEDFYPFLKDNREKIEKILTFRIPYYVGPLARGNSRFAWMTRKSEETITPWNFEEVVDKGASAQSFIERMTNFDKNLPNEKVLPKHSLLYEYFTVYNELTKVKYVTEGMRKPAFLSGEQKKAIVDLLFKTNRKVTVKQLKEDYFKKIECFDSVEISGVEDRFNASLGTYHDLLKIIKDKDFLDNEENEDILEDIVLTLTLFEDREMIEERLKTYAHLFDDKVMKQLKRRRYTGWGRLSRKLINGIRDKQSGKTILDFLKSDGFANRNFMQLIHDDSLTFKEDIQKAQVSGQGDSLHEHIANLAGSPAIKKGILQTVKVVDELVKVMGRHKPENIVIEMARENQTTQKGQKNSRERMKRIEEGIKELGSQILKEHPVENTQLQNEKLYLYYLQNGRDMYVDQELDINRLSDYDVDHIVPQSFLKDDSIDNKVLTRSDKARGKSDNVPSEEVVKKMKNYWRQLLNAKLITQRKFDNLTKAERGGLSELDKAGFIKRQLVETRQITKHVAQILDSRMNTKYDENDKLIREVKVITLKSKLVSDFRKDFQFYKVREINNYHHAHDAYLNAVVGTALIKKYPKLESEFVYGDYKVYDVRKMIAKSEQEIGKATAKYFFYSNIMNFFKTEITLANGEIRKRPLIETNGETGEIVWDKGRDFATVRKVLSMPQVNIVKKTEVQTGGFSKESILPKRNSDKLIARKKDWDPKKYGGFDSPTVAYSVLVVAKVEKGKSKKLKSVKELLGITIMERSSFEKNPIDFLEAKGYKEVKKDLIIKLPKYSLFELENGRKRMLASAGELQKGNELALPSKYVNFLYLASHYEKLKGSPEDNEQKQLFVEQHKHYLDEIIEQISEFSKRVILADANLDKVLSAYNKHRDKPIREQAENIIHLFTLTNLGAPAAFKYFDTTIDRKRYTSTKEVLDATLIHQSITGLYETRIDLSQLGGDGGEAAAKGGSGSSGGLLGRDLLTKLKAQIQFSTEGPQVTWEDRPAMCLVLNLEEEYRLHEKPVPPSIDPSWLQLFPMVWAEKAGMGLANQVPPVVVELKSDASPVAVRQYPMSKEAREGIRPHIQRFLDLGILVPCQSPWNTPLLPVKKPGTNDYRPVQDLREVNKRVQDIHPTVPNPYNLLSSLPPSHTWYSVLDLKDAFFCLKLHPNSQPLFAFEWRDPEKGNTGQLTWTRLPQGFKNSPTLFNEALHRDLASFRALNPQVVMLQYVDDLLVAAPTYRDCKEGTRRLLQELSKLGYRVSAKKAQLCREEVTYLGYLLKGGKRWLTPARKATVMKIPTPTTPRQVREFLGKAGFCRLFIPGFASLAAPLYPLTRPKVPFTWTEAHQEAFGRIKEALLSAPALALPDLTKPFALYVDEKEGVARGVLTQTLGPWRRPVAYLSKKLDPVASGWPTCLKAIAAVALLLKDADKLTLGQNVLVIAPHNLESIVRQPPDRWMTNARMTHYQSLLLNERVSFAPPAILNPATLLPVESDDTPIHICSEILAEETGTRPDLRDQPLPGVPAWYTDGSSFIMDGRRQAGAAIVDNKRTVWASNLPEGTSAQKAELIALTQALRLAEGKSINIYTDSRYAFATAHVHGAIYKQRGWLTSAGKDIKNKEEILALLEAIHLPKRVAIIHCPGHQRGTDPVATGNRKADEAAKQAAQSTRILTETTKNAGKRTADGSEFEKRTADGSEFESPKKKAKVE

SEQ ID NO: 1716 - protein, 2127 aa, synthetic construct
MPAAKRVKLDGGDKKYSIGLDIGTNSVGWAVITDEYKVPSKKFKVLGNTDRHSIKKNLIGALLFDSGETAEATRLKRTARRRYTRRKNRICYLQEIFSNEMAKVDDSFFHRLEESFLVEEDKKHERHPIFGNIVDEVAYHEKYPTIYHLRKKLVDSTDKADLRLIYLALAHMIKFRGHFLIEGDLNPDNSDVDKLFIQLVQTYNQLFEENPINASGVDAKAILSARLSKSRRLENLIAQLPGEKKNGLFGNLIALSLGLTPNFKSNFDLAEDAKLQLSKDTYDDDLDNLLAQIGDQYADLFLAAKNLSDAILLSDILRVNTEITKAPLSASMIKRYDEHHQDLTLLKALVRQQLPEKYKEIFFDQSKNGYAGYIDGGASQEEFYKFIKPILEKMDGTEELLVKLNREDLLRKQRTFDNGSIPHQIHLGELHAILRRQEDFYPFLKDNREKIEKILTFRIPYYVGPLARGNSRFAWMTRKSEETITPWNFEEVVDKGASAQSFIERMTNFDKNLPNEKVLPKHSLLYEYFTVYNELTKVKYVTEGMRKPAFLSGEQKKAIVDLLFKTNRKVTVKQLKEDYFKKIECFDSVEISGVEDRFNASLGTYHDLLKIIKDKDFLDNEENEDILEDIVLTLTLFEDREMIEERLKTYAHLFDDKVMKQLKRRRYTGWGRLSRKLINGIRDKQSGKTILDFLKSDGFANRNFMQLIHDDSLTFKEDIQKAQVSGQGDSLHEHIANLAGSPAIKKGILQTVKVVDELVKVMGRHKPENIVIEMARENQTTQKGQKNSRERMKRIEEGIKELGSQILKEHPVENTQLQNEKLYLYYLQNGRDMYVDQELDINRLSDYDVDHIVPQSFLKDDSIDNKVLTRSDKARGKSDNVPSEEVVKKMKNYWRQLLNAKLITQRKFDNLTKAERGGLSELDKAGFIKRQLVETRQITKHVAQILDSRMNTKYDENDKLIREVKVITLKSKLVSDFRKDFQFYKVREINNYHHAHDAYLNAVVGTALIKKYPKLESEFVYGDYKVYDVRKMIAKSEQEIGKATAKYFFYSNIMNFFKTEITLANGEIRKRPLIETNGETGEIVWDKGRDFATVRKVLSMPQVNIVKKTEVQTGGFSKESILPKRNSDKLIARKKDWDPKKYGGFDSPTVAYSVLVVAKVEKGKSKKLKSVKELLGITIMERSSFEKNPIDFLEAKGYKEVKKDLIIKLPKYSLFELENGRKRMLASAGELQKGNELALPSKYVNFLYLASHYEKLKGSPEDNEQKQLFVEQHKHYLDEIIEQISEFSKRVILADANLDKVLSAYNKHRDKPIREQAENIIHLFTLTNLGAPAAFKYFDTTIDRKRYTSTKEVLDATLIHQSITGLYETRIDLSQLGGDGGGGSGSSEAAAKGGLLGRDLLTKLKAQIQFSTEGPQVTWEDRPAMCLVLNLEEEYRLHEKPVPPSIDPSWLQLFPMVWAEKAGMGLANQVPPVVVELKSDASPVAVRQYPMSKEAREGIRPHIQRFLDLGILVPCQSPWNTPLLPVKKPGTNDYRPVQDLREVNKRVQDIHPTVPNPYNLLSSLPPSHTWYSVLDLKDAFFCLKLHPNSQPLFAFEWRDPEKGNTGQLTWTRLPQGFKNSPTLFNEALHRDLASFRALNPQVVMLQYVDDLLVAAPTYRDCKEGTRRLLQELSKLGYRVSAKKAQLCREEVTYLGYLLKGGKRWLTPARKATVMKIPTPTTPRQVREFLGKAGFCRLFIPGFASLAAPLYPLTRPKVPFTWTEAHQEAFGRIKEALLSAPALALPDLTKPFALYVDEKEGVARGVLTQTLGPWRRPVAYLSKKLDPVASGWPTCLKAIAAVALLLKDADKLTLGQNVLVIAPHNLESIVRQPPDRWMTNARMTHYQSLLLNERVSFAPPAILNPATLLPVESDDTPIHICSEILAEETGTRPDLRDQPLPGVPAWYTDGSSFIMDGRRQAGAAIVDNKRTVWASNLPEGTSAQKAELIALTQALRLAEGKSINIYTDSRYAFATAHVHGAIYKQRGWLTSAGKDIKNKEEILALLEAIHLPKRVAIIHCPGHQRGTDPVATGNRKADEAAKQAAQSTRILTETTKNAGKRTADGSEFEKRTADGSEFESPKKKAKVE

SEQ ID NO: 1717 - protein, 2127 aa, synthetic construct
MPAAKRVKLDGGDKKYSIGLDIGTNSVGWAVITDEYKVPSKKFKVLGNTDRHSIKKNLIGALLFDSGETAEATRLKRTARRRYTRRKNRICYLQEIFSNEMAKVDDSFFHRLEESFLVEEDKKHERHPIFGNIVDEVAYHEKYPTIYHLRKKLVDSTDKADLRLIYLALAHMIKFRGHFLIEGDLNPDNSDVDKLFIQLVQTYNQLFEENPINASGVDAKAILSARLSKSRRLENLIAQLPGEKKNGLFGNLIALSLGLTPNFKSNFDLAEDAKLQLSKDTYDDDLDNLLAQIGDQYADLFLAAKNLSDAILLSDILRVNTEITKAPLSASMIKRYDEHHQDLTLLKALVRQQLPEKYKEIFFDQSKNGYAGYIDGGASQEEFYKFIKPILEKMDGTEELLVKLNREDLLRKQRTFDNGSIPHQIHLGELHAILRRQEDFYPFLKDNREKIEKILTFRIPYYVGPLARGNSRFAWMTRKSEETITPWNFEEVVDKGASAQSFIERMTNFDKNLPNEKVLPKHSLLYEYFTVYNELTKVKYVTEGMRKPAFLSGEQKKAIVDLLFKTNRKVTVKQLKEDYFKKIECFDSVEISGVEDRFNASLGTYHDLLKIIKDKDFLDNEENEDILEDIVLTLTLFEDREMIEERLKTYAHLFDDKVMKQLKRRRYTGWGRLSRKLINGIRDKQSGKTILDFLKSDGFANRNFMQLIHDDSLTFKEDIQKAQVSGQGDSLHEHIANLAGSPAIKKGILQTVKVVDELVKVMGRHKPENIVIEMARENQTTQKGQKNSRERMKRIEEGIKELGSQILKEHPVENTQLQNEKLYLYYLQNGRDMYVDQELDINRLSDYDVDHIVPQSFLKDDSIDNKVLTRSDKARGKSDNVPSEEVVKKMKNYWRQLLNAKLITQRKFDNLTKAERGGLSELDKAGFIKRQLVETRQITKHVAQILDSRMNTKYDENDKLIREVKVITLKSKLVSDFRKDFQFYKVREINNYHHAHDAYLNAVVGTALIKKYPKLESEFVYGDYKVYDVRKMIAKSEQEIGKATAKYFFYSNIMNFFKTEITLANGEIRKRPLIETNGETGEIVWDKGRDFATVRKVLSMPQVNIVKKTEVQTGGFSKESILPKRNSDKLIARKKDWDPKKYGGFDSPTVAYSVLVVAKVEKGKSKKLKSVKELLGITIMERSSFEKNPIDFLEAKGYKEVKKDLIIKLPKYSLFELENGRKRMLASAGELQKGNELALPSKYVNFLYLASHYEKLKGSPEDNEQKQLFVEQHKHYLDEIIEQISEFSKRVILADANLDKVLSAYNKHRDKPIREQAENIIHLFTLTNLGAPAAFKYFDTTIDRKRYTSTKEVLDATLIHQSITGLYETRIDLSQLGGDGGGGSEAAAKGGGGGLLGRDLLTKLKAQIQFSTEGPQVTWEDRPAMCLVLNLEEEYRLHEKPVPPSIDPSWLQLFPMVWAEKAGMGLANQVPPVVVELKSDASPVAVRQYPMSKEAREGIRPHIQRFLDLGILVPCQSPWNTPLLPVKKPGTNDYRPVQDLREVNKRVQDIHPTVPNPYNLLSSLPPSHTWYSVLDLKDAFFCLKLHPNSQPLFAFEWRDPEKGNTGQLTWTRLPQGFKNSPTLFNEALHRDLASFRALNPQVVMLQYVDDLLVAAPTYRDCKEGTRRLLQELSKLGYRVSAKKAQLCREEVTYLGYLLKGGKRWLTPARKATVMKIPTPTTPRQVREFLGKAGFCRLFIPGFASLAAPLYPLTRPKVPFTWTEAHQEAFGRIKEALLSAPALALPDLTKPFALYVDEKEGVARGVLTQTLGPWRRPVAYLSKKLDPVASGWPTCLKAIAAVALLLKDADKLTLGQNVLVIAPHNLESIVRQPPDRWMTNARMTHYQSLLLNERVSFAPPAILNPATLLPVESDDTPIHICSEILAEETGTRPDLRDQPLPGVPAWYTDGSSFIMDGRRQAGAAIVDNKRTVWASNLPEGTSAQKAELIALTQALRLAEGKSINIYTDSRYAFATAHVHGAIYKQRGWLTSAGKDIKNKEEILALLEAIHLPKRVAIIHCPGHQRGTDPVATGNRKADEAAKQAAQSTRILTETTKNAGKRTADGSEFEKRTADGSEFESPKKKAKVE

SEQ ID NO: 1718 - protein, 2127 aa, synthetic construct
MPAAKRVKLDGGDKKYSIGLDIGTNSVGWAVITDEYKVPSKKFKVLGNTDRHSIKKNLIGALLFDSGETAEATRLKRTARRRYTRRKNRICYLQEIFSNEMAKVDDSFFHRLEESFLVEEDKKHERHPIFGNIVDEVAYHEKYPTIYHLRKKLVDSTDKADLRLIYLALAHMIKFRGHFLIEGDLNPDNSDVDKLFIQLVQTYNQLFEENPINASGVDAKAILSARLSKSRRLENLIAQLPGEKKNGLFGNLIALSLGLTPNFKSNFDLAEDAKLQLSKDTYDDDLDNLLAQIGDQYADLFLAAKNLSDAILLSDILRVNTEITKAPLSASMIKRYDEHHQDLTLLKALVRQQLPEKYKEIFFDQSKNGYAGYIDGGASQEEFYKFIKPILEKMDGTEELLVKLNREDLLRKQRTFDNGSIPHQIHLGELHAILRRQEDFYPFLKDNREKIEKILTFRIPYYVGPLARGNSRFAWMTRKSEETITPWNFEEVVDKGASAQSFIERMTNFDKNLPNEKVLPKHSLLYEYFTVYNELTKVKYVTEGMRKPAFLSGEQKKAIVDLLFKTNRKVTVKQLKEDYFKKIECFDSVEISGVEDRFNASLGTYHDLLKIIKDKDFLDNEENEDILEDIVLTLTLFEDREMIEERLKTYAHLFDDKVMKQLKRRRYTGWGRLSRKLINGIRDKQSGKTILDFLKSDGFANRNFMQLIHDDSLTFKEDIQKAQVSGQGDSLHEHIANLAGSPAIKKGILQTVKVVDELVKVMGRHKPENIVIEMARENQTTQKGQKNSRERMKRIEEGIKELGSQILKEHPVENTQLQNEKLYLYYLQNGRDMYVDQELDINRLSDYDVDHIVPQSFLKDDSIDNKVLTRSDKARGKSDNVPSEEVVKKMKNYWRQLLNAKLITQRKFDNLTKAERGGLSELDKAGFIKRQLVETRQITKHVAQILDSRMNTKYDENDKLIREVKVITLKSKLVSDFRKDFQFYKVREINNYHHAHDAYLNAVVGTALIKKYPKLESEFVYGDYKVYDVRKMIAKSEQEIGKATAKYFFYSNIMNFFKTEITLANGEIRKRPLIETNGETGEIVWDKGRDFATVRKVLSMPQVNIVKKTEVQTGGFSKESILPKRNSDKLIARKKDWDPKKYGGFDSPTVAYSVLVVAKVEKGKSKKLKSVKELLGITIMERSSFEKNPIDFLEAKGYKEVKKDLIIKLPKYSLFELENGRKRMLASAGELQKGNELALPSKYVNFLYLASHYEKLKGSPEDNEQKQLFVEQHKHYLDEIIEQISEFSKRVILADANLDKVLSAYNKHRDKPIREQAENIIHLFTLTNLGAPAAFKYFDTTIDRKRYTSTKEVLDATLIHQSITGLYETRIDLSQLGGDGGPAPGGSEAAAKGGLLGRDLLTKLKAQIQFSTEGPQVTWEDRPAMCLVLNLEEEYRLHEKPVPPSIDPSWLQLFPMVWAEKAGMGLANQVPPVVVELKSDASPVAVRQYPMSKEAREGIRPHIQRFLDLGILVPCQSPWNTPLLPVKKPGTNDYRPVQDLREVNKRVQDIHPTVPNPYNLLSSLPPSHTWYSVLDLKDAFFCLKLHPNSQPLFAFEWRDPEKGNTGQLTWTRLPQGFKNSPTLFNEALHRDLASFRALNPQVVMLQYVDDLLVAAPTYRDCKEGTRRLLQELSKLGYRVSAKKAQLCREEVTYLGYLLKGGKRWLTPARKATVMKIPTPTTPRQVREFLGKAGFCRLFIPGFASLAAPLYPLTRPKVPFTWTEAHQEAFGRIKEALLSAPALALPDLTKPFALYVDEKEGVARGVLTQTLGPWRRPVAYLSKKLDPVASGWPTCLKAIAAVALLLKDADKLTLGQNVLVIAPHNLESIVRQPPDRWMTNARMTHYQSLLLNERVSFAPPAILNPATLLPVESDDTPIHICSEILAEETGTRPDLRDQPLPGVPAWYTDGSSFIMDGRRQAGAAIVDNKRTVWASNLPEGTSAQKAELIALTQALRLAEGKSINIYTDSRYAFATAHVHGAIYKQRGWLTSAGKDIKNKEEILALLEAIHLPKRVAIIHCPGHQRGTDPVATGNRKADEAAKQAAQSTRILTETTKNAGKRTADGSEFEKRTADGSEFESPKKKAKVE

SEQ ID NO: 1719 - protein, 2125 aa, synthetic construct
MPAAKRVKLDGGDKKYSIGLDIGTNSVGWAVITDEYKVPSKKFKVLGNTDRHSIKKNLIGALLFDSGETAEATRLKRTARRRYTRRKNRICYLQEIFSNEMAKVDDSFFHRLEESFLVEEDKKHERHPIFGNIVDEVAYHEKYPTIYHLRKKLVDSTDKADLRLIYLALAHMIKFRGHFLIEGDLNPDNSDVDKLFIQLVQTYNQLFEENPINASGVDAKAILSARLSKSRRLENLIAQLPGEKKNGLFGNLIALSLGLTPNFKSNFDLAEDAKLQLSKDTYDDDLDNLLAQIGDQYADLFLAAKNLSDAILLSDILRVNTEITKAPLSASMIKRYDEHHQDLTLLKALVRQQLPEKYKEIFFDQSKNGYAGYIDGGASQEEFYKFIKPILEKMDGTEELLVKLNREDLLRKQRTFDNGSIPHQIHLGELHAILRRQEDFYPFLKDNREKIEKILTFRIPYYVGPLARGNSRFAWMTRKSEETITPWNFEEVVDKGASAQSFIERMTNFDKNLPNEKVLPKHSLLYEYFTVYNELTKVKYVTEGMRKPAFLSGEQKKAIVDLLFKTNRKVTVKQLKEDYFKKIECFDSVEISGVEDRFNASLGTYHDLLKIIKDKDFLDNEENEDILEDIVLTLTLFEDREMIEERLKTYAHLFDDKVMKQLKRRRYTGWGRLSRKLINGIRDKQSGKTILDFLKSDGFANRNFMQLIHDDSLTFKEDIQKAQVSGQGDSLHEHIANLAGSPAIKKGILQTVKVVDELVKVMGRHKPENIVIEMARENQTTQKGQKNSRERMKRIEEGIKELGSQILKEHPVENTQLQNEKLYLYYLQNGRDMYVDQELDINRLSDYDVDHIVPQSFLKDDSIDNKVLTRSDKARGKSDNVPSEEVVKKMKNYWRQLLNAKLITQRKFDNLTKAERGGLSELDKAGFIKRQLVETRQITKHVAQILDSRMNTKYDENDKLIREVKVITLKSKLVSDFRKDFQFYKVREINNYHHAHDAYLNAVVGTALIKKYPKLESEFVYGDYKVYDVRKMIAKSEQEIGKATAKYFFYSNIMNFFKTEITLANGEIRKRPLIETNGETGEIVWDKGRDFATVRKVLSMPQVNIVKKTEVQTGGFSKESILPKRNSDKLIARKKDWDPKKYGGFDSPTVAYSVLVVAKVEKGKSKKLKSVKELLGITIMERSSFEKNPIDFLEAKGYKEVKKDLIIKLPKYSLFELENGRKRMLASAGELQKGNELALPSKYVNFLYLASHYEKLKGSPEDNEQKQLFVEQHKHYLDEIIEQISEFSKRVILADANLDKVLSAYNKHRDKPIREQAENIIHLFTLTNLGAPAAFKYFDTTIDRKRYTSTKEVLDATLIHQSITGLYETRIDLSQLGGDGGPAPGSSGGGGGLLGRDLLTKLKAQIQFSTEGPQVTWEDRPAMCLVLNLEEEYRLHEKPVPPSIDPSWLQLFPMVWAEKAGMGLANQVPPVVVELKSDASPVAVRQYPMSKEAREGIRPHIQRFLDLGILVPCQSPWNTPLLPVKKPGTNDYRPVQDLREVNKRVQDIHPTVPNPYNLLSSLPPSHTWYSVLDLKDAFFCLKLHPNSQPLFAFEWRDPEKGNTGQLTWTRLPQGFKNSPTLFNEALHRDLASFRALNPQVVMLQYVDDLLVAAPTYRDCKEGTRRLLQELSKLGYRVSAKKAQLCREEVTYLGYLLKGGKRWLTPARKATVMKIPTPTTPRQVREFLGKAGFCRLFIPGFASLAAPLYPLTRPKVPFTWTEAHQEAFGRIKEALLSAPALALPDLTKPFALYVDEKEGVARGVLTQTLGPWRRPVAYLSKKLDPVASGWPTCLKAIAAVALLLKDADKLTLGQNVLVIAPHNLESIVRQPPDRWMTNARMTHYQSLLLNERVSFAPPAILNPATLLPVESDDTPIHICSEILAEETGTRPDLRDQPLPGVPAWYTDGSSFIMDGRRQAGAAIVDNKRTVWASNLPEGTSAQKAELIALTQALRLAEGKSINIYTDSRYAFATAHVHGAIYKQRGWLTSAGKDIKNKEEILALLEAIHLPKRVAIIHCPGHQRGTDPVATGNRKADEAAKQAAQSTRILTETTKNAGKRTADGSEFEKRTADGSEFESPKKKAKVE

SEQ ID NO: 1720 - protein, 2126 aa, synthetic construct
MPAAKRVKLDGGDKKYSIGLDIGTNSVGWAVITDEYKVPSKKFKVLGNTDRHSIKKNLIGALLFDSGETAEATRLKRTARRRYTRRKNRICYLQEIFSNEMAKVDDSFFHRLEESFLVEEDKKHERHPIFGNIVDEVAYHEKYPTIYHLRKKLVDSTDKADLRLIYLALAHMIKFRGHFLIEGDLNPDNSDVDKLFIQLVQTYNQLFEENPINASGVDAKAILSARLSKSRRLENLIAQLPGEKKNGLFGNLIALSLGLTPNFKSNFDLAEDAKLQLSKDTYDDDLDNLLAQIGDQYADLFLAAKNLSDAILLSDILRVNTEITKAPLSASMIKRYDEHHQDLTLLKALVRQQLPEKYKEIFFDQSKNGYAGYIDGGASQEEFYKFIKPILEKMDGTEELLVKLNREDLLRKQRTFDNGSIPHQIHLGELHAILRRQEDFYPFLKDNREKIEKILTFRIPYYVGPLARGNSRFAWMTRKSEETITPWNFEEVVDKGASAQSFIERMTNFDKNLPNEKVLPKHSLLYEYFTVYNELTKVKYVTEGMRKPAFLSGEQKKAIVDLLFKTNRKVTVKQLKEDYFKKIECFDSVEISGVEDRFNASLGTYHDLLKIIKDKDFLDNEENEDILEDIVLTLTLFEDREMIEERLKTYAHLFDDKVMKQLKRRRYTGWGRLSRKLINGIRDKQSGKTILDFLKSDGFANRNFMQLIHDDSLTFKEDIQKAQVSGQGDSLHEHIANLAGSPAIKKGILQTVKVVDELVKVMGRHKPENIVIEMARENQTTQKGQKNSRERMKRIEEGIKELGSQILKEHPVENTQLQNEKLYLYYLQNGRDMYVDQELDINRLSDYDVDHIVPQSFLKDDSIDNKVLTRSDKARGKSDNVPSEEVVKKMKNYWRQLLNAKLITQRKFDNLTKAERGGLSELDKAGFIKRQLVETRQITKHVAQILDSRMNTKYDENDKLIREVKVITLKSKLVSDFRKDFQFYKVREINNYHHAHDAYLNAVVGTALIKKYPKLESEFVYGDYKVYDVRKMIAKSEQEIGKATAKYFFYSNIMNFFKTEITLANGEIRKRPLIETNGETGEIVWDKGRDFATVRKVLSMPQVNIVKKTEVQTGGFSKESILPKRNSDKLIARKKDWDPKKYGGFDSPTVAYSVLVVAKVEKGKSKKLKSVKELLGITIMERSSFEKNPIDFLEAKGYKEVKKDLIIKLPKYSLFELENGRKRMLASAGELQKGNELALPSKYVNFLYLASHYEKLKGSPEDNEQKQLFVEQHKHYLDEIIEQISEFSKRVILADANLDKVLSAYNKHRDKPIREQAENIIHLFTLTNLGAPAAFKYFDTTIDRKRYTSTKEVLDATLIHQSITGLYETRIDLSQLGGDGGGGGGSGGGGSGGLLGRDLLTKLKAQIQFSTEGPQVTWEDRPAMCLVLNLEEEYRLHEKPVPPSIDPSWLQLFPMVWAEKAGMGLANQVPPVVVELKSDASPVAVRQYPMSKEAREGIRPHIQRFLDLGILVPCQSPWNTPLLPVKKPGTNDYRPVQDLREVNKRVQDIHPTVPNPYNLLSSLPPSHTWYSVLDLKDAFFCLKLHPNSQPLFAFEWRDPEKGNTGQLTWTRLPQGFKNSPTLFNEALHRDLASFRALNPQVVMLQYVDDLLVAAPTYRDCKEGTRRLLQELSKLGYRVSAKKAQLCREEVTYLGYLLKGGKRWLTPARKATVMKIPTPTTPRQVREFLGKAGFCRLFIPGFASLAAPLYPLTRPKVPFTWTEAHQEAFGRIKEALLSAPALALPDLTKPFALYVDEKEGVARGVLTQTLGPWRRPVAYLSKKLDPVASGWPTCLKAIAAVALLLKDADKLTLGQNVLVIAPHNLESIVRQPPDRWMTNARMTHYQSLLLNERVSFAPPAILNPATLLPVESDDTPIHICSEILAEETGTRPDLRDQPLPGVPAWYTDGSSFIMDGRRQAGAAIVDNKRTVWASNLPEGTSAQKAELIALTQALRLAEGKSINIYTDSRYAFATAHVHGAIYKQRGWLTSAGKDIKNKEEILALLEAIHLPKRVAIIHCPGHQRGTDPVATGNRKADEAAKQAAQSTRILTETTKNAGKRTADGSEFEKRTADGSEFESPKKKAKVE

SEQ ID NO: 1721 - protein, 2127 aa, synthetic construct
MPAAKRVKLDGGDKKYSIGLDIGTNSVGWAVITDEYKVPSKKFKVLGNTDRHSIKKNLIGALLFDSGETAEATRLKRTARRRYTRRKNRICYLQEIFSNEMAKVDDSFFHRLEESFLVEEDKKHERHPIFGNIVDEVAYHEKYPTIYHLRKKLVDSTDKADLRLIYLALAHMIKFRGHFLIEGDLNPDNSDVDKLFIQLVQTYNQLFEENPINASGVDAKAILSARLSKSRRLENLIAQLPGEKKNGLFGNLIALSLGLTPNFKSNFDLAEDAKLQLSKDTYDDDLDNLLAQIGDQYADLFLAAKNLSDAILLSDILRVNTEITKAPLSASMIKRYDEHHQDLTLLKALVRQQLPEKYKEIFFDQSKNGYAGYIDGGASQEEFYKFIKPILEKMDGTEELLVKLNREDLLRKQRTFDNGSIPHQIHLGELHAILRRQEDFYPFLKDNREKIEKILTFRIPYYVGPLARGNSRFAWMTRKSEETITPWNFEEVVDKGASAQSFIERMTNFDKNLPNEKVLPKHSLLYEYFTVYNELTKVKYVTEGMRKPAFLSGEQKKAIVDLLFKTNRKVTVKQLKEDYFKKIECFDSVEISGVEDRFNASLGTYHDLLKIIKDKDFLDNEENEDILEDIVLTLTLFEDREMIEERLKTYAHLFDDKVMKQLKRRRYTGWGRLSRKLINGIRDKQSGKTILDFLKSDGFANRNFMQLIHDDSLTFKEDIQKAQVSGQGDSLHEHIANLAGSPAIKKGILQTVKVVDELVKVMGRHKPENIVIEMARENQTTQKGQKNSRERMKRIEEGIKELGSQILKEHPVENTQLQNEKLYLYYLQNGRDMYVDQELDINRLSDYDVDHIVPQSFLKDDSIDNKVLTRSDKARGKSDNVPSEEVVKKMKNYWRQLLNAKLITQRKFDNLTKAERGGLSELDKAGFIKRQLVETRQITKHVAQILDSRMNTKYDENDKLIREVKVITLKSKLVSDFRKDFQFYKVREINNYHHAHDAYLNAVVGTALIKKYPKLESEFVYGDYKVYDVRKMIAKSEQEIGKATAKYFFYSNIMNFFKTEITLANGEIRKRPLIETNGETGEIVWDKGRDFATVRKVLSMPQVNIVKKTEVQTGGFSKESILPKRNSDKLIARKKDWDPKKYGGFDSPTVAYSVLVVAKVEKGKSKKLKSVKELLGITIMERSSFEKNPIDFLEAKGYKEVKKDLIIKLPKYSLFELENGRKRMLASAGELQKGNELALPSKYVNFLYLASHYEKLKGSPEDNEQKQLFVEQHKHYLDEIIEQISEFSKRVILADANLDKVLSAYNKHRDKPIREQAENIIHLFTLTNLGAPAAFKYFDTTIDRKRYTSTKEVLDATLIHQSITGLYETRIDLSQLGGDGGGSSPAPEAAAKGGLLGRDLLTKLKAQIQFSTEGPQVTWEDRPAMCLVLNLEEEYRLHEKPVPPSIDPSWLQLFPMVWAEKAGMGLANQVPPVVVELKSDASPVAVRQYPMSKEAREGIRPHIQRFLDLGILVPCQSPWNTPLLPVKKPGTNDYRPVQDLREVNKRVQDIHPTVPNPYNLLSSLPPSHTWYSVLDLKDAFFCLKLHPNSQPLFAFEWRDPEKGNTGQLTWTRLPQGFKNSPTLFNEALHRDLASFRALNPQVVMLQYVDDLLVAAPTYRDCKEGTRRLLQELSKLGYRVSAKKAQLCREEVTYLGYLLKGGKRWLTPARKATVMKIPTPTTPRQVREFLGKAGFCRLFIPGFASLAAPLYPLTRPKVPFTWTEAHQEAFGRIKEALLSAPALALPDLTKPFALYVDEKEGVARGVLTQTLGPWRRPVAYLSKKLDPVASGWPTCLKAIAAVALLLKDADKLTLGQNVLVIAPHNLESIVRQPPDRWMTNARMTHYQSLLLNERVSFAPPAILNPATLLPVESDDTPIHICSEILAEETGTRPDLRDQPLPGVPAWYTDGSSFIMDGRRQAGAAIVDNKRTVWASNLPEGTSAQKAELIALTQALRLAEGKSINIYTDSRYAFATAHVHGAIYKQRGWLTSAGKDIKNKEEILALLEAIHLPKRVAIIHCPGHQRGTDPVATGNRKADEAAKQAAQSTRILTETTKNAGKRTADGSEFEKRTADGSEFESPKKKAKVE

SEQ ID NO: 1722 - protein, 2127 aa, synthetic construct
MPAAKRVKLDGGDKKYSIGLDIGTNSVGWAVITDEYKVPSKKFKVLGNTDRHSIKKNLIGALLFDSGETAEATRLKRTARRRYTRRKNRICYLQEIFSNEMAKVDDSFFHRLEESFLVEEDKKHERHPIFGNIVDEVAYHEKYPTIYHLRKKLVDSTDKADLRLIYLALAHMIKFRGHFLIEGDLNPDNSDVDKLFIQLVQTYNQLFEENPINASGVDAKAILSARLSKSRRLENLIAQLPGEKKNGLFGNLIALSLGLTPNFKSNFDLAEDAKLQLSKDTYDDDLDNLLAQIGDQYADLFLAAKNLSDAILLSDILRVNTEITKAPLSASMIKRYDEHHQDLTLLKALVRQQLPEKYKEIFFDQSKNGYAGYIDGGASQEEFYKFIKPILEKMDGTEELLVKLNREDLLRKQRTFDNGSIPHQIHLGELHAILRRQEDFYPFLKDNREKIEKILTFRIPYYVGPLARGNSRFAWMTRKSEETITPWNFEEVVDKGASAQSFIERMTNFDKNLPNEKVLPKHSLLYEYFTVYNELTKVKYVTEGMRKPAFLSGEQKKAIVDLLFKTNRKVTVKQLKEDYFKKIECFDSVEISGVEDRFNASLGTYHDLLKIIKDKDFLDNEENEDILEDIVLTLTLFEDREMIEERLKTYAHLFDDKVMKQLKRRRYTGWGRLSRKLINGIRDKQSGKTILDFLKSDGFANRNFMQLIHDDSLTFKEDIQKAQVSGQGDSLHEHIANLAGSPAIKKGILQTVKVVDELVKVMGRHKPENIVIEMARENQTTQKGQKNSRERMKRIEEGIKELGSQILKEHPVENTQLQNEKLYLYYLQNGRDMYVDQELDINRLSDYDVDHIVPQSFLKDDSIDNKVLTRSDKARGKSDNVPSEEVVKKMKNYWRQLLNAKLITQRKFDNLTKAERGGLSELDKAGFIKRQLVETRQITKHVAQILDSRMNTKYDENDKLIREVKVITLKSKLVSDFRKDFQFYKVREINNYHHAHDAYLNAVVGTALIKKYPKLESEFVYGDYKVYDVRKMIAKSEQEIGKATAKYFFYSNIMNFFKTEITLANGEIRKRPLIETNGETGEIVWDKGRDFATVRKVLSMPQVNIVKKTEVQTGGFSKESILPKRNSDKLIARKKDWDPKKYGGFDSPTVAYSVLVVAKVEKGKSKKLKSVKELLGITIMERSSFEKNPIDFLEAKGYKEVKKDLIIKLPKYSLFELENGRKRMLASAGELQKGNELALPSKYVNFLYLASHYEKLKGSPEDNEQKQLFVEQHKHYLDEIIEQISEFSKRVILADANLDKVLSAYNKHRDKPIREQAENIIHLFTLTNLGAPAAFKYFDTTIDRKRYTSTKEVLDATLIHQSITGLYETRIDLSQLGGDGGGGSEAAAKGSSGGLLGRDLLTKLKAQIQFSTEGPQVTWEDRPAMCLVLNLEEEYRLHEKPVPPSIDPSWLQLFPMVWAEKAGMGLANQVPPVVVELKSDASPVAVRQYPMSKEAREGIRPHIQRFLDLGILVPCQSPWNTPLLPVKKPGTNDYRPVQDLREVNKRVQDIHPTVPNPYNLLSSLPPSHTWYSVLDLKDAFFCLKLHPNSQPLFAFEWRDPEKGNTGQLTWTRLPQGFKNSPTLFNEALHRDLASFRALNPQVVMLQYVDDLLVAAPTYRDCKEGTRRLLQELSKLGYRVSAKKAQLCREEVTYLGYLLKGGKRWLTPARKATVMKIPTPTTPRQVREFLGKAGFCRLFIPGFASLAAPLYPLTRPKVPFTWTEAHQEAFGRIKEALLSAPALALPDLTKPFALYVDEKEGVARGVLTQTLGPWRRPVAYLSKKLDPVASGWPTCLKAIAAVALLLKDADKLTLGQNVLVIAPHNLESIVRQPPDRWMTNARMTHYQSLLLNERVSFAPPAILNPATLLPVESDDTPIHICSEILAEETGTRPDLRDQPLPGVPAWYTDGSSFIMDGRRQAGAAIVDNKRTVWASNLPEGTSAQKAELIALTQALRLAEGKSINIYTDSRYAFATAHVHGAIYKQRGWLTSAGKDIKNKEEILALLEAIHLPKRVAIIHCPGHQRGTDPVATGNRKADEAAKQAAQSTRILTETTKNAGKRTADGSEFEKRTADGSEFESPKKKAKVE

SEQ ID NO: 1723 - protein, 2127 aa, synthetic construct
MPAAKRVKLDGGDKKYSIGLDIGTNSVGWAVITDEYKVPSKKFKVLGNTDRHSIKKNLIGALLFDSGETAEATRLKRTARRRYTRRKNRICYLQEIFSNEMAKVDDSFFHRLEESFLVEEDKKHERHPIFGNIVDEVAYHEKYPTIYHLRKKLVDSTDKADLRLIYLALAHMIKFRGHFLIEGDLNPDNSDVDKLFIQLVQTYNQLFEENPINASGVDAKAILSARLSKSRRLENLIAQLPGEKKNGLFGNLIALSLGLTPNFKSNFDLAEDAKLQLSKDTYDDDLDNLLAQIGDQYADLFLAAKNLSDAILLSDILRVNTEITKAPLSASMIKRYDEHHQDLTLLKALVRQQLPEKYKEIFFDQSKNGYAGYIDGGASQEEFYKFIKPILEKMDGTEELLVKLNREDLLRKQRTFDNGSIPHQIHLGELHAILRRQEDFYPFLKDNREKIEKILTFRIPYYVGPLARGNSRFAWMTRKSEETITPWNFEEVVDKGASAQSFIERMTNFDKNLPNEKVLPKHSLLYEYFTVYNELTKVKYVTEGMRKPAFLSGEQKKAIVDLLFKTNRKVTVKQLKEDYFKKIECFDSVEISGVEDRFNASLGTYHDLLKIIKDKDFLDNEENEDILEDIVLTLTLFEDREMIEERLKTYAHLFDDKVMKQLKRRRYTGWGRLSRKLINGIRDKQSGKTILDFLKSDGFANRNFMQLIHDDSLTFKEDIQKAQVSGQGDSLHEHIANLAGSPAIKKGILQTVKVVDELVKVMGRHKPENIVIEMARENQTTQKGQKNSRERMKRIEEGIKELGSQILKEHPVENTQLQNEKLYLYYLQNGRDMYVDQELDINRLSDYDVDHIVPQSFLKDDSIDNKVLTRSDKARGKSDNVPSEEVVKKMKNYWRQLLNAKLITQRKFDNLTKAERGGLSELDKAGFIKRQLVETRQITKHVAQILDSRMNTKYDENDKLIREVKVITLKSKLVSDFRKDFQFYKVREINNYHHAHDAYLNAVVGTALIKKYPKLESEFVYGDYKVYDVRKMIAKSEQEIGKATAKYFFYSNIMNFFKTEITLANGEIRKRPLIETNGETGEIVWDKGRDFATVRKVLSMPQVNIVKKTEVQTGGFSKESILPKRNSDKLIARKKDWDPKKYGGFDSPTVAYSVLVVAKVEKGKSKKLKSVKELLGITIMERSSFEKNPIDFLEAKGYKEVKKDLIIKLPKYSLFELENGRKRMLASAGELQKGNELALPSKYVNFLYLASHYEKLKGSPEDNEQKQLFVEQHKHYLDEIIEQISEFSKRVILADANLDKVLSAYNKHRDKPIREQAENIIHLFTLTNLGAPAAFKYFDTTIDRKRYTSTKEVLDATLIHQSITGLYETRIDLSQLGGDGGEAAAKPAPGGSGGLLGRDLLTKLKAQIQFSTEGPQVTWEDRPAMCLVLNLEEEYRLHEKPVPPSIDPSWLQLFPMVWAEKAGMGLANQVPPVVVELKSDASPVAVRQYPMSKEAREGIRPHIQRFLDLGILVPCQSPWNTPLLPVKKPGTNDYRPVQDLREVNKRVQDIHPTVPNPYNLLSSLPPSHTWYSVLDLKDAFFCLKLHPNSQPLFAFEWRDPEKGNTGQLTWTRLPQGFKNSPTLFNEALHRDLASFRALNPQVVMLQYVDDLLVAAPTYRDCKEGTRRLLQELSKLGYRVSAKKAQLCREEVTYLGYLLKGGKRWLTPARKATVMKIPTPTTPRQVREFLGKAGFCRLFIPGFASLAAPLYPLTRPKVPFTWTEAHQEAFGRIKEALLSAPALALPDLTKPFALYVDEKEGVARGVLTQTLGPWRRPVAYLSKKLDPVASGWPTCLKAIAAVALLLKDADKLTLGQNVLVIAPHNLESIVRQPPDRWMTNARMTHYQSLLLNERVSFAPPAILNPATLLPVESDDTPIHICSEILAEETGTRPDLRDQPLPGVPAWYTDGSSFIMDGRRQAGAAIVDNKRTVWASNLPEGTSAQKAELIALTQALRLAEGKSINIYTDSRYAFATAHVHGAIYKQRGWLTSAGKDIKNKEEILALLEAIHLPKRVAIIHCPGHQRGTDPVATGNRKADEAAKQAAQSTRILTETTKNAGKRTADGSEFEKRTADGSEFESPKKKAKVE

SEQ ID NO: 1724 - protein, 2125 aa, synthetic construct
MPAAKRVKLDGGDKKYSIGLDIGTNSVGWAVITDEYKVPSKKFKVLGNTDRHSIKKNLIGALLFDSGETAEATRLKRTARRRYTRRKNRICYLQEIFSNEMAKVDDSFFHRLEESFLVEEDKKHERHPIFGNIVDEVAYHEKYPTIYHLRKKLVDSTDKADLRLIYLALAHMIKFRGHFLIEGDLNPDNSDVDKLFIQLVQTYNQLFEENPINASGVDAKAILSARLSKSRRLENLIAQLPGEKKNGLFGNLIALSLGLTPNFKSNFDLAEDAKLQLSKDTYDDDLDNLLAQIGDQYADLFLAAKNLSDAILLSDILRVNTEITKAPLSASMIKRYDEHHQDLTLLKALVRQQLPEKYKEIFFDQSKNGYAGYIDGGASQEEFYKFIKPILEKMDGTEELLVKLNREDLLRKQRTFDNGSIPHQIHLGELHAILRRQEDFYPFLKDNREKIEKILTFRIPYYVGPLARGNSRFAWMTRKSEETITPWNFEEVVDKGASAQSFIERMTNFDKNLPNEKVLPKHSLLYEYFTVYNELTKVKYVTEGMRKPAFLSGEQKKAIVDLLFKTNRKVTVKQLKEDYFKKIECFDSVEISGVEDRFNASLGTYHDLLKIIKDKDFLDNEENEDILEDIVLTLTLFEDREMIEERLKTYAHLFDDKVMKQLKRRRYTGWGRLSRKLINGIRDKQSGKTILDFLKSDGFANRNFMQLIHDDSLTFKEDIQKAQVSGQGDSLHEHIANLAGSPAIKKGILQTVKVVDELVKVMGRHKPENIVIEMARENQTTQKGQKNSRERMKRIEEGIKELGSQILKEHPVENTQLQNEKLYLYYLQNGRDMYVDQELDINRLSDYDVDHIVPQSFLKDDSIDNKVLTRSDKARGKSDNVPSEEVVKKMKNYWRQLLNAKLITQRKFDNLTKAERGGLSELDKAGFIKRQLVETRQITKHVAQILDSRMNTKYDENDKLIREVKVITLKSKLVSDFRKDFQFYKVREINNYHHAHDAYLNAVVGTALIKKYPKLESEFVYGDYKVYDVRKMIAKSEQEIGKATAKYFFYSNIMNFFKTEITLANGEIRKRPLIETNGETGEIVWDKGRDFATVRKVLSMPQVNIVKKTEVQTGGFSKESILPKRNSDKLIARKKDWDPKKYGGFDSPTVAYSVLVVAKVEKGKSKKLKSVKELLGITIMERSSFEKNPIDFLEAKGYKEVKKDLIIKLPKYSLFELENGRKRMLASAGELQKGNELALPSKYVNFLYLASHYEKLKGSPEDNEQKQLFVEQHKHYLDEIIEQISEFSKRVILADANLDKVLSAYNKHRDKPIREQAENIIHLFTLTNLGAPAAFKYFDTTIDRKRYTSTKEVLDATLIHQSITGLYETRIDLSQLGGDGGGGSGSSGGGGGLLGRDLLTKLKAQIQFSTEGPQVTWEDRPAMCLVLNLEEEYRLHEKPVPPSIDPSWLQLFPMVWAEKAGMGLANQVPPVVVELKSDASPVAVRQYPMSKEAREGIRPHIQRFLDLGILVPCQSPWNTPLLPVKKPGTNDYRPVQDLREVNKRVQDIHPTVPNPYNLLSSLPPSHTWYSVLDLKDAFFCLKLHPNSQPLFAFEWRDPEKGNTGQLTWTRLPQGFKNSPTLFNEALHRDLASFRALNPQVVMLQYVDDLLVAAPTYRDCKEGTRRLLQELSKLGYRVSAKKAQLCREEVTYLGYLLKGGKRWLTPARKATVMKIPTPTTPRQVREFLGKAGFCRLFIPGFASLAAPLYPLTRPKVPFTWTEAHQEAFGRIKEALLSAPALALPDLTKPFALYVDEKEGVARGVLTQTLGPWRRPVAYLSKKLDPVASGWPTCLKAIAAVALLLKDADKLTLGQNVLVIAPHNLESIVRQPPDRWMTNARMTHYQSLLLNERVSFAPPAILNPATLLPVESDDTPIHICSEILAEETGTRPDLRDQPLPGVPAWYTDGSSFIMDGRRQAGAAIVDNKRTVWASNLPEGTSAQKAELIALTQALRLAEGKSINIYTDSRYAFATAHVHGAIYKQRGWLTSAGKDIKNKEEILALLEAIHLPKRVAIIHCPGHQRGTDPVATGNRKADEAAKQAAQSTRILTETTKNAGKRTADGSEFEKRTADGSEFESPKKKAKVE

SEQ ID NO: 1725 - protein, 2127 aa, synthetic construct
MPAAKRVKLDGGDKKYSIGLDIGTNSVGWAVITDEYKVPSKKFKVLGNTDRHSIKKNLIGALLFDSGETAEATRLKRTARRRYTRRKNRICYLQEIFSNEMAKVDDSFFHRLEESFLVEEDKKHERHPIFGNIVDEVAYHEKYPTIYHLRKKLVDSTDKADLRLIYLALAHMIKFRGHFLIEGDLNPDNSDVDKLFIQLVQTYNQLFEENPINASGVDAKAILSARLSKSRRLENLIAQLPGEKKNGLFGNLIALSLGLTPNFKSNFDLAEDAKLQLSKDTYDDDLDNLLAQIGDQYADLFLAAKNLSDAILLSDILRVNTEITKAPLSASMIKRYDEHHQDLTLLKALVRQQLPEKYKEIFFDQSKNGYAGYIDGGASQEEFYKFIKPILEKMDGTEELLVKLNREDLLRKQRTFDNGSIPHQIHLGELHAILRRQEDFYPFLKDNREKIEKILTFRIPYYVGPLARGNSRFAWMTRKSEETITPWNFEEVVDKGASAQSFIERMTNFDKNLPNEKVLPKHSLLYEYFTVYNELTKVKYVTEGMRKPAFLSGEQKKAIVDLLFKTNRKVTVKQLKEDYFKKIECFDSVEISGVEDRFNASLGTYHDLLKIIKDKDFLDNEENEDILEDIVLTLTLFEDREMIEERLKTYAHLFDDKVMKQLKRRRYTGWGRLSRKLINGIRDKQSGKTILDFLKSDGFANRNFMQLIHDDSLTFKEDIQKAQVSGQGDSLHEHIANLAGSPAIKKGILQTVKVVDELVKVMGRHKPENIVIEMARENQTTQKGQKNSRERMKRIEEGIKELGSQILKEHPVENTQLQNEKLYLYYLQNGRDMYVDQELDINRLSDYDVDHIVPQSFLKDDSIDNKVLTRSDKARGKSDNVPSEEVVKKMKNYWRQLLNAKLITQRKFDNLTKAERGGLSELDKAGFIKRQLVETRQITKHVAQILDSRMNTKYDENDKLIREVKVITLKSKLVSDFRKDFQFYKVREINNYHHAHDAYLNAVVGTALIKKYPKLESEFVYGDYKVYDVRKMIAKSEQEIGKATAKYFFYSNIMNFFKTEITLANGEIRKRPLIETNGETGEIVWDKGRDFATVRKVLSMPQVNIVKKTEVQTGGFSKESILPKRNSDKLIARKKDWDPKKYGGFDSPTVAYSVLVVAKVEKGKSKKLKSVKELLGITIMERSSFEKNPIDFLEAKGYKEVKKDLIIKLPKYSLFELENGRKRMLASAGELQKGNELALPSKYVNFLYLASHYEKLKGSPEDNEQKQLFVEQHKHYLDEIIEQISEFSKRVILADANLDKVLSAYNKHRDKPIREQAENIIHLFTLTNLGAPAAFKYFDTTIDRKRYTSTKEVLDATLIHQSITGLYETRIDLSQLGGDGGGSSEAAAKGGSGGLLGRDLLTKLKAQIQFSTEGPQVTWEDRPAMCLVLNLEEEYRLHEKPVPPSIDPSWLQLFPMVWAEKAGMGLANQVPPVVVELKSDASPVAVRQYPMSKEAREGIRPHIQRFLDLGILVPCQSPWNTPLLPVKKPGTNDYRPVQDLREVNKRVQDIHPTVPNPYNLLSSLPPSHTWYSVLDLKDAFFCLKLHPNSQPLFAFEWRDPEKGNTGQLTWTRLPQGFKNSPTLFNEALHRDLASFRALNPQVVMLQYVDDLLVAAPTYRDCKEGTRRLLQELSKLGYRVSAKKAQLCREEVTYLGYLLKGGKRWLTPARKATVMKIPTPTTPRQVREFLGKAGFCRLFIPGFASLAAPLYPLTRPKVPFTWTEAHQEAFGRIKEALLSAPALALPDLTKPFALYVDEKEGVARGVLTQTLGPWRRPVAYLSKKLDPVASGWPTCLKAIAAVALLLKDADKLTLGQNVLVIAPHNLESIVRQPPDRWMTNARMTHYQSLLLNERVSFAPPAILNPATLLPVESDDTPIHICSEILAEETGTRPDLRDQPLPGVPAWYTDGSSFIMDGRRQAGAAIVDNKRTVWASNLPEGTSAQKAELIALTQALRLAEGKSINIYTDSRYAFATAHVHGAIYKQRGWLTSAGKDIKNKEEILALLEAIHLPKRVAIIHCPGHQRGTDPVATGNRKADEAAKQAAQSTRILTETTKNAGKRTADGSEFEKRTADGSEFESPKKKAKVE

SEQ ID NO: 1726 - protein, 2127 aa, synthetic construct
MPAAKRVKLDGGDKKYSIGLDIGTNSVGWAVITDEYKVPSKKFKVLGNTDRHSIKKNLIGALLFDSGETAEATRLKRTARRRYTRRKNRICYLQEIFSNEMAKVDDSFFHRLEESFLVEEDKKHERHPIFGNIVDEVAYHEKYPTIYHLRKKLVDSTDKADLRLIYLALAHMIKFRGHFLIEGDLNPDNSDVDKLFIQLVQTYNQLFEENPINASGVDAKAILSARLSKSRRLENLIAQLPGEKKNGLFGNLIALSLGLTPNFKSNFDLAEDAKLQLSKDTYDDDLDNLLAQIGDQYADLFLAAKNLSDAILLSDILRVNTEITKAPLSASMIKRYDEHHQDLTLLKALVRQQLPEKYKEIFFDQSKNGYAGYIDGGASQEEFYKFIKPILEKMDGTEELLVKLNREDLLRKQRTFDNGSIPHQIHLGELHAILRRQEDFYPFLKDNREKIEKILTFRIPYYVGPLARGNSRFAWMTRKSEETITPWNFEEVVDKGASAQSFIERMTNFDKNLPNEKVLPKHSLLYEYFTVYNELTKVKYVTEGMRKPAFLSGEQKKAIVDLLFKTNRKVTVKQLKEDYFKKIECFDSVEISGVEDRFNASLGTYHDLLKIIKDKDFLDNEENEDILEDIVLTLTLFEDREMIEERLKTYAHLFDDKVMKQLKRRRYTGWGRLSRKLINGIRDKQSGKTILDFLKSDGFANRNFMQLIHDDSLTFKEDIQKAQVSGQGDSLHEHIANLAGSPAIKKGILQTVKVVDELVKVMGRHKPENIVIEMARENQTTQKGQKNSRERMKRIEEGIKELGSQILKEHPVENTQLQNEKLYLYYLQNGRDMYVDQELDINRLSDYDVDHIVPQSFLKDDSIDNKVLTRSDKARGKSDNVPSEEVVKKMKNYWRQLLNAKLITQRKFDNLTKAERGGLSELDKAGFIKRQLVETRQITKHVAQILDSRMNTKYDENDKLIREVKVITLKSKLVSDFRKDFQFYKVREINNYHHAHDAYLNAVVGTALIKKYPKLESEFVYGDYKVYDVRKMIAKSEQEIGKATAKYFFYSNIMNFFKTEITLANGEIRKRPLIETNGETGEIVWDKGRDFATVRKVLSMPQVNIVKKTEVQTGGFSKESILPKRNSDKLIARKKDWDPKKYGGFDSPTVAYSVLVVAKVEKGKSKKLKSVKELLGITIMERSSFEKNPIDFLEAKGYKEVKKDLIIKLPKYSLFELENGRKRMLASAGELQKGNELALPSKYVNFLYLASHYEKLKGSPEDNEQKQLFVEQHKHYLDEIIEQISEFSKRVILADANLDKVLSAYNKHRDKPIREQAENIIHLFTLTNLGAPAAFKYFDTTIDRKRYTSTKEVLDATLIHQSITGLYETRIDLSQLGGDGGGGGGSSEAAAKGGLLGRDLLTKLKAQIQFSTEGPQVTWEDRPAMCLVLNLEEEYRLHEKPVPPSIDPSWLQLFPMVWAEKAGMGLANQVPPVVVELKSDASPVAVRQYPMSKEAREGIRPHIQRFLDLGILVPCQSPWNTPLLPVKKPGTNDYRPVQDLREVNKRVQDIHPTVPNPYNLLSSLPPSHTWYSVLDLKDAFFCLKLHPNSQPLFAFEWRDPEKGNTGQLTWTRLPQGFKNSPTLFNEALHRDLASFRALNPQVVMLQYVDDLLVAAPTYRDCKEGTRRLLQELSKLGYRVSAKKAQLCREEVTYLGYLLKGGKRWLTPARKATVMKIPTPTTPRQVREFLGKAGFCRLFIPGFASLAAPLYPLTRPKVPFTWTEAHQEAFGRIKEALLSAPALALPDLTKPFALYVDEKEGVARGVLTQTLGPWRRPVAYLSKKLDPVASGWPTCLKAIAAVALLLKDADKLTLGQNVLVIAPHNLESIVRQPPDRWMTNARMTHYQSLLLNERVSFAPPAILNPATLLPVESDDTPIHICSEILAEETGTRPDLRDQPLPGVPAWYTDGSSFIMDGRRQAGAAIVDNKRTVWASNLPEGTSAQKAELIALTQALRLAEGKSINIYTDSRYAFATAHVHGAIYKQRGWLTSAGKDIKNKEEILALLEAIHLPKRVAIIHCPGHQRGTDPVATGNRKADEAAKQAAQSTRILTETTKNAGKRTADGSEFEKRTADGSEFESPKKKAKVE

SEQ ID NO: 1727 - protein, 2121 aa, synthetic construct
MPAAKRVKLDGGDKKYSIGLDIGTNSVGWAVITDEYKVPSKKFKVLGNTDRHSIKKNLIGALLFDSGETAEATRLKRTARRRYTRRKNRICYLQEIFSNEMAKVDDSFFHRLEESFLVEEDKKHERHPIFGNIVDEVAYHEKYPTIYHLRKKLVDSTDKADLRLIYLALAHMIKFRGHFLIEGDLNPDNSDVDKLFIQLVQTYNQLFEENPINASGVDAKAILSARLSKSRRLENLIAQLPGEKKNGLFGNLIALSLGLTPNFKSNFDLAEDAKLQLSKDTYDDDLDNLLAQIGDQYADLFLAAKNLSDAILLSDILRVNTEITKAPLSASMIKRYDEHHQDLTLLKALVRQQLPEKYKEIFFDQSKNGYAGYIDGGASQEEFYKFIKPILEKMDGTEELLVKLNREDLLRKQRTFDNGSIPHQIHLGELHAILRRQEDFYPFLKDNREKIEKILTFRIPYYVGPLARGNSRFAWMTRKSEETITPWNFEEVVDKGASAQSFIERMTNFDKNLPNEKVLPKHSLLYEYFTVYNELTKVKYVTEGMRKPAFLSGEQKKAIVDLLFKTNRKVTVKQLKEDYFKKIECFDSVEISGVEDRFNASLGTYHDLLKIIKDKDFLDNEENEDILEDIVLTLTLFEDREMIEERLKTYAHLFDDKVMKQLKRRRYTGWGRLSRKLINGIRDKQSGKTILDFLKSDGFANRNFMQLIHDDSLTFKEDIQKAQVSGQGDSLHEHIANLAGSPAIKKGILQTVKVVDELVKVMGRHKPENIVIEMARENQTTQKGQKNSRERMKRIEEGIKELGSQILKEHPVENTQLQNEKLYLYYLQNGRDMYVDQELDINRLSDYDVDHIVPQSFLKDDSIDNKVLTRSDKARGKSDNVPSEEVVKKMKNYWRQLLNAKLITQRKFDNLTKAERGGLSELDKAGFIKRQLVETRQITKHVAQILDSRMNTKYDENDKLIREVKVITLKSKLVSDFRKDFQFYKVREINNYHHAHDAYLNAVVGTALIKKYPKLESEFVYGDYKVYDVRKMIAKSEQEIGKATAKYFFYSNIMNFFKTEITLANGEIRKRPLIETNGETGEIVWDKGRDFATVRKVLSMPQVNIVKKTEVQTGGFSKESILPKRNSDKLIARKKDWDPKKYGGFDSPTVAYSVLVVAKVEKGKSKKLKSVKELLGITIMERSSFEKNPIDFLEAKGYKEVKKDLIIKLPKYSLFELENGRKRMLASAGELQKGNELALPSKYVNFLYLASHYEKLKGSPEDNEQKQLFVEQHKHYLDEIIEQISEFSKRVILADANLDKVLSAYNKHRDKPIREQAENIIHLFTLTNLGAPAAFKYFDTTIDRKRYTSTKEVLDATLIHQSITGLYETRIDLSQLGGDGGPAPAPGGLLGRDLLTKLKAQIQFSTEGPQVTWEDRPAMCLVLNLEEEYRLHEKPVPPSIDPSWLQLFPMVWAEKAGMGLANQVPPVVVELKSDASPVAVRQYPMSKEAREGIRPHIQRFLDLGILVPCQSPWNTPLLPVKKPGTNDYRPVQDLREVNKRVQDIHPTVPNPYNLLSSLPPSHTWYSVLDLKDAFFCLKLHPNSQPLFAFEWRDPEKGNTGQLTWTRLPQGFKNSPTLFNEALHRDLASFRALNPQVVMLQYVDDLLVAAPTYRDCKEGTRRLLQELSKLGYRVSAKKAQLCREEVTYLGYLLKGGKRWLTPARKATVMKIPTPTTPRQVREFLGKAGFCRLFIPGFASLAAPLYPLTRPKVPFTWTEAHQEAFGRIKEALLSAPALALPDLTKPFALYVDEKEGVARGVLTQTLGPWRRPVAYLSKKLDPVASGWPTCLKAIAAVALLLKDADKLTLGQNVLVIAPHNLESIVRQPPDRWMTNARMTHYQSLLLNERVSFAPPAILNPATLLPVESDDTPIHICSEILAEETGTRPDLRDQPLPGVPAWYTDGSSFIMDGRRQAGAAIVDNKRTVWASNLPEGTSAQKAELIALTQALRLAEGKSINIYTDSRYAFATAHVHGAIYKQRGWLTSAGKDIKNKEEILALLEAIHLPKRVAIIHCPGHQRGTDPVATGNRKADEAAKQAAQSTRILTETTKNAGKRTADGSEFEKRTADGSEFESPKKKAKVE

SEQ ID NO: 1728 - protein, 2122 aa, synthetic construct
MPAAKRVKLDGGDKKYSIGLDIGTNSVGWAVITDEYKVPSKKFKVLGNTDRHSIKKNLIGALLFDSGETAEATRLKRTARRRYTRRKNRICYLQEIFSNEMAKVDDSFFHRLEESFLVEEDKKHERHPIFGNIVDEVAYHEKYPTIYHLRKKLVDSTDKADLRLIYLALAHMIKFRGHFLIEGDLNPDNSDVDKLFIQLVQTYNQLFEENPINASGVDAKAILSARLSKSRRLENLIAQLPGEKKNGLFGNLIALSLGLTPNFKSNFDLAEDAKLQLSKDTYDDDLDNLLAQIGDQYADLFLAAKNLSDAILLSDILRVNTEITKAPLSASMIKRYDEHHQDLTLLKALVRQQLPEKYKEIFFDQSKNGYAGYIDGGASQEEFYKFIKPILEKMDGTEELLVKLNREDLLRKQRTFDNGSIPHQIHLGELHAILRRQEDFYPFLKDNREKIEKILTFRIPYYVGPLARGNSRFAWMTRKSEETITPWNFEEVVDKGASAQSFIERMTNFDKNLPNEKVLPKHSLLYEYFTVYNELTKVKYVTEGMRKPAFLSGEQKKAIVDLLFKTNRKVTVKQLKEDYFKKIECFDSVEISGVEDRFNASLGTYHDLLKIIKDKDFLDNEENEDILEDIVLTLTLFEDREMIEERLKTYAHLFDDKVMKQLKRRRYTGWGRLSRKLINGIRDKQSGKTILDFLKSDGFANRNFMQLIHDDSLTFKEDIQKAQVSGQGDSLHEHIANLAGSPAIKKGILQTVKVVDELVKVMGRHKPENIVIEMARENQTTQKGQKNSRERMKRIEEGIKELGSQILKEHPVENTQLQNEKLYLYYLQNGRDMYVDQELDINRLSDYDVDHIVPQSFLKDDSIDNKVLTRSDKARGKSDNVPSEEVVKKMKNYWRQLLNAKLITQRKFDNLTKAERGGLSELDKAGFIKRQLVETRQITKHVAQILDSRMNTKYDENDKLIREVKVITLKSKLVSDFRKDFQFYKVREINNYHHAHDAYLNAVVGTALIKKYPKLESEFVYGDYKVYDVRKMIAKSEQEIGKATAKYFFYSNIMNFFKTEITLANGEIRKRPLIETNGETGEIVWDKGRDFATVRKVLSMPQVNIVKKTEVQTGGFSKESILPKRNSDKLIARKKDWDPKKYGGFDSPTVAYSVLVVAKVEKGKSKKLKSVKELLGITIMERSSFEKNPIDFLEAKGYKEVKKDLIIKLPKYSLFELENGRKRMLASAGELQKGNELALPSKYVNFLYLASHYEKLKGSPEDNEQKQLFVEQHKHYLDEIIEQISEFSKRVILADANLDKVLSAYNKHRDKPIREQAENIIHLFTLTNLGAPAAFKYFDTTIDRKRYTSTKEVLDATLIHQSITGLYETRIDLSQLGGDGGPAPGGSGGLLGRDLLTKLKAQIQFSTEGPQVTWEDRPAMCLVLNLEEEYRLHEKPVPPSIDPSWLQLFPMVWAEKAGMGLANQVPPVVVELKSDASPVAVRQYPMSKEAREGIRPHIQRFLDLGILVPCQSPWNTPLLPVKKPGTNDYRPVQDLREVNKRVQDIHPTVPNPYNLLSSLPPSHTWYSVLDLKDAFFCLKLHPNSQPLFAFEWRDPEKGNTGQLTWTRLPQGFKNSPTLFNEALHRDLASFRALNPQVVMLQYVDDLLVAAPTYRDCKEGTRRLLQELSKLGYRVSAKKAQLCREEVTYLGYLLKGGKRWLTPARKATVMKIPTPTTPRQVREFLGKAGFCRLFIPGFASLAAPLYPLTRPKVPFTWTEAHQEAFGRIKEALLSAPALALPDLTKPFALYVDEKEGVARGVLTQTLGPWRRPVAYLSKKLDPVASGWPTCLKAIAAVALLLKDADKLTLGQNVLVIAPHNLESIVRQPPDRWMTNARMTHYQSLLLNERVSFAPPAILNPATLLPVESDDTPIHICSEILAEETGTRPDLRDQPLPGVPAWYTDGSSFIMDGRRQAGAAIVDNKRTVWASNLPEGTSAQKAELIALTQALRLAEGKSINIYTDSRYAFATAHVHGAIYKQRGWLTSAGKDIKNKEEILALLEAIHLPKRVAIIHCPGHQRGTDPVATGNRKADEAAKQAAQSTRILTETTKNAGKRTADGSEFEKRTADGSEFESPKKKAKVE

SEQ ID NO: 1729 - protein, 2131 aa, synthetic construct
MPAAKRVKLDGGDKKYSIGLDIGTNSVGWAVITDEYKVPSKKFKVLGNTDRHSIKKNLIGALLFDSGETAEATRLKRTARRRYTRRKNRICYLQEIFSNEMAKVDDSFFHRLEESFLVEEDKKHERHPIFGNIVDEVAYHEKYPTIYHLRKKLVDSTDKADLRLIYLALAHMIKFRGHFLIEGDLNPDNSDVDKLFIQLVQTYNQLFEENPINASGVDAKAILSARLSKSRRLENLIAQLPGEKKNGLFGNLIALSLGLTPNFKSNFDLAEDAKLQLSKDTYDDDLDNLLAQIGDQYADLFLAAKNLSDAILLSDILRVNTEITKAPLSASMIKRYDEHHQDLTLLKALVRQQLPEKYKEIFFDQSKNGYAGYIDGGASQEEFYKFIKPILEKMDGTEELLVKLNREDLLRKQRTFDNGSIPHQIHLGELHAILRRQEDFYPFLKDNREKIEKILTFRIPYYVGPLARGNSRFAWMTRKSEETITPWNFEEVVDKGASAQSFIERMTNFDKNLPNEKVLPKHSLLYEYFTVYNELTKVKYVTEGMRKPAFLSGEQKKAIVDLLFKTNRKVTVKQLKEDYFKKIECFDSVEISGVEDRFNASLGTYHDLLKIIKDKDFLDNEENEDILEDIVLTLTLFEDREMIEERLKTYAHLFDDKVMKQLKRRRYTGWGRLSRKLINGIRDKQSGKTILDFLKSDGFANRNFMQLIHDDSLTFKEDIQKAQVSGQGDSLHEHIANLAGSPAIKKGILQTVKVVDELVKVMGRHKPENIVIEMARENQTTQKGQKNSRERMKRIEEGIKELGSQILKEHPVENTQLQNEKLYLYYLQNGRDMYVDQELDINRLSDYDVDHIVPQSFLKDDSIDNKVLTRSDKARGKSDNVPSEEVVKKMKNYWRQLLNAKLITQRKFDNLTKAERGGLSELDKAGFIKRQLVETRQITKHVAQILDSRMNTKYDENDKLIREVKVITLKSKLVSDFRKDFQFYKVREINNYHHAHDAYLNAVVGTALIKKYPKLESEFVYGDYKVYDVRKMIAKSEQEIGKATAKYFFYSNIMNFFKTEITLANGEIRKRPLIETNGETGEIVWDKGRDFATVRKVLSMPQVNIVKKTEVQTGGFSKESILPKRNSDKLIARKKDWDPKKYGGFDSPTVAYSVLVVAKVEKGKSKKLKSVKELLGITIMERSSFEKNPIDFLEAKGYKEVKKDLIIKLPKYSLFELENGRKRMLASAGELQKGNELALPSKYVNFLYLASHYEKLKGSPEDNEQKQLFVEQHKHYLDEIIEQISEFSKRVILADANLDKVLSAYNKHRDKPIREQAENIIHLFTLTNLGAPAAFKYFDTTIDRKRYTSTKEVLDATLIHQSITGLYETRIDLSQLGGDGGGGGGSGGGGSGGGGSGGLLGRDLLTKLKAQIQFSTEGPQVTWEDRPAMCLVLNLEEEYRLHEKPVPPSIDPSWLQLFPMVWAEKAGMGLANQVPPVVVELKSDASPVAVRQYPMSKEAREGIRPHIQRFLDLGILVPCQSPWNTPLLPVKKPGTNDYRPVQDLREVNKRVQDIHPTVPNPYNLLSSLPPSHTWYSVLDLKDAFFCLKLHPNSQPLFAFEWRDPEKGNTGQLTWTRLPQGFKNSPTLFNEALHRDLASFRALNPQVVMLQYVDDLLVAAPTYRDCKEGTRRLLQELSKLGYRVSAKKAQLCREEVTYLGYLLKGGKRWLTPARKATVMKIPTPTTPRQVREFLGKAGFCRLFIPGFASLAAPLYPLTRPKVPFTWTEAHQEAFGRIKEALLSAPALALPDLTKPFALYVDEKEGVARGVLTQTLGPWRRPVAYLSKKLDPVASGWPTCLKAIAAVALLLKDADKLTLGQNVLVIAPHNLESIVRQPPDRWMTNARMTHYQSLLLNERVSFAPPAILNPATLLPVESDDTPIHICSEILAEETGTRPDLRDQPLPGVPAWYTDGSSFIMDGRRQAGAAIVDNKRTVWASNLPEGTSAQKAELIALTQALRLAEGKSINIYTDSRYAFATAHVHGAIYKQRGWLTSAGKDIKNKEEILALLEAIHLPKRVAIIHCPGHQRGTDPVATGNRKADEAAKQAAQSTRILTETTKNAGKRTADGSEFEKRTADGSEFESPKKKAKVE

SEQ ID NO: 1730 - protein, 2125 aa, synthetic construct
MPAAKRVKLDGGDKKYSIGLDIGTNSVGWAVITDEYKVPSKKFKVLGNTDRHSIKKNLIGALLFDSGETAEATRLKRTARRRYTRRKNRICYLQEIFSNEMAKVDDSFFHRLEESFLVEEDKKHERHPIFGNIVDEVAYHEKYPTIYHLRKKLVDSTDKADLRLIYLALAHMIKFRGHFLIEGDLNPDNSDVDKLFIQLVQTYNQLFEENPINASGVDAKAILSARLSKSRRLENLIAQLPGEKKNGLFGNLIALSLGLTPNFKSNFDLAEDAKLQLSKDTYDDDLDNLLAQIGDQYADLFLAAKNLSDAILLSDILRVNTEITKAPLSASMIKRYDEHHQDLTLLKALVRQQLPEKYKEIFFDQSKNGYAGYIDGGASQEEFYKFIKPILEKMDGTEELLVKLNREDLLRKQRTFDNGSIPHQIHLGELHAILRRQEDFYPFLKDNREKIEKILTFRIPYYVGPLARGNSRFAWMTRKSEETITPWNFEEVVDKGASAQSFIERMTNFDKNLPNEKVLPKHSLLYEYFTVYNELTKVKYVTEGMRKPAFLSGEQKKAIVDLLFKTNRKVTVKQLKEDYFKKIECFDSVEISGVEDRFNASLGTYHDLLKIIKDKDFLDNEENEDILEDIVLTLTLFEDREMIEERLKTYAHLFDDKVMKQLKRRRYTGWGRLSRKLINGIRDKQSGKTILDFLKSDGFANRNFMQLIHDDSLTFKEDIQKAQVSGQGDSLHEHIANLAGSPAIKKGILQTVKVVDELVKVMGRHKPENIVIEMARENQTTQKGQKNSRERMKRIEEGIKELGSQILKEHPVENTQLQNEKLYLYYLQNGRDMYVDQELDINRLSDYDVDHIVPQSFLKDDSIDNKVLTRSDKARGKSDNVPSEEVVKKMKNYWRQLLNAKLITQRKFDNLTKAERGGLSELDKAGFIKRQLVETRQITKHVAQILDSRMNTKYDENDKLIREVKVITLKSKLVSDFRKDFQFYKVREINNYHHAHDAYLNAVVGTALIKKYPKLESEFVYGDYKVYDVRKMIAKSEQEIGKATAKYFFYSNIMNFFKTEITLANGEIRKRPLIETNGETGEIVWDKGRDFATVRKVLSMPQVNIVKKTEVQTGGFSKESILPKRNSDKLIARKKDWDPKKYGGFDSPTVAYSVLVVAKVEKGKSKKLKSVKELLGITIMERSSFEKNPIDFLEAKGYKEVKKDLIIKLPKYSLFELENGRKRMLASAGELQKGNELALPSKYVNFLYLASHYEKLKGSPEDNEQKQLFVEQHKHYLDEIIEQISEFSKRVILADANLDKVLSAYNKHRDKPIREQAENIIHLFTLTNLGAPAAFKYFDTTIDRKRYTSTKEVLDATLIHQSITGLYETRIDLSQLGGDGGGGSPAPGGGGGLLGRDLLTKLKAQIQFSTEGPQVTWEDRPAMCLVLNLEEEYRLHEKPVPPSIDPSWLQLFPMVWAEKAGMGLANQVPPVVVELKSDASPVAVRQYPMSKEAREGIRPHIQRFLDLGILVPCQSPWNTPLLPVKKPGTNDYRPVQDLREVNKRVQDIHPTVPNPYNLLSSLPPSHTWYSVLDLKDAFFCLKLHPNSQPLFAFEWRDPEKGNTGQLTWTRLPQGFKNSPTLFNEALHRDLASFRALNPQVVMLQYVDDLLVAAPTYRDCKEGTRRLLQELSKLGYRVSAKKAQLCREEVTYLGYLLKGGKRWLTPARKATVMKIPTPTTPRQVREFLGKAGFCRLFIPGFASLAAPLYPLTRPKVPFTWTEAHQEAFGRIKEALLSAPALALPDLTKPFALYVDEKEGVARGVLTQTLGPWRRPVAYLSKKLDPVASGWPTCLKAIAAVALLLKDADKLTLGQNVLVIAPHNLESIVRQPPDRWMTNARMTHYQSLLLNERVSFAPPAILNPATLLPVESDDTPIHICSEILAEETGTRPDLRDQPLPGVPAWYTDGSSFIMDGRRQAGAAIVDNKRTVWASNLPEGTSAQKAELIALTQALRLAEGKSINIYTDSRYAFATAHVHGAIYKQRGWLTSAGKDIKNKEEILALLEAIHLPKRVAIIHCPGHQRGTDPVATGNRKADEAAKQAAQSTRILTETTKNAGKRTADGSEFEKRTADGSEFESPKKKAKVE

SEQ ID NO: 1731 - protein, 2122 aa, synthetic construct
MPAAKRVKLDGGDKKYSIGLDIGTNSVGWAVITDEYKVPSKKFKVLGNTDRHSIKKNLIGALLFDSGETAEATRLKRTARRRYTRRKNRICYLQEIFSNEMAKVDDSFFHRLEESFLVEEDKKHERHPIFGNIVDEVAYHEKYPTIYHLRKKLVDSTDKADLRLIYLALAHMIKFRGHFLIEGDLNPDNSDVDKLFIQLVQTYNQLFEENPINASGVDAKAILSARLSKSRRLENLIAQLPGEKKNGLFGNLIALSLGLTPNFKSNFDLAEDAKLQLSKDTYDDDLDNLLAQIGDQYADLFLAAKNLSDAILLSDILRVNTEITKAPLSASMIKRYDEHHQDLTLLKALVRQQLPEKYKEIFFDQSKNGYAGYIDGGASQEEFYKFIKPILEKMDGTEELLVKLNREDLLRKQRTFDNGSIPHQIHLGELHAILRRQEDFYPFLKDNREKIEKILTFRIPYYVGPLARGNSRFAWMTRKSEETITPWNFEEVVDKGASAQSFIERMTNFDKNLPNEKVLPKHSLLYEYFTVYNELTKVKYVTEGMRKPAFLSGEQKKAIVDLLFKTNRKVTVKQLKEDYFKKIECFDSVEISGVEDRFNASLGTYHDLLKIIKDKDFLDNEENEDILEDIVLTLTLFEDREMIEERLKTYAHLFDDKVMKQLKRRRYTGWGRLSRKLINGIRDKQSGKTILDFLKSDGFANRNFMQLIHDDSLTFKEDIQKAQVSGQGDSLHEHIANLAGSPAIKKGILQTVKVVDELVKVMGRHKPENIVIEMARENQTTQKGQKNSRERMKRIEEGIKELGSQILKEHPVENTQLQNEKLYLYYLQNGRDMYVDQELDINRLSDYDVDHIVPQSFLKDDSIDNKVLTRSDKARGKSDNVPSEEVVKKMKNYWRQLLNAKLITQRKFDNLTKAERGGLSELDKAGFIKRQLVETRQITKHVAQILDSRMNTKYDENDKLIREVKVITLKSKLVSDFRKDFQFYKVREINNYHHAHDAYLNAVVGTALIKKYPKLESEFVYGDYKVYDVRKMIAKSEQEIGKATAKYFFYSNIMNFFKTEITLANGEIRKRPLIETNGETGEIVWDKGRDFATVRKVLSMPQVNIVKKTEVQTGGFSKESILPKRNSDKLIARKKDWDPKKYGGFDSPTVAYSVLVVAKVEKGKSKKLKSVKELLGITIMERSSFEKNPIDFLEAKGYKEVKKDLIIKLPKYSLFELENGRKRMLASAGELQKGNELALPSKYVNFLYLASHYEKLKGSPEDNEQKQLFVEQHKHYLDEIIEQISEFSKRVILADANLDKVLSAYNKHRDKPIREQAENIIHLFTLTNLGAPAAFKYFDTTIDRKRYTSTKEVLDATLIHQSITGLYETRIDLSQLGGDGGGSSPAPGGLLGRDLLTKLKAQIQFSTEGPQVTWEDRPAMCLVLNLEEEYRLHEKPVPPSIDPSWLQLFPMVWAEKAGMGLANQVPPVVVELKSDASPVAVRQYPMSKEAREGIRPHIQRFLDLGILVPCQSPWNTPLLPVKKPGTNDYRPVQDLREVNKRVQDIHPTVPNPYNLLSSLPPSHTWYSVLDLKDAFFCLKLHPNSQPLFAFEWRDPEKGNTGQLTWTRLPQGFKNSPTLFNEALHRDLASFRALNPQVVMLQYVDDLLVAAPTYRDCKEGTRRLLQELSKLGYRVSAKKAQLCREEVTYLGYLLKGGKRWLTPARKATVMKIPTPTTPRQVREFLGKAGFCRLFIPGFASLAAPLYPLTRPKVPFTWTEAHQEAFGRIKEALLSAPALALPDLTKPFALYVDEKEGVARGVLTQTLGPWRRPVAYLSKKLDPVASGWPTCLKAIAAVALLLKDADKLTLGQNVLVIAPHNLESIVRQPPDRWMTNARMTHYQSLLLNERVSFAPPAILNPATLLPVESDDTPIHICSEILAEETGTRPDLRDQPLPGVPAWYTDGSSFIMDGRRQAGAAIVDNKRTVWASNLPEGTSAQKAELIALTQALRLAEGKSINIYTDSRYAFATAHVHGAIYKQRGWLTSAGKDIKNKEEILALLEAIHLPKRVAIIHCPGHQRGTDPVATGNRKADEAAKQAAQSTRILTETTKNAGKRTADGSEFEKRTADGSEFESPKKKAKVE

SEQ ID NO: 1732 - protein, 2125 aa, synthetic construct
MPAAKRVKLDGGDKKYSIGLDIGTNSVGWAVITDEYKVPSKKFKVLGNTDRHSIKKNLIGALLFDSGETAEATRLKRTARRRYTRRKNRICYLQEIFSNEMAKVDDSFFHRLEESFLVEEDKKHERHPIFGNIVDEVAYHEKYPTIYHLRKKLVDSTDKADLRLIYLALAHMIKFRGHFLIEGDLNPDNSDVDKLFIQLVQTYNQLFEENPINASGVDAKAILSARLSKSRRLENLIAQLPGEKKNGLFGNLIALSLGLTPNFKSNFDLAEDAKLQLSKDTYDDDLDNLLAQIGDQYADLFLAAKNLSDAILLSDILRVNTEITKAPLSASMIKRYDEHHQDLTLLKALVRQQLPEKYKEIFFDQSKNGYAGYIDGGASQEEFYKFIKPILEKMDGTEELLVKLNREDLLRKQRTFDNGSIPHQIHLGELHAILRRQEDFYPFLKDNREKIEKILTFRIPYYVGPLARGNSRFAWMTRKSEETITPWNFEEVVDKGASAQSFIERMTNFDKNLPNEKVLPKHSLLYEYFTVYNELTKVKYVTEGMRKPAFLSGEQKKAIVDLLFKTNRKVTVKQLKEDYFKKIECFDSVEISGVEDRFNASLGTYHDLLKIIKDKDFLDNEENEDILEDIVLTLTLFEDREMIEERLKTYAHLFDDKVMKQLKRRRYTGWGRLSRKLINGIRDKQSGKTILDFLKSDGFANRNFMQLIHDDSLTFKEDIQKAQVSGQGDSLHEHIANLAGSPAIKKGILQTVKVVDELVKVMGRHKPENIVIEMARENQTTQKGQKNSRERMKRIEEGIKELGSQILKEHPVENTQLQNEKLYLYYLQNGRDMYVDQELDINRLSDYDVDHIVPQSFLKDDSIDNKVLTRSDKARGKSDNVPSEEVVKKMKNYWRQLLNAKLITQRKFDNLTKAERGGLSELDKAGFIKRQLVETRQITKHVAQILDSRMNTKYDENDKLIREVKVITLKSKLVSDFRKDFQFYKVREINNYHHAHDAYLNAVVGTALIKKYPKLESEFVYGDYKVYDVRKMIAKSEQEIGKATAKYFFYSNIMNFFKTEITLANGEIRKRPLIETNGETGEIVWDKGRDFATVRKVLSMPQVNIVKKTEVQTGGFSKESILPKRNSDKLIARKKDWDPKKYGGFDSPTVAYSVLVVAKVEKGKSKKLKSVKELLGITIMERSSFEKNPIDFLEAKGYKEVKKDLIIKLPKYSLFELENGRKRMLASAGELQKGNELALPSKYVNFLYLASHYEKLKGSPEDNEQKQLFVEQHKHYLDEIIEQISEFSKRVILADANLDKVLSAYNKHRDKPIREQAENIIHLFTLTNLGAPAAFKYFDTTIDRKRYTSTKEVLDATLIHQSITGLYETRIDLSQLGGDGGGGSPAPGSSGGLLGRDLLTKLKAQIQFSTEGPQVTWEDRPAMCLVLNLEEEYRLHEKPVPPSIDPSWLQLFPMVWAEKAGMGLANQVPPVVVELKSDASPVAVRQYPMSKEAREGIRPHIQRFLDLGILVPCQSPWNTPLLPVKKPGTNDYRPVQDLREVNKRVQDIHPTVPNPYNLLSSLPPSHTWYSVLDLKDAFFCLKLHPNSQPLFAFEWRDPEKGNTGQLTWTRLPQGFKNSPTLFNEALHRDLASFRALNPQVVMLQYVDDLLVAAPTYRDCKEGTRRLLQELSKLGYRVSAKKAQLCREEVTYLGYLLKGGKRWLTPARKATVMKIPTPTTPRQVREFLGKAGFCRLFIPGFASLAAPLYPLTRPKVPFTWTEAHQEAFGRIKEALLSAPALALPDLTKPFALYVDEKEGVARGVLTQTLGPWRRPVAYLSKKLDPVASGWPTCLKAIAAVALLLKDADKLTLGQNVLVIAPHNLESIVRQPPDRWMTNARMTHYQSLLLNERVSFAPPAILNPATLLPVESDDTPIHICSEILAEETGTRPDLRDQPLPGVPAWYTDGSSFIMDGRRQAGAAIVDNKRTVWASNLPEGTSAQKAELIALTQALRLAEGKSINIYTDSRYAFATAHVHGAIYKQRGWLTSAGKDIKNKEEILALLEAIHLPKRVAIIHCPGHQRGTDPVATGNRKADEAAKQAAQSTRILTETTKNAGKRTADGSEFEKRTADGSEFESPKKKAKVE

SEQ ID NO: 1733 - protein, 2122 aa, synthetic construct
MPAAKRVKLDGGDKKYSIGLDIGTNSVGWAVITDEYKVPSKKFKVLGNTDRHSIKKNLIGALLFDSGETAEATRLKRTARRRYTRRKNRICYLQEIFSNEMAKVDDSFFHRLEESFLVEEDKKHERHPIFGNIVDEVAYHEKYPTIYHLRKKLVDSTDKADLRLIYLALAHMIKFRGHFLIEGDLNPDNSDVDKLFIQLVQTYNQLFEENPINASGVDAKAILSARLSKSRRLENLIAQLPGEKKNGLFGNLIALSLGLTPNFKSNFDLAEDAKLQLSKDTYDDDLDNLLAQIGDQYADLFLAAKNLSDAILLSDILRVNTEITKAPLSASMIKRYDEHHQDLTLLKALVRQQLPEKYKEIFFDQSKNGYAGYIDGGASQEEFYKFIKPILEKMDGTEELLVKLNREDLLRKQRTFDNGSIPHQIHLGELHAILRRQEDFYPFLKDNREKIEKILTFRIPYYVGPLARGNSRFAWMTRKSEETITPWNFEEVVDKGASAQSFIERMTNFDKNLPNEKVLPKHSLLYEYFTVYNELTKVKYVTEGMRKPAFLSGEQKKAIVDLLFKTNRKVTVKQLKEDYFKKIECFDSVEISGVEDRFNASLGTYHDLLKIIKDKDFLDNEENEDILEDIVLTLTLFEDREMIEERLKTYAHLFDDKVMKQLKRRRYTGWGRLSRKLINGIRDKQSGKTILDFLKSDGFANRNFMQLIHDDSLTFKEDIQKAQVSGQGDSLHEHIANLAGSPAIKKGILQTVKVVDELVKVMGRHKPENIVIEMARENQTTQKGQKNSRERMKRIEEGIKELGSQILKEHPVENTQLQNEKLYLYYLQNGRDMYVDQELDINRLSDYDVDHIVPQSFLKDDSIDNKVLTRSDKARGKSDNVPSEEVVKKMKNYWRQLLNAKLITQRKFDNLTKAERGGLSELDKAGFIKRQLVETRQITKHVAQILDSRMNTKYDENDKLIREVKVITLKSKLVSDFRKDFQFYKVREINNYHHAHDAYLNAVVGTALIKKYPKLESEFVYGDYKVYDVRKMIAKSEQEIGKATAKYFFYSNIMNFFKTEITLANGEIRKRPLIETNGETGEIVWDKGRDFATVRKVLSMPQVNIVKKTEVQTGGFSKESILPKRNSDKLIARKKDWDPKKYGGFDSPTVAYSVLVVAKVEKGKSKKLKSVKELLGITIMERSSFEKNPIDFLEAKGYKEVKKDLIIKLPKYSLFELENGRKRMLASAGELQKGNELALPSKYVNFLYLASHYEKLKGSPEDNEQKQLFVEQHKHYLDEIIEQISEFSKRVILADANLDKVLSAYNKHRDKPIREQAENIIHLFTLTNLGAPAAFKYFDTTIDRKRYTSTKEVLDATLIHQSITGLYETRIDLSQLGGDGGGGSGSSGGLLGRDLLTKLKAQIQFSTEGPQVTWEDRPAMCLVLNLEEEYRLHEKPVPPSIDPSWLQLFPMVWAEKAGMGLANQVPPVVVELKSDASPVAVRQYPMSKEAREGIRPHIQRFLDLGILVPCQSPWNTPLLPVKKPGTNDYRPVQDLREVNKRVQDIHPTVPNPYNLLSSLPPSHTWYSVLDLKDAFFCLKLHPNSQPLFAFEWRDPEKGNTGQLTWTRLPQGFKNSPTLFNEALHRDLASFRALNPQVVMLQYVDDLLVAAPTYRDCKEGTRRLLQELSKLGYRVSAKKAQLCREEVTYLGYLLKGGKRWLTPARKATVMKIPTPTTPRQVREFLGKAGFCRLFIPGFASLAAPLYPLTRPKVPFTWTEAHQEAFGRIKEALLSAPALALPDLTKPFALYVDEKEGVARGVLTQTLGPWRRPVAYLSKKLDPVASGWPTCLKAIAAVALLLKDADKLTLGQNVLVIAPHNLESIVRQPPDRWMTNARMTHYQSLLLNERVSFAPPAILNPATLLPVESDDTPIHICSEILAEETGTRPDLRDQPLPGVPAWYTDGSSFIMDGRRQAGAAIVDNKRTVWASNLPEGTSAQKAELIALTQALRLAEGKSINIYTDSRYAFATAHVHGAIYKQRGWLTSAGKDIKNKEEILALLEAIHLPKRVAIIHCPGHQRGTDPVATGNRKADEAAKQAAQSTRILTETTKNAGKRTADGSEFEKRTADGSEFESPKKKAKVE

SEQ ID NO: 1734 - protein, 2125 aa, synthetic construct
MPAAKRVKLDGGDKKYSIGLDIGTNSVGWAVITDEYKVPSKKFKVLGNTDRHSIKKNLIGALLFDSGETAEATRLKRTARRRYTRRKNRICYLQEIFSNEMAKVDDSFFHRLEESFLVEEDKKHERHPIFGNIVDEVAYHEKYPTIYHLRKKLVDSTDKADLRLIYLALAHMIKFRGHFLIEGDLNPDNSDVDKLFIQLVQTYNQLFEENPINASGVDAKAILSARLSKSRRLENLIAQLPGEKKNGLFGNLIALSLGLTPNFKSNFDLAEDAKLQLSKDTYDDDLDNLLAQIGDQYADLFLAAKNLSDAILLSDILRVNTEITKAPLSASMIKRYDEHHQDLTLLKALVRQQLPEKYKEIFFDQSKNGYAGYIDGGASQEEFYKFIKPILEKMDGTEELLVKLNREDLLRKQRTFDNGSIPHQIHLGELHAILRRQEDFYPFLKDNREKIEKILTFRIPYYVGPLARGNSRFAWMTRKSEETITPWNFEEVVDKGASAQSFIERMTNFDKNLPNEKVLPKHSLLYEYFTVYNELTKVKYVTEGMRKPAFLSGEQKKAIVDLLFKTNRKVTVKQLKEDYFKKIECFDSVEISGVEDRFNASLGTYHDLLKIIKDKDFLDNEENEDILEDIVLTLTLFEDREMIEERLKTYAHLFDDKVMKQLKRRRYTGWGRLSRKLINGIRDKQSGKTILDFLKSDGFANRNFMQLIHDDSLTFKEDIQKAQVSGQGDSLHEHIANLAGSPAIKKGILQTVKVVDELVKVMGRHKPENIVIEMARENQTTQKGQKNSRERMKRIEEGIKELGSQILKEHPVENTQLQNEKLYLYYLQNGRDMYVDQELDINRLSDYDVDHIVPQSFLKDDSIDNKVLTRSDKARGKSDNVPSEEVVKKMKNYWRQLLNAKLITQRKFDNLTKAERGGLSELDKAGFIKRQLVETRQITKHVAQILDSRMNTKYDENDKLIREVKVITLKSKLVSDFRKDFQFYKVREINNYHHAHDAYLNAVVGTALIKKYPKLESEFVYGDYKVYDVRKMIAKSEQEIGKATAKYFFYSNIMNFFKTEITLANGEIRKRPLIETNGETGEIVWDKGRDFATVRKVLSMPQVNIVKKTEVQTGGFSKESILPKRNSDKLIARKKDWDPKKYGGFDSPTVAYSVLVVAKVEKGKSKKLKSVKELLGITIMERSSFEKNPIDFLEAKGYKEVKKDLIIKLPKYSLFELENGRKRMLASAGELQKGNELALPSKYVNFLYLASHYEKLKGSPEDNEQKQLFVEQHKHYLDEIIEQISEFSKRVILADANLDKVLSAYNKHRDKPIREQAENIIHLFTLTNLGAPAAFKYFDTTIDRKRYTSTKEVLDATLIHQSITGLYETRIDLSQLGGDGGGGGGSSPAPGGLLGRDLLTKLKAQIQFSTEGPQVTWEDRPAMCLVLNLEEEYRLHEKPVPPSIDPSWLQLFPMVWAEKAGMGLANQVPPVVVELKSDASPVAVRQYPMSKEAREGIRPHIQRFLDLGILVPCQSPWNTPLLPVKKPGTNDYRPVQDLREVNKRVQDIHPTVPNPYNLLSSLPPSHTWYSVLDLKDAFFCLKLHPNSQPLFAFEWRDPEKGNTGQLTWTRLPQGFKNSPTLFNEALHRDLASFRALNPQVVMLQYVDDLLVAAPTYRDCKEGTRRLLQELSKLGYRVSAKKAQLCREEVTYLGYLLKGGKRWLTPARKATVMKIPTPTTPRQVREFLGKAGFCRLFIPGFASLAAPLYPLTRPKVPFTWTEAHQEAFGRIKEALLSAPALALPDLTKPFALYVDEKEGVARGVLTQTLGPWRRPVAYLSKKLDPVASGWPTCLKAIAAVALLLKDADKLTLGQNVLVIAPHNLESIVRQPPDRWMTNARMTHYQSLLLNERVSFAPPAILNPATLLPVESDDTPIHICSEILAEETGTRPDLRDQPLPGVPAWYTDGSSFIMDGRRQAGAAIVDNKRTVWASNLPEGTSAQKAELIALTQALRLAEGKSINIYTDSRYAFATAHVHGAIYKQRGWLTSAGKDIKNKEEILALLEAIHLPKRVAIIHCPGHQRGTDPVATGNRKADEAAKQAAQSTRILTETTKNAGKRTADGSEFEKRTADGSEFESPKKKAKVE

SEQ ID NO: 1735 - protein, 2125 aa, synthetic construct
MPAAKRVKLDGGDKKYSIGLDIGTNSVGWAVITDEYKVPSKKFKVLGNTDRHSIKKNLIGALLFDSGETAEATRLKRTARRRYTRRKNRICYLQEIFSNEMAKVDDSFFHRLEESFLVEEDKKHERHPIFGNIVDEVAYHEKYPTIYHLRKKLVDSTDKADLRLIYLALAHMIKFRGHFLIEGDLNPDNSDVDKLFIQLVQTYNQLFEENPINASGVDAKAILSARLSKSRRLENLIAQLPGEKKNGLFGNLIALSLGLTPNFKSNFDLAEDAKLQLSKDTYDDDLDNLLAQIGDQYADLFLAAKNLSDAILLSDILRVNTEITKAPLSASMIKRYDEHHQDLTLLKALVRQQLPEKYKEIFFDQSKNGYAGYIDGGASQEEFYKFIKPILEKMDGTEELLVKLNREDLLRKQRTFDNGSIPHQIHLGELHAILRRQEDFYPFLKDNREKIEKILTFRIPYYVGPLARGNSRFAWMTRKSEETITPWNFEEVVDKGASAQSFIERMTNFDKNLPNEKVLPKHSLLYEYFTVYNELTKVKYVTEGMRKPAFLSGEQKKAIVDLLFKTNRKVTVKQLKEDYFKKIECFDSVEISGVEDRFNASLGTYHDLLKIIKDKDFLDNEENEDILEDIVLTLTLFEDREMIEERLKTYAHLFDDKVMKQLKRRRYTGWGRLSRKLINGIRDKQSGKTILDFLKSDGFANRNFMQLIHDDSLTFKEDIQKAQVSGQGDSLHEHIANLAGSPAIKKGILQTVKVVDELVKVMGRHKPENIVIEMARENQTTQKGQKNSRERMKRIEEGIKELGSQILKEHPVENTQLQNEKLYLYYLQNGRDMYVDQELDINRLSDYDVDHIVPQSFLKDDSIDNKVLTRSDKARGKSDNVPSEEVVKKMKNYWRQLLNAKLITQRKFDNLTKAERGGLSELDKAGFIKRQLVETRQITKHVAQILDSRMNTKYDENDKLIREVKVITLKSKLVSDFRKDFQFYKVREINNYHHAHDAYLNAVVGTALIKKYPKLESEFVYGDYKVYDVRKMIAKSEQEIGKATAKYFFYSNIMNFFKTEITLANGEIRKRPLIETNGETGEIVWDKGRDFATVRKVLSMPQVNIVKKTEVQTGGFSKESILPKRNSDKLIARKKDWDPKKYGGFDSPTVAYSVLVVAKVEKGKSKKLKSVKELLGITIMERSSFEKNPIDFLEAKGYKEVKKDLIIKLPKYSLFELENGRKRMLASAGELQKGNELALPSKYVNFLYLASHYEKLKGSPEDNEQKQLFVEQHKHYLDEIIEQISEFSKRVILADANLDKVLSAYNKHRDKPIREQAENIIHLFTLTNLGAPAAFKYFDTTIDRKRYTSTKEVLDATLIHQSITGLYETRIDLSQLGGDGGGSSGGSPAPGGLLGRDLLTKLKAQIQFSTEGPQVTWEDRPAMCLVLNLEEEYRLHEKPVPPSIDPSWLQLFPMVWAEKAGMGLANQVPPVVVELKSDASPVAVRQYPMSKEAREGIRPHIQRFLDLGILVPCQSPWNTPLLPVKKPGTNDYRPVQDLREVNKRVQDIHPTVPNPYNLLSSLPPSHTWYSVLDLKDAFFCLKLHPNSQPLFAFEWRDPEKGNTGQLTWTRLPQGFKNSPTLFNEALHRDLASFRALNPQVVMLQYVDDLLVAAPTYRDCKEGTRRLLQELSKLGYRVSAKKAQLCREEVTYLGYLLKGGKRWLTPARKATVMKIPTPTTPRQVREFLGKAGFCRLFIPGFASLAAPLYPLTRPKVPFTWTEAHQEAFGRIKEALLSAPALALPDLTKPFALYVDEKEGVARGVLTQTLGPWRRPVAYLSKKLDPVASGWPTCLKAIAAVALLLKDADKLTLGQNVLVIAPHNLESIVRQPPDRWMTNARMTHYQSLLLNERVSFAPPAILNPATLLPVESDDTPIHICSEILAEETGTRPDLRDQPLPGVPAWYTDGSSFIMDGRRQAGAAIVDNKRTVWASNLPEGTSAQKAELIALTQALRLAEGKSINIYTDSRYAFATAHVHGAIYKQRGWLTSAGKDIKNKEEILALLEAIHLPKRVAIIHCPGHQRGTDPVATGNRKADEAAKQAAQSTRILTETTKNAGKRTADGSEFEKRTADGSEFESPKKKAKVE

SEQ ID NO: 1736 - protein, 2127 aa, synthetic construct
MPAAKRVKLDGGDKKYSIGLDIGTNSVGWAVITDEYKVPSKKFKVLGNTDRHSIKKNLIGALLFDSGETAEATRLKRTARRRYTRRKNRICYLQEIFSNEMAKVDDSFFHRLEESFLVEEDKKHERHPIFGNIVDEVAYHEKYPTIYHLRKKLVDSTDKADLRLIYLALAHMIKFRGHFLIEGDLNPDNSDVDKLFIQLVQTYNQLFEENPINASGVDAKAILSARLSKSRRLENLIAQLPGEKKNGLFGNLIALSLGLTPNFKSNFDLAEDAKLQLSKDTYDDDLDNLLAQIGDQYADLFLAAKNLSDAILLSDILRVNTEITKAPLSASMIKRYDEHHQDLTLLKALVRQQLPEKYKEIFFDQSKNGYAGYIDGGASQEEFYKFIKPILEKMDGTEELLVKLNREDLLRKQRTFDNGSIPHQIHLGELHAILRRQEDFYPFLKDNREKIEKILTFRIPYYVGPLARGNSRFAWMTRKSEETITPWNFEEVVDKGASAQSFIERMTNFDKNLPNEKVLPKHSLLYEYFTVYNELTKVKYVTEGMRKPAFLSGEQKKAIVDLLFKTNRKVTVKQLKEDYFKKIECFDSVEISGVEDRFNASLGTYHDLLKIIKDKDFLDNEENEDILEDIVLTLTLFEDREMIEERLKTYAHLFDDKVMKQLKRRRYTGWGRLSRKLINGIRDKQSGKTILDFLKSDGFANRNFMQLIHDDSLTFKEDIQKAQVSGQGDSLHEHIANLAGSPAIKKGILQTVKVVDELVKVMGRHKPENIVIEMARENQTTQKGQKNSRERMKRIEEGIKELGSQILKEHPVENTQLQNEKLYLYYLQNGRDMYVDQELDINRLSDYDVDHIVPQSFLKDDSIDNKVLTRSDKARGKSDNVPSEEVVKKMKNYWRQLLNAKLITQRKFDNLTKAERGGLSELDKAGFIKRQLVETRQITKHVAQILDSRMNTKYDENDKLIREVKVITLKSKLVSDFRKDFQFYKVREINNYHHAHDAYLNAVVGTALIKKYPKLESEFVYGDYKVYDVRKMIAKSEQEIGKATAKYFFYSNIMNFFKTEITLANGEIRKRPLIETNGETGEIVWDKGRDFATVRKVLSMPQVNIVKKTEVQTGGFSKESILPKRNSDKLIARKKDWDPKKYGGFDSPTVAYSVLVVAKVEKGKSKKLKSVKELLGITIMERSSFEKNPIDFLEAKGYKEVKKDLIIKLPKYSLFELENGRKRMLASAGELQKGNELALPSKYVNFLYLASHYEKLKGSPEDNEQKQLFVEQHKHYLDEIIEQISEFSKRVILADANLDKVLSAYNKHRDKPIREQAENIIHLFTLTNLGAPAAFKYFDTTIDRKRYTSTKEVLDATLIHQSITGLYETRIDLSQLGGDGGEAAAKGGGGGSGGLLGRDLLTKLKAQIQFSTEGPQVTWEDRPAMCLVLNLEEEYRLHEKPVPPSIDPSWLQLFPMVWAEKAGMGLANQVPPVVVELKSDASPVAVRQYPMSKEAREGIRPHIQRFLDLGILVPCQSPWNTPLLPVKKPGTNDYRPVQDLREVNKRVQDIHPTVPNPYNLLSSLPPSHTWYSVLDLKDAFFCLKLHPNSQPLFAFEWRDPEKGNTGQLTWTRLPQGFKNSPTLFNEALHRDLASFRALNPQVVMLQYVDDLLVAAPTYRDCKEGTRRLLQELSKLGYRVSAKKAQLCREEVTYLGYLLKGGKRWLTPARKATVMKIPTPTTPRQVREFLGKAGFCRLFIPGFASLAAPLYPLTRPKVPFTWTEAHQEAFGRIKEALLSAPALALPDLTKPFALYVDEKEGVARGVLTQTLGPWRRPVAYLSKKLDPVASGWPTCLKAIAAVALLLKDADKLTLGQNVLVIAPHNLESIVRQPPDRWMTNARMTHYQSLLLNERVSFAPPAILNPATLLPVESDDTPIHICSEILAEETGTRPDLRDQPLPGVPAWYTDGSSFIMDGRRQAGAAIVDNKRTVWASNLPEGTSAQKAELIALTQALRLAEGKSINIYTDSRYAFATAHVHGAIYKQRGWLTSAGKDIKNKEEILALLEAIHLPKRVAIIHCPGHQRGTDPVATGNRKADEAAKQAAQSTRILTETTKNAGKRTADGSEFEKRTADGSEFESPKKKAKVE

SEQ ID NO: 1737 - protein, 2127 aa, synthetic construct
MPAAKRVKLDGGDKKYSIGLDIGTNSVGWAVITDEYKVPSKKFKVLGNTDRHSIKKNLIGALLFDSGETAEATRLKRTARRRYTRRKNRICYLQEIFSNEMAKVDDSFFHRLEESFLVEEDKKHERHPIFGNIVDEVAYHEKYPTIYHLRKKLVDSTDKADLRLIYLALAHMIKFRGHFLIEGDLNPDNSDVDKLFIQLVQTYNQLFEENPINASGVDAKAILSARLSKSRRLENLIAQLPGEKKNGLFGNLIALSLGLTPNFKSNFDLAEDAKLQLSKDTYDDDLDNLLAQIGDQYADLFLAAKNLSDAILLSDILRVNTEITKAPLSASMIKRYDEHHQDLTLLKALVRQQLPEKYKEIFFDQSKNGYAGYIDGGASQEEFYKFIKPILEKMDGTEELLVKLNREDLLRKQRTFDNGSIPHQIHLGELHAILRRQEDFYPFLKDNREKIEKILTFRIPYYVGPLARGNSRFAWMTRKSEETITPWNFEEVVDKGASAQSFIERMTNFDKNLPNEKVLPKHSLLYEYFTVYNELTKVKYVTEGMRKPAFLSGEQKKAIVDLLFKTNRKVTVKQLKEDYFKKIECFDSVEISGVEDRFNASLGTYHDLLKIIKDKDFLDNEENEDILEDIVLTLTLFEDREMIEERLKTYAHLFDDKVMKQLKRRRYTGWGRLSRKLINGIRDKQSGKTILDFLKSDGFANRNFMQLIHDDSLTFKEDIQKAQVSGQGDSLHEHIANLAGSPAIKKGILQTVKVVDELVKVMGRHKPENIVIEMARENQTTQKGQKNSRERMKRIEEGIKELGSQILKEHPVENTQLQNEKLYLYYLQNGRDMYVDQELDINRLSDYDVDHIVPQSFLKDDSIDNKVLTRSDKARGKSDNVPSEEVVKKMKNYWRQLLNAKLITQRKFDNLTKAERGGLSELDKAGFIKRQLVETRQITKHVAQILDSRMNTKYDENDKLIREVKVITLKSKLVSDFRKDFQFYKVREINNYHHAHDAYLNAVVGTALIKKYPKLESEFVYGDYKVYDVRKMIAKSEQEIGKATAKYFFYSNIMNFFKTEITLANGEIRKRPLIETNGETGEIVWDKGRDFATVRKVLSMPQVNIVKKTEVQTGGFSKESILPKRNSDKLIARKKDWDPKKYGGFDSPTVAYSVLVVAKVEKGKSKKLKSVKELLGITIMERSSFEKNPIDFLEAKGYKEVKKDLIIKLPKYSLFELENGRKRMLASAGELQKGNELALPSKYVNFLYLASHYEKLKGSPEDNEQKQLFVEQHKHYLDEIIEQISEFSKRVILADANLDKVLSAYNKHRDKPIREQAENIIHLFTLTNLGAPAAFKYFDTTIDRKRYTSTKEVLDATLIHQSITGLYETRIDLSQLGGDGGGSSEAAAKGGGGGLLGRDLLTKLKAQIQFSTEGPQVTWEDRPAMCLVLNLEEEYRLHEKPVPPSIDPSWLQLFPMVWAEKAGMGLANQVPPVVVELKSDASPVAVRQYPMSKEAREGIRPHIQRFLDLGILVPCQSPWNTPLLPVKKPGTNDYRPVQDLREVNKRVQDIHPTVPNPYNLLSSLPPSHTWYSVLDLKDAFFCLKLHPNSQPLFAFEWRDPEKGNTGQLTWTRLPQGFKNSPTLFNEALHRDLASFRALNPQVVMLQYVDDLLVAAPTYRDCKEGTRRLLQELSKLGYRVSAKKAQLCREEVTYLGYLLKGGKRWLTPARKATVMKIPTPTTPRQVREFLGKAGFCRLFIPGFASLAAPLYPLTRPKVPFTWTEAHQEAFGRIKEALLSAPALALPDLTKPFALYVDEKEGVARGVLTQTLGPWRRPVAYLSKKLDPVASGWPTCLKAIAAVALLLKDADKLTLGQNVLVIAPHNLESIVRQPPDRWMTNARMTHYQSLLLNERVSFAPPAILNPATLLPVESDDTPIHICSEILAEETGTRPDLRDQPLPGVPAWYTDGSSFIMDGRRQAGAAIVDNKRTVWASNLPEGTSAQKAELIALTQALRLAEGKSINIYTDSRYAFATAHVHGAIYKQRGWLTSAGKDIKNKEEILALLEAIHLPKRVAIIHCPGHQRGTDPVATGNRKADEAAKQAAQSTRILTETTKNAGKRTADGSEFEKRTADGSEFESPKKKAKVE

SEQ ID NO: 1738 - protein, 2125 aa, synthetic construct
MPAAKRVKLDGGDKKYSIGLDIGTNSVGWAVITDEYKVPSKKFKVLGNTDRHSIKKNLIGALLFDSGETAEATRLKRTARRRYTRRKNRICYLQEIFSNEMAKVDDSFFHRLEESFLVEEDKKHERHPIFGNIVDEVAYHEKYPTIYHLRKKLVDSTDKADLRLIYLALAHMIKFRGHFLIEGDLNPDNSDVDKLFIQLVQTYNQLFEENPINASGVDAKAILSARLSKSRRLENLIAQLPGEKKNGLFGNLIALSLGLTPNFKSNFDLAEDAKLQLSKDTYDDDLDNLLAQIGDQYADLFLAAKNLSDAILLSDILRVNTEITKAPLSASMIKRYDEHHQDLTLLKALVRQQLPEKYKEIFFDQSKNGYAGYIDGGASQEEFYKFIKPILEKMDGTEELLVKLNREDLLRKQRTFDNGSIPHQIHLGELHAILRRQEDFYPFLKDNREKIEKILTFRIPYYVGPLARGNSRFAWMTRKSEETITPWNFEEVVDKGASAQSFIERMTNFDKNLPNEKVLPKHSLLYEYFTVYNELTKVKYVTEGMRKPAFLSGEQKKAIVDLLFKTNRKVTVKQLKEDYFKKIECFDSVEISGVEDRFNASLGTYHDLLKIIKDKDFLDNEENEDILEDIVLTLTLFEDREMIEERLKTYAHLFDDKVMKQLKRRRYTGWGRLSRKLINGIRDKQSGKTILDFLKSDGFANRNFMQLIHDDSLTFKEDIQKAQVSGQGDSLHEHIANLAGSPAIKKGILQTVKVVDELVKVMGRHKPENIVIEMARENQTTQKGQKNSRERMKRIEEGIKELGSQILKEHPVENTQLQNEKLYLYYLQNGRDMYVDQELDINRLSDYDVDHIVPQSFLKDDSIDNKVLTRSDKARGKSDNVPSEEVVKKMKNYWRQLLNAKLITQRKFDNLTKAERGGLSELDKAGFIKRQLVETRQITKHVAQILDSRMNTKYDENDKLIREVKVITLKSKLVSDFRKDFQFYKVREINNYHHAHDAYLNAVVGTALIKKYPKLESEFVYGDYKVYDVRKMIAKSEQEIGKATAKYFFYSNIMNFFKTEITLANGEIRKRPLIETNGETGEIVWDKGRDFATVRKVLSMPQVNIVKKTEVQTGGFSKESILPKRNSDKLIARKKDWDPKKYGGFDSPTVAYSVLVVAKVEKGKSKKLKSVKELLGITIMERSSFEKNPIDFLEAKGYKEVKKDLIIKLPKYSLFELENGRKRMLASAGELQKGNELALPSKYVNFLYLASHYEKLKGSPEDNEQKQLFVEQHKHYLDEIIEQISEFSKRVILADANLDKVLSAYNKHRDKPIREQAENIIHLFTLTNLGAPAAFKYFDTTIDRKRYTSTKEVLDATLIHQSITGLYETRIDLSQLGGDGGGSSPAPGGSGGLLGRDLLTKLKAQIQFSTEGPQVTWEDRPAMCLVLNLEEEYRLHEKPVPPSIDPSWLQLFPMVWAEKAGMGLANQVPPVVVELKSDASPVAVRQYPMSKEAREGIRPHIQRFLDLGILVPCQSPWNTPLLPVKKPGTNDYRPVQDLREVNKRVQDIHPTVPNPYNLLSSLPPSHTWYSVLDLKDAFFCLKLHPNSQPLFAFEWRDPEKGNTGQLTWTRLPQGFKNSPTLFNEALHRDLASFRALNPQVVMLQYVDDLLVAAPTYRDCKEGTRRLLQELSKLGYRVSAKKAQLCREEVTYLGYLLKGGKRWLTPARKATVMKIPTPTTPRQVREFLGKAGFCRLFIPGFASLAAPLYPLTRPKVPFTWTEAHQEAFGRIKEALLSAPALALPDLTKPFALYVDEKEGVARGVLTQTLGPWRRPVAYLSKKLDPVASGWPTCLKAIAAVALLLKDADKLTLGQNVLVIAPHNLESIVRQPPDRWMTNARMTHYQSLLLNERVSFAPPAILNPATLLPVESDDTPIHICSEILAEETGTRPDLRDQPLPGVPAWYTDGSSFIMDGRRQAGAAIVDNKRTVWASNLPEGTSAQKAELIALTQALRLAEGKSINIYTDSRYAFATAHVHGAIYKQRGWLTSAGKDIKNKEEILALLEAIHLPKRVAIIHCPGHQRGTDPVATGNRKADEAAKQAAQSTRILTETTKNAGKRTADGSEFEKRTADGSEFESPKKKAKVE

SEQ ID NO: 1739 - protein, 2131 aa, synthetic construct
MPAAKRVKLDGGDKKYSIGLDIGTNSVGWAVITDEYKVPSKKFKVLGNTDRHSIKKNLIGALLFDSGETAEATRLKRTARRRYTRRKNRICYLQEIFSNEMAKVDDSFFHRLEESFLVEEDKKHERHPIFGNIVDEVAYHEKYPTIYHLRKKLVDSTDKADLRLIYLALAHMIKFRGHFLIEGDLNPDNSDVDKLFIQLVQTYNQLFEENPINASGVDAKAILSARLSKSRRLENLIAQLPGEKKNGLFGNLIALSLGLTPNFKSNFDLAEDAKLQLSKDTYDDDLDNLLAQIGDQYADLFLAAKNLSDAILLSDILRVNTEITKAPLSASMIKRYDEHHQDLTLLKALVRQQLPEKYKEIFFDQSKNGYAGYIDGGASQEEFYKFIKPILEKMDGTEELLVKLNREDLLRKQRTFDNGSIPHQIHLGELHAILRRQEDFYPFLKDNREKIEKILTFRIPYYVGPLARGNSRFAWMTRKSEETITPWNFEEVVDKGASAQSFIERMTNFDKNLPNEKVLPKHSLLYEYFTVYNELTKVKYVTEGMRKPAFLSGEQKKAIVDLLFKTNRKVTVKQLKEDYFKKIECFDSVEISGVEDRFNASLGTYHDLLKIIKDKDFLDNEENEDILEDIVLTLTLFEDREMIEERLKTYAHLFDDKVMKQLKRRRYTGWGRLSRKLINGIRDKQSGKTILDFLKSDGFANRNFMQLIHDDSLTFKEDIQKAQVSGQGDSLHEHIANLAGSPAIKKGILQTVKVVDELVKVMGRHKPENIVIEMARENQTTQKGQKNSRERMKRIEEGIKELGSQILKEHPVENTQLQNEKLYLYYLQNGRDMYVDQELDINRLSDYDVDHIVPQSFLKDDSIDNKVLTRSDKARGKSDNVPSEEVVKKMKNYWRQLLNAKLITQRKFDNLTKAERGGLSELDKAGFIKRQLVETRQITKHVAQILDSRMNTKYDENDKLIREVKVITLKSKLVSDFRKDFQFYKVREINNYHHAHDAYLNAVVGTALIKKYPKLESEFVYGDYKVYDVRKMIAKSEQEIGKATAKYFFYSNIMNFFKTEITLANGEIRKRPLIETNGETGEIVWDKGRDFATVRKVLSMPQVNIVKKTEVQTGGFSKESILPKRNSDKLIARKKDWDPKKYGGFDSPTVAYSVLVVAKVEKGKSKKLKSVKELLGITIMERSSFEKNPIDFLEAKGYKEVKKDLIIKLPKYSLFELENGRKRMLASAGELQKGNELALPSKYVNFLYLASHYEKLKGSPEDNEQKQLFVEQHKHYLDEIIEQISEFSKRVILADANLDKVLSAYNKHRDKPIREQAENIIHLFTLTNLGAPAAFKYFDTTIDRKRYTSTKEVLDATLIHQSITGLYETRIDLSQLGGDGGGGGGSEAAAKGGGGSGGLLGRDLLTKLKAQIQFSTEGPQVTWEDRPAMCLVLNLEEEYRLHEKPVPPSIDPSWLQLFPMVWAEKAGMGLANQVPPVVVELKSDASPVAVRQYPMSKEAREGIRPHIQRFLDLGILVPCQSPWNTPLLPVKKPGTNDYRPVQDLREVNKRVQDIHPTVPNPYNLLSSLPPSHTWYSVLDLKDAFFCLKLHPNSQPLFAFEWRDPEKGNTGQLTWTRLPQGFKNSPTLFNEALHRDLASFRALNPQVVMLQYVDDLLVAAPTYRDCKEGTRRLLQELSKLGYRVSAKKAQLCREEVTYLGYLLKGGKRWLTPARKATVMKIPTPTTPRQVREFLGKAGFCRLFIPGFASLAAPLYPLTRPKVPFTWTEAHQEAFGRIKEALLSAPALALPDLTKPFALYVDEKEGVARGVLTQTLGPWRRPVAYLSKKLDPVASGWPTCLKAIAAVALLLKDADKLTLGQNVLVIAPHNLESIVRQPPDRWMTNARMTHYQSLLLNERVSFAPPAILNPATLLPVESDDTPIHICSEILAEETGTRPDLRDQPLPGVPAWYTDGSSFIMDGRRQAGAAIVDNKRTVWASNLPEGTSAQKAELIALTQALRLAEGKSINIYTDSRYAFATAHVHGAIYKQRGWLTSAGKDIKNKEEILALLEAIHLPKRVAIIHCPGHQRGTDPVATGNRKADEAAKQAAQSTRILTETTKNAGKRTADGSEFEKRTADGSEFESPKKKAKVE

SEQ ID NO: 1740 - protein, 2125 aa, synthetic construct
MPAAKRVKLDGGDKKYSIGLDIGTNSVGWAVITDEYKVPSKKFKVLGNTDRHSIKKNLIGALLFDSGETAEATRLKRTARRRYTRRKNRICYLQEIFSNEMAKVDDSFFHRLEESFLVEEDKKHERHPIFGNIVDEVAYHEKYPTIYHLRKKLVDSTDKADLRLIYLALAHMIKFRGHFLIEGDLNPDNSDVDKLFIQLVQTYNQLFEENPINASGVDAKAILSARLSKSRRLENLIAQLPGEKKNGLFGNLIALSLGLTPNFKSNFDLAEDAKLQLSKDTYDDDLDNLLAQIGDQYADLFLAAKNLSDAILLSDILRVNTEITKAPLSASMIKRYDEHHQDLTLLKALVRQQLPEKYKEIFFDQSKNGYAGYIDGGASQEEFYKFIKPILEKMDGTEELLVKLNREDLLRKQRTFDNGSIPHQIHLGELHAILRRQEDFYPFLKDNREKIEKILTFRIPYYVGPLARGNSRFAWMTRKSEETITPWNFEEVVDKGASAQSFIERMTNFDKNLPNEKVLPKHSLLYEYFTVYNELTKVKYVTEGMRKPAFLSGEQKKAIVDLLFKTNRKVTVKQLKEDYFKKIECFDSVEISGVEDRFNASLGTYHDLLKIIKDKDFLDNEENEDILEDIVLTLTLFEDREMIEERLKTYAHLFDDKVMKQLKRRRYTGWGRLSRKLINGIRDKQSGKTILDFLKSDGFANRNFMQLIHDDSLTFKEDIQKAQVSGQGDSLHEHIANLAGSPAIKKGILQTVKVVDELVKVMGRHKPENIVIEMARENQTTQKGQKNSRERMKRIEEGIKELGSQILKEHPVENTQLQNEKLYLYYLQNGRDMYVDQELDINRLSDYDVDHIVPQSFLKDDSIDNKVLTRSDKARGKSDNVPSEEVVKKMKNYWRQLLNAKLITQRKFDNLTKAERGGLSELDKAGFIKRQLVETRQITKHVAQILDSRMNTKYDENDKLIREVKVITLKSKLVSDFRKDFQFYKVREINNYHHAHDAYLNAVVGTALIKKYPKLESEFVYGDYKVYDVRKMIAKSEQEIGKATAKYFFYSNIMNFFKTEITLANGEIRKRPLIETNGETGEIVWDKGRDFATVRKVLSMPQVNIVKKTEVQTGGFSKESILPKRNSDKLIARKKDWDPKKYGGFDSPTVAYSVLVVAKVEKGKSKKLKSVKELLGITIMERSSFEKNPIDFLEAKGYKEVKKDLIIKLPKYSLFELENGRKRMLASAGELQKGNELALPSKYVNFLYLASHYEKLKGSPEDNEQKQLFVEQHKHYLDEIIEQISEFSKRVILADANLDKVLSAYNKHRDKPIREQAENIIHLFTLTNLGAPAAFKYFDTTIDRKRYTSTKEVLDATLIHQSITGLYETRIDLSQLGGDGGPAPGGSGGGGGLLGRDLLTKLKAQIQFSTEGPQVTWEDRPAMCLVLNLEEEYRLHEKPVPPSIDPSWLQLFPMVWAEKAGMGLANQVPPVVVELKSDASPVAVRQYPMSKEAREGIRPHIQRFLDLGILVPCQSPWNTPLLPVKKPGTNDYRPVQDLREVNKRVQDIHPTVPNPYNLLSSLPPSHTWYSVLDLKDAFFCLKLHPNSQPLFAFEWRDPEKGNTGQLTWTRLPQGFKNSPTLFNEALHRDLASFRALNPQVVMLQYVDDLLVAAPTYRDCKEGTRRLLQELSKLGYRVSAKKAQLCREEVTYLGYLLKGGKRWLTPARKATVMKIPTPTTPRQVREFLGKAGFCRLFIPGFASLAAPLYPLTRPKVPFTWTEAHQEAFGRIKEALLSAPALALPDLTKPFALYVDEKEGVARGVLTQTLGPWRRPVAYLSKKLDPVASGWPTCLKAIAAVALLLKDADKLTLGQNVLVIAPHNLESIVRQPPDRWMTNARMTHYQSLLLNERVSFAPPAILNPATLLPVESDDTPIHICSEILAEETGTRPDLRDQPLPGVPAWYTDGSSFIMDGRRQAGAAIVDNKRTVWASNLPEGTSAQKAELIALTQALRLAEGKSINIYTDSRYAFATAHVHGAIYKQRGWLTSAGKDIKNKEEILALLEAIHLPKRVAIIHCPGHQRGTDPVATGNRKADEAAKQAAQSTRILTETTKNAGKRTADGSEFEKRTADGSEFESPKKKAKVE

SEQ ID NO: 1741 - protein, 2127 aa, synthetic construct
MPAAKRVKLDGGDKKYSIGLDIGTNSVGWAVITDEYKVPSKKFKVLGNTDRHSIKKNLIGALLFDSGETAEATRLKRTARRRYTRRKNRICYLQEIFSNEMAKVDDSFFHRLEESFLVEEDKKHERHPIFGNIVDEVAYHEKYPTIYHLRKKLVDSTDKADLRLIYLALAHMIKFRGHFLIEGDLNPDNSDVDKLFIQLVQTYNQLFEENPINASGVDAKAILSARLSKSRRLENLIAQLPGEKKNGLFGNLIALSLGLTPNFKSNFDLAEDAKLQLSKDTYDDDLDNLLAQIGDQYADLFLAAKNLSDAILLSDILRVNTEITKAPLSASMIKRYDEHHQDLTLLKALVRQQLPEKYKEIFFDQSKNGYAGYIDGGASQEEFYKFIKPILEKMDGTEELLVKLNREDLLRKQRTFDNGSIPHQIHLGELHAILRRQEDFYPFLKDNREKIEKILTFRIPYYVGPLARGNSRFAWMTRKSEETITPWNFEEVVDKGASAQSFIERMTNFDKNLPNEKVLPKHSLLYEYFTVYNELTKVKYVTEGMRKPAFLSGEQKKAIVDLLFKTNRKVTVKQLKEDYFKKIECFDSVEISGVEDRFNASLGTYHDLLKIIKDKDFLDNEENEDILEDIVLTLTLFEDREMIEERLKTYAHLFDDKVMKQLKRRRYTGWGRLSRKLINGIRDKQSGKTILDFLKSDGFANRNFMQLIHDDSLTFKEDIQKAQVSGQGDSLHEHIANLAGSPAIKKGILQTVKVVDELVKVMGRHKPENIVIEMARENQTTQKGQKNSRERMKRIEEGIKELGSQILKEHPVENTQLQNEKLYLYYLQNGRDMYVDQELDINRLSDYDVDHIVPQSFLKDDSIDNKVLTRSDKARGKSDNVPSEEVVKKMKNYWRQLLNAKLITQRKFDNLTKAERGGLSELDKAGFIKRQLVETRQITKHVAQILDSRMNTKYDENDKLIREVKVITLKSKLVSDFRKDFQFYKVREINNYHHAHDAYLNAVVGTALIKKYPKLESEFVYGDYKVYDVRKMIAKSEQEIGKATAKYFFYSNIMNFFKTEITLANGEIRKRPLIETNGETGEIVWDKGRDFATVRKVLSMPQVNIVKKTEVQTGGFSKESILPKRNSDKLIARKKDWDPKKYGGFDSPTVAYSVLVVAKVEKGKSKKLKSVKELLGITIMERSSFEKNPIDFLEAKGYKEVKKDLIIKLPKYSLFELENGRKRMLASAGELQKGNELALPSKYVNFLYLASHYEKLKGSPEDNEQKQLFVEQHKHYLDEIIEQISEFSKRVILADANLDKVLSAYNKHRDKPIREQAENIIHLFTLTNLGAPAAFKYFDTTIDRKRYTSTKEVLDATLIHQSITGLYETRIDLSQLGGDGGGGSGGGEAAAKGGLLGRDLLTKLKAQIQFSTEGPQVTWEDRPAMCLVLNLEEEYRLHEKPVPPSIDPSWLQLFPMVWAEKAGMGLANQVPPVVVELKSDASPVAVRQYPMSKEAREGIRPHIQRFLDLGILVPCQSPWNTPLLPVKKPGTNDYRPVQDLREVNKRVQDIHPTVPNPYNLLSSLPPSHTWYSVLDLKDAFFCLKLHPNSQPLFAFEWRDPEKGNTGQLTWTRLPQGFKNSPTLFNEALHRDLASFRALNPQVVMLQYVDDLLVAAPTYRDCKEGTRRLLQELSKLGYRVSAKKAQLCREEVTYLGYLLKGGKRWLTPARKATVMKIPTPTTPRQVREFLGKAGFCRLFIPGFASLAAPLYPLTRPKVPFTWTEAHQEAFGRIKEALLSAPALALPDLTKPFALYVDEKEGVARGVLTQTLGPWRRPVAYLSKKLDPVASGWPTCLKAIAAVALLLKDADKLTLGQNVLVIAPHNLESIVRQPPDRWMTNARMTHYQSLLLNERVSFAPPAILNPATLLPVESDDTPIHICSEILAEETGTRPDLRDQPLPGVPAWYTDGSSFIMDGRRQAGAAIVDNKRTVWASNLPEGTSAQKAELIALTQALRLAEGKSINIYTDSRYAFATAHVHGAIYKQRGWLTSAGKDIKNKEEILALLEAIHLPKRVAIIHCPGHQRGTDPVATGNRKADEAAKQAAQSTRILTETTKNAGKRTADGSEFEKRTADGSEFESPKKKAKVE

SEQ ID NO: 1742 - protein, 2122 aa, synthetic construct
MPAAKRVKLDGGDKKYSIGLDIGTNSVGWAVITDEYKVPSKKFKVLGNTDRHSIKKNLIGALLFDSGETAEATRLKRTARRRYTRRKNRICYLQEIFSNEMAKVDDSFFHRLEESFLVEEDKKHERHPIFGNIVDEVAYHEKYPTIYHLRKKLVDSTDKADLRLIYLALAHMIKFRGHFLIEGDLNPDNSDVDKLFIQLVQTYNQLFEENPINASGVDAKAILSARLSKSRRLENLIAQLPGEKKNGLFGNLIALSLGLTPNFKSNFDLAEDAKLQLSKDTYDDDLDNLLAQIGDQYADLFLAAKNLSDAILLSDILRVNTEITKAPLSASMIKRYDEHHQDLTLLKALVRQQLPEKYKEIFFDQSKNGYAGYIDGGASQEEFYKFIKPILEKMDGTEELLVKLNREDLLRKQRTFDNGSIPHQIHLGELHAILRRQEDFYPFLKDNREKIEKILTFRIPYYVGPLARGNSRFAWMTRKSEETITPWNFEEVVDKGASAQSFIERMTNFDKNLPNEKVLPKHSLLYEYFTVYNELTKVKYVTEGMRKPAFLSGEQKKAIVDLLFKTNRKVTVKQLKEDYFKKIECFDSVEISGVEDRFNASLGTYHDLLKIIKDKDFLDNEENEDILEDIVLTLTLFEDREMIEERLKTYAHLFDDKVMKQLKRRRYTGWGRLSRKLINGIRDKQSGKTILDFLKSDGFANRNFMQLIHDDSLTFKEDIQKAQVSGQGDSLHEHIANLAGSPAIKKGILQTVKVVDELVKVMGRHKPENIVIEMARENQTTQKGQKNSRERMKRIEEGIKELGSQILKEHPVENTQLQNEKLYLYYLQNGRDMYVDQELDINRLSDYDVDHIVPQSFLKDDSIDNKVLTRSDKARGKSDNVPSEEVVKKMKNYWRQLLNAKLITQRKFDNLTKAERGGLSELDKAGFIKRQLVETRQITKHVAQILDSRMNTKYDENDKLIREVKVITLKSKLVSDFRKDFQFYKVREINNYHHAHDAYLNAVVGTALIKKYPKLESEFVYGDYKVYDVRKMIAKSEQEIGKATAKYFFYSNIMNFFKTEITLANGEIRKRPLIETNGETGEIVWDKGRDFATVRKVLSMPQVNIVKKTEVQTGGFSKESILPKRNSDKLIARKKDWDPKKYGGFDSPTVAYSVLVVAKVEKGKSKKLKSVKELLGITIMERSSFEKNPIDFLEAKGYKEVKKDLIIKLPKYSLFELENGRKRMLASAGELQKGNELALPSKYVNFLYLASHYEKLKGSPEDNEQKQLFVEQHKHYLDEIIEQISEFSKRVILADANLDKVLSAYNKHRDKPIREQAENIIHLFTLTNLGAPAAFKYFDTTIDRKRYTSTKEVLDATLIHQSITGLYETRIDLSQLGGDGGGSSGGSGGLLGRDLLTKLKAQIQFSTEGPQVTWEDRPAMCLVLNLEEEYRLHEKPVPPSIDPSWLQLFPMVWAEKAGMGLANQVPPVVVELKSDASPVAVRQYPMSKEAREGIRPHIQRFLDLGILVPCQSPWNTPLLPVKKPGTNDYRPVQDLREVNKRVQDIHPTVPNPYNLLSSLPPSHTWYSVLDLKDAFFCLKLHPNSQPLFAFEWRDPEKGNTGQLTWTRLPQGFKNSPTLFNEALHRDLASFRALNPQVVMLQYVDDLLVAAPTYRDCKEGTRRLLQELSKLGYRVSAKKAQLCREEVTYLGYLLKGGKRWLTPARKATVMKIPTPTTPRQVREFLGKAGFCRLFIPGFASLAAPLYPLTRPKVPFTWTEAHQEAFGRIKEALLSAPALALPDLTKPFALYVDEKEGVARGVLTQTLGPWRRPVAYLSKKLDPVASGWPTCLKAIAAVALLLKDADKLTLGQNVLVIAPHNLESIVRQPPDRWMTNARMTHYQSLLLNERVSFAPPAILNPATLLPVESDDTPIHICSEILAEETGTRPDLRDQPLPGVPAWYTDGSSFIMDGRRQAGAAIVDNKRTVWASNLPEGTSAQKAELIALTQALRLAEGKSINIYTDSRYAFATAHVHGAIYKQRGWLTSAGKDIKNKEEILALLEAIHLPKRVAIIHCPGHQRGTDPVATGNRKADEAAKQAAQSTRILTETTKNAGKRTADGSEFEKRTADGSEFESPKKKAKVE

SEQ ID NO: 1743 - protein, 2124 aa, synthetic construct
MPAAKRVKLDGGDKKYSIGLDIGTNSVGWAVITDEYKVPSKKFKVLGNTDRHSIKKNLIGALLFDSGETAEATRLKRTARRRYTRRKNRICYLQEIFSNEMAKVDDSFFHRLEESFLVEEDKKHERHPIFGNIVDEVAYHEKYPTIYHLRKKLVDSTDKADLRLIYLALAHMIKFRGHFLIEGDLNPDNSDVDKLFIQLVQTYNQLFEENPINASGVDAKAILSARLSKSRRLENLIAQLPGEKKNGLFGNLIALSLGLTPNFKSNFDLAEDAKLQLSKDTYDDDLDNLLAQIGDQYADLFLAAKNLSDAILLSDILRVNTEITKAPLSASMIKRYDEHHQDLTLLKALVRQQLPEKYKEIFFDQSKNGYAGYIDGGASQEEFYKFIKPILEKMDGTEELLVKLNREDLLRKQRTFDNGSIPHQIHLGELHAILRRQEDFYPFLKDNREKIEKILTFRIPYYVGPLARGNSRFAWMTRKSEETITPWNFEEVVDKGASAQSFIERMTNFDKNLPNEKVLPKHSLLYEYFTVYNELTKVKYVTEGMRKPAFLSGEQKKAIVDLLFKTNRKVTVKQLKEDYFKKIECFDSVEISGVEDRFNASLGTYHDLLKIIKDKDFLDNEENEDILEDIVLTLTLFEDREMIEERLKTYAHLFDDKVMKQLKRRRYTGWGRLSRKLINGIRDKQSGKTILDFLKSDGFANRNFMQLIHDDSLTFKEDIQKAQVSGQGDSLHEHIANLAGSPAIKKGILQTVKVVDELVKVMGRHKPENIVIEMARENQTTQKGQKNSRERMKRIEEGIKELGSQILKEHPVENTQLQNEKLYLYYLQNGRDMYVDQELDINRLSDYDVDHIVPQSFLKDDSIDNKVLTRSDKARGKSDNVPSEEVVKKMKNYWRQLLNAKLITQRKFDNLTKAERGGLSELDKAGFIKRQLVETRQITKHVAQILDSRMNTKYDENDKLIREVKVITLKSKLVSDFRKDFQFYKVREINNYHHAHDAYLNAVVGTALIKKYPKLESEFVYGDYKVYDVRKMIAKSEQEIGKATAKYFFYSNIMNFFKTEITLANGEIRKRPLIETNGETGEIVWDKGRDFATVRKVLSMPQVNIVKKTEVQTGGFSKESILPKRNSDKLIARKKDWDPKKYGGFDSPTVAYSVLVVAKVEKGKSKKLKSVKELLGITIMERSSFEKNPIDFLEAKGYKEVKKDLIIKLPKYSLFELENGRKRMLASAGELQKGNELALPSKYVNFLYLASHYEKLKGSPEDNEQKQLFVEQHKHYLDEIIEQISEFSKRVILADANLDKVLSAYNKHRDKPIREQAENIIHLFTLTNLGAPAAFKYFDTTIDRKRYTSTKEVLDATLIHQSITGLYETRIDLSQLGGDGGGGSEAAAKGGLLGRDLLTKLKAQIQFSTEGPQVTWEDRPAMCLVLNLEEEYRLHEKPVPPSIDPSWLQLFPMVWAEKAGMGLANQVPPVVVELKSDASPVAVRQYPMSKEAREGIRPHIQRFLDLGILVPCQSPWNTPLLPVKKPGTNDYRPVQDLREVNKRVQDIHPTVPNPYNLLSSLPPSHTWYSVLDLKDAFFCLKLHPNSQPLFAFEWRDPEKGNTGQLTWTRLPQGFKNSPTLFNEALHRDLASFRALNPQVVMLQYVDDLLVAAPTYRDCKEGTRRLLQELSKLGYRVSAKKAQLCREEVTYLGYLLKGGKRWLTPARKATVMKIPTPTTPRQVREFLGKAGFCRLFIPGFASLAAPLYPLTRPKVPFTWTEAHQEAFGRIKEALLSAPALALPDLTKPFALYVDEKEGVARGVLTQTLGPWRRPVAYLSKKLDPVASGWPTCLKAIAAVALLLKDADKLTLGQNVLVIAPHNLESIVRQPPDRWMTNARMTHYQSLLLNERVSFAPPAILNPATLLPVESDDTPIHICSEILAEETGTRPDLRDQPLPGVPAWYTDGSSFIMDGRRQAGAAIVDNKRTVWASNLPEGTSAQKAELIALTQALRLAEGKSINIYTDSRYAFATAHVHGAIYKQRGWLTSAGKDIKNKEEILALLEAIHLPKRVAIIHCPGHQRGTDPVATGNRKADEAAKQAAQSTRILTETTKNAGKRTADGSEFEKRTADGSEFESPKKKAKVE

SEQ ID NO: 1744 - protein, 2141 aa, synthetic construct
MPAAKRVKLDGGDKKYSIGLDIGTNSVGWAVITDEYKVPSKKFKVLGNTDRHSIKKNLIGALLFDSGETAEATRLKRTARRRYTRRKNRICYLQEIFSNEMAKVDDSFFHRLEESFLVEEDKKHERHPIFGNIVDEVAYHEKYPTIYHLRKKLVDSTDKADLRLIYLALAHMIKFRGHFLIEGDLNPDNSDVDKLFIQLVQTYNQLFEENPINASGVDAKAILSARLSKSRRLENLIAQLPGEKKNGLFGNLIALSLGLTPNFKSNFDLAEDAKLQLSKDTYDDDLDNLLAQIGDQYADLFLAAKNLSDAILLSDILRVNTEITKAPLSASMIKRYDEHHQDLTLLKALVRQQLPEKYKEIFFDQSKNGYAGYIDGGASQEEFYKFIKPILEKMDGTEELLVKLNREDLLRKQRTFDNGSIPHQIHLGELHAILRRQEDFYPFLKDNREKIEKILTFRIPYYVGPLARGNSRFAWMTRKSEETITPWNFEEVVDKGASAQSFIERMTNFDKNLPNEKVLPKHSLLYEYFTVYNELTKVKYVTEGMRKPAFLSGEQKKAIVDLLFKTNRKVTVKQLKEDYFKKIECFDSVEISGVEDRFNASLGTYHDLLKIIKDKDFLDNEENEDILEDIVLTLTLFEDREMIEERLKTYAHLFDDKVMKQLKRRRYTGWGRLSRKLINGIRDKQSGKTILDFLKSDGFANRNFMQLIHDDSLTFKEDIQKAQVSGQGDSLHEHIANLAGSPAIKKGILQTVKVVDELVKVMGRHKPENIVIEMARENQTTQKGQKNSRERMKRIEEGIKELGSQILKEHPVENTQLQNEKLYLYYLQNGRDMYVDQELDINRLSDYDVDHIVPQSFLKDDSIDNKVLTRSDKARGKSDNVPSEEVVKKMKNYWRQLLNAKLITQRKFDNLTKAERGGLSELDKAGFIKRQLVETRQITKHVAQILDSRMNTKYDENDKLIREVKVITLKSKLVSDFRKDFQFYKVREINNYHHAHDAYLNAVVGTALIKKYPKLESEFVYGDYKVYDVRKMIAKSEQEIGKATAKYFFYSNIMNFFKTEITLANGEIRKRPLIETNGETGEIVWDKGRDFATVRKVLSMPQVNIVKKTEVQTGGFSKESILPKRNSDKLIARKKDWDPKKYGGFDSPTVAYSVLVVAKVEKGKSKKLKSVKELLGITIMERSSFEKNPIDFLEAKGYKEVKKDLIIKLPKYSLFELENGRKRMLASAGELQKGNELALPSKYVNFLYLASHYEKLKGSPEDNEQKQLFVEQHKHYLDEIIEQISEFSKRVILADANLDKVLSAYNKHRDKPIREQAENIIHLFTLTNLGAPAAFKYFDTTIDRKRYTSTKEVLDATLIHQSITGLYETRIDLSQLGGDGGEAAAKEAAAKEAAAKEAAAKEAAAKGGLLGRDLLTKLKAQIQFSTEGPQVTWEDRPAMCLVLNLEEEYRLHEKPVPPSIDPSWLQLFPMVWAEKAGMGLANQVPPVVVELKSDASPVAVRQYPMSKEAREGIRPHIQRFLDLGILVPCQSPWNTPLLPVKKPGTNDYRPVQDLREVNKRVQDIHPTVPNPYNLLSSLPPSHTWYSVLDLKDAFFCLKLHPNSQPLFAFEWRDPEKGNTGQLTWTRLPQGFKNSPTLFNEALHRDLASFRALNPQVVMLQYVDDLLVAAPTYRDCKEGTRRLLQELSKLGYRVSAKKAQLCREEVTYLGYLLKGGKRWLTPARKATVMKIPTPTTPRQVREFLGKAGFCRLFIPGFASLAAPLYPLTRPKVPFTWTEAHQEAFGRIKEALLSAPALALPDLTKPFALYVDEKEGVARGVLTQTLGPWRRPVAYLSKKLDPVASGWPTCLKAIAAVALLLKDADKLTLGQNVLVIAPHNLESIVRQPPDRWMTNARMTHYQSLLLNERVSFAPPAILNPATLLPVESDDTPIHICSEILAEETGTRPDLRDQPLPGVPAWYTDGSSFIMDGRRQAGAAIVDNKRTVWASNLPEGTSAQKAELIALTQALRLAEGKSINIYTDSRYAFATAHVHGAIYKQRGWLTSAGKDIKNKEEILALLEAIHLPKRVAIIHCPGHQRGTDPVATGNRKADEAAKQAAQSTRILTETTKNAGKRTADGSEFEKRTADGSEFESPKKKAKVE

SEQ ID NO: 1745 - protein, 2125 aa, synthetic construct
MPAAKRVKLDGGDKKYSIGLDIGTNSVGWAVITDEYKVPSKKFKVLGNTDRHSIKKNLIGALLFDSGETAEATRLKRTARRRYTRRKNRICYLQEIFSNEMAKVDDSFFHRLEESFLVEEDKKHERHPIFGNIVDEVAYHEKYPTIYHLRKKLVDSTDKADLRLIYLALAHMIKFRGHFLIEGDLNPDNSDVDKLFIQLVQTYNQLFEENPINASGVDAKAILSARLSKSRRLENLIAQLPGEKKNGLFGNLIALSLGLTPNFKSNFDLAEDAKLQLSKDTYDDDLDNLLAQIGDQYADLFLAAKNLSDAILLSDILRVNTEITKAPLSASMIKRYDEHHQDLTLLKALVRQQLPEKYKEIFFDQSKNGYAGYIDGGASQEEFYKFIKPILEKMDGTEELLVKLNREDLLRKQRTFDNGSIPHQIHLGELHAILRRQEDFYPFLKDNREKIEKILTFRIPYYVGPLARGNSRFAWMTRKSEETITPWNFEEVVDKGASAQSFIERMTNFDKNLPNEKVLPKHSLLYEYFTVYNELTKVKYVTEGMRKPAFLSGEQKKAIVDLLFKTNRKVTVKQLKEDYFKKIECFDSVEISGVEDRFNASLGTYHDLLKIIKDKDFLDNEENEDILEDIVLTLTLFEDREMIEERLKTYAHLFDDKVMKQLKRRRYTGWGRLSRKLINGIRDKQSGKTILDFLKSDGFANRNFMQLIHDDSLTFKEDIQKAQVSGQGDSLHEHIANLAGSPAIKKGILQTVKVVDELVKVMGRHKPENIVIEMARENQTTQKGQKNSRERMKRIEEGIKELGSQILKEHPVENTQLQNEKLYLYYLQNGRDMYVDQELDINRLSDYDVDHIVPQSFLKDDSIDNKVLTRSDKARGKSDNVPSEEVVKKMKNYWRQLLNAKLITQRKFDNLTKAERGGLSELDKAGFIKRQLVETRQITKHVAQILDSRMNTKYDENDKLIREVKVITLKSKLVSDFRKDFQFYKVREINNYHHAHDAYLNAVVGTALIKKYPKLESEFVYGDYKVYDVRKMIAKSEQEIGKATAKYFFYSNIMNFFKTEITLANGEIRKRPLIETNGETGEIVWDKGRDFATVRKVLSMPQVNIVKKTEVQTGGFSKESILPKRNSDKLIARKKDWDPKKYGGFDSPTVAYSVLVVAKVEKGKSKKLKSVKELLGITIMERSSFEKNPIDFLEAKGYKEVKKDLIIKLPKYSLFELENGRKRMLASAGELQKGNELALPSKYVNFLYLASHYEKLKGSPEDNEQKQLFVEQHKHYLDEIIEQISEFSKRVILADANLDKVLSAYNKHRDKPIREQAENIIHLFTLTNLGAPAAFKYFDTTIDRKRYTSTKEVLDATLIHQSITGLYETRIDLSQLGGDGGGGGGGSPAPGGLLGRDLLTKLKAQIQFSTEGPQVTWEDRPAMCLVLNLEEEYRLHEKPVPPSIDPSWLQLFPMVWAEKAGMGLANQVPPVVVELKSDASPVAVRQYPMSKEAREGIRPHIQRFLDLGILVPCQSPWNTPLLPVKKPGTNDYRPVQDLREVNKRVQDIHPTVPNPYNLLSSLPPSHTWYSVLDLKDAFFCLKLHPNSQPLFAFEWRDPEKGNTGQLTWTRLPQGFKNSPTLFNEALHRDLASFRALNPQVVMLQYVDDLLVAAPTYRDCKEGTRRLLQELSKLGYRVSAKKAQLCREEVTYLGYLLKGGKRWLTPARKATVMKIPTPTTPRQVREFLGKAGFCRLFIPGFASLAAPLYPLTRPKVPFTWTEAHQEAFGRIKEALLSAPALALPDLTKPFALYVDEKEGVARGVLTQTLGPWRRPVAYLSKKLDPVASGWPTCLKAIAAVALLLKDADKLTLGQNVLVIAPHNLESIVRQPPDRWMTNARMTHYQSLLLNERVSFAPPAILNPATLLPVESDDTPIHICSEILAEETGTRPDLRDQPLPGVPAWYTDGSSFIMDGRRQAGAAIVDNKRTVWASNLPEGTSAQKAELIALTQALRLAEGKSINIYTDSRYAFATAHVHGAIYKQRGWLTSAGKDIKNKEEILALLEAIHLPKRVAIIHCPGHQRGTDPVATGNRKADEAAKQAAQSTRILTETTKNAGKRTADGSEFEKRTADGSEFESPKKKAKVE

SEQ ID NO: 1746 - protein, 2124 aa, synthetic construct
MPAAKRVKLDGGDKKYSIGLDIGTNSVGWAVITDEYKVPSKKFKVLGNTDRHSIKKNLIGALLFDSGETAEATRLKRTARRRYTRRKNRICYLQEIFSNEMAKVDDSFFHRLEESFLVEEDKKHERHPIFGNIVDEVAYHEKYPTIYHLRKKLVDSTDKADLRLIYLALAHMIKFRGHFLIEGDLNPDNSDVDKLFIQLVQTYNQLFEENPINASGVDAKAILSARLSKSRRLENLIAQLPGEKKNGLFGNLIALSLGLTPNFKSNFDLAEDAKLQLSKDTYDDDLDNLLAQIGDQYADLFLAAKNLSDAILLSDILRVNTEITKAPLSASMIKRYDEHHQDLTLLKALVRQQLPEKYKEIFFDQSKNGYAGYIDGGASQEEFYKFIKPILEKMDGTEELLVKLNREDLLRKQRTFDNGSIPHQIHLGELHAILRRQEDFYPFLKDNREKIEKILTFRIPYYVGPLARGNSRFAWMTRKSEETITPWNFEEVVDKGASAQSFIERMTNFDKNLPNEKVLPKHSLLYEYFTVYNELTKVKYVTEGMRKPAFLSGEQKKAIVDLLFKTNRKVTVKQLKEDYFKKIECFDSVEISGVEDRFNASLGTYHDLLKIIKDKDFLDNEENEDILEDIVLTLTLFEDREMIEERLKTYAHLFDDKVMKQLKRRRYTGWGRLSRKLINGIRDKQSGKTILDFLKSDGFANRNFMQLIHDDSLTFKEDIQKAQVSGQGDSLHEHIANLAGSPAIKKGILQTVKVVDELVKVMGRHKPENIVIEMARENQTTQKGQKNSRERMKRIEEGIKELGSQILKEHPVENTQLQNEKLYLYYLQNGRDMYVDQELDINRLSDYDVDHIVPQSFLKDDSIDNKVLTRSDKARGKSDNVPSEEVVKKMKNYWRQLLNAKLITQRKFDNLTKAERGGLSELDKAGFIKRQLVETRQITKHVAQILDSRMNTKYDENDKLIREVKVITLKSKLVSDFRKDFQFYKVREINNYHHAHDAYLNAVVGTALIKKYPKLESEFVYGDYKVYDVRKMIAKSEQEIGKATAKYFFYSNIMNFFKTEITLANGEIRKRPLIETNGETGEIVWDKGRDFATVRKVLSMPQVNIVKKTEVQTGGFSKESILPKRNSDKLIARKKDWDPKKYGGFDSPTVAYSVLVVAKVEKGKSKKLKSVKELLGITIMERSSFEKNPIDFLEAKGYKEVKKDLIIKLPKYSLFELENGRKRMLASAGELQKGNELALPSKYVNFLYLASHYEKLKGSPEDNEQKQLFVEQHKHYLDEIIEQISEFSKRVILADANLDKVLSAYNKHRDKPIREQAENIIHLFTLTNLGAPAAFKYFDTTIDRKRYTSTKEVLDATLIHQSITGLYETRIDLSQLGGDGGEAAAKGGGGGLLGRDLLTKLKAQIQFSTEGPQVTWEDRPAMCLVLNLEEEYRLHEKPVPPSIDPSWLQLFPMVWAEKAGMGLANQVPPVVVELKSDASPVAVRQYPMSKEAREGIRPHIQRFLDLGILVPCQSPWNTPLLPVKKPGTNDYRPVQDLREVNKRVQDIHPTVPNPYNLLSSLPPSHTWYSVLDLKDAFFCLKLHPNSQPLFAFEWRDPEKGNTGQLTWTRLPQGFKNSPTLFNEALHRDLASFRALNPQVVMLQYVDDLLVAAPTYRDCKEGTRRLLQELSKLGYRVSAKKAQLCREEVTYLGYLLKGGKRWLTPARKATVMKIPTPTTPRQVREFLGKAGFCRLFIPGFASLAAPLYPLTRPKVPFTWTEAHQEAFGRIKEALLSAPALALPDLTKPFALYVDEKEGVARGVLTQTLGPWRRPVAYLSKKLDPVASGWPTCLKAIAAVALLLKDADKLTLGQNVLVIAPHNLESIVRQPPDRWMTNARMTHYQSLLLNERVSFAPPAILNPATLLPVESDDTPIHICSEILAEETGTRPDLRDQPLPGVPAWYTDGSSFIMDGRRQAGAAIVDNKRTVWASNLPEGTSAQKAELIALTQALRLAEGKSINIYTDSRYAFATAHVHGAIYKQRGWLTSAGKDIKNKEEILALLEAIHLPKRVAIIHCPGHQRGTDPVATGNRKADEAAKQAAQSTRILTETTKNAGKRTADGSEFEKRTADGSEFESPKKKAKVE

SEQ ID NO: 1747 - protein, 2122 aa, synthetic construct
MPAAKRVKLDGGDKKYSIGLDIGTNSVGWAVITDEYKVPSKKFKVLGNTDRHSIKKNLIGALLFDSGETAEATRLKRTARRRYTRRKNRICYLQEIFSNEMAKVDDSFFHRLEESFLVEEDKKHERHPIFGNIVDEVAYHEKYPTIYHLRKKLVDSTDKADLRLIYLALAHMIKFRGHFLIEGDLNPDNSDVDKLFIQLVQTYNQLFEENPINASGVDAKAILSARLSKSRRLENLIAQLPGEKKNGLFGNLIALSLGLTPNFKSNFDLAEDAKLQLSKDTYDDDLDNLLAQIGDQYADLFLAAKNLSDAILLSDILRVNTEITKAPLSASMIKRYDEHHQDLTLLKALVRQQLPEKYKEIFFDQSKNGYAGYIDGGASQEEFYKFIKPILEKMDGTEELLVKLNREDLLRKQRTFDNGSIPHQIHLGELHAILRRQEDFYPFLKDNREKIEKILTFRIPYYVGPLARGNSRFAWMTRKSEETITPWNFEEVVDKGASAQSFIERMTNFDKNLPNEKVLPKHSLLYEYFTVYNELTKVKYVTEGMRKPAFLSGEQKKAIVDLLFKTNRKVTVKQLKEDYFKKIECFDSVEISGVEDRFNASLGTYHDLLKIIKDKDFLDNEENEDILEDIVLTLTLFEDREMIEERLKTYAHLFDDKVMKQLKRRRYTGWGRLSRKLINGIRDKQSGKTILDFLKSDGFANRNFMQLIHDDSLTFKEDIQKAQVSGQGDSLHEHIANLAGSPAIKKGILQTVKVVDELVKVMGRHKPENIVIEMARENQTTQKGQKNSRERMKRIEEGIKELGSQILKEHPVENTQLQNEKLYLYYLQNGRDMYVDQELDINRLSDYDVDHIVPQSFLKDDSIDNKVLTRSDKARGKSDNVPSEEVVKKMKNYWRQLLNAKLITQRKFDNLTKAERGGLSELDKAGFIKRQLVETRQITKHVAQILDSRMNTKYDENDKLIREVKVITLKSKLVSDFRKDFQFYKVREINNYHHAHDAYLNAVVGTALIKKYPKLESEFVYGDYKVYDVRKMIAKSEQEIGKATAKYFFYSNIMNFFKTEITLANGEIRKRPLIETNGETGEIVWDKGRDFATVRKVLSMPQVNIVKKTEVQTGGFSKESILPKRNSDKLIARKKDWDPKKYGGFDSPTVAYSVLVVAKVEKGKSKKLKSVKELLGITIMERSSFEKNPIDFLEAKGYKEVKKDLIIKLPKYSLFELENGRKRMLASAGELQKGNELALPSKYVNFLYLASHYEKLKGSPEDNEQKQLFVEQHKHYLDEIIEQISEFSKRVILADANLDKVLSAYNKHRDKPIREQAENIIHLFTLTNLGAPAAFKYFDTTIDRKRYTSTKEVLDATLIHQSITGLYETRIDLSQLGGDGGGSSGSSGGLLGRDLLTKLKAQIQFSTEGPQVTWEDRPAMCLVLNLEEEYRLHEKPVPPSIDPSWLQLFPMVWAEKAGMGLANQVPPVVVELKSDASPVAVRQYPMSKEAREGIRPHIQRFLDLGILVPCQSPWNTPLLPVKKPGTNDYRPVQDLREVNKRVQDIHPTVPNPYNLLSSLPPSHTWYSVLDLKDAFFCLKLHPNSQPLFAFEWRDPEKGNTGQLTWTRLPQGFKNSPTLFNEALHRDLASFRALNPQVVMLQYVDDLLVAAPTYRDCKEGTRRLLQELSKLGYRVSAKKAQLCREEVTYLGYLLKGGKRWLTPARKATVMKIPTPTTPRQVREFLGKAGFCRLFIPGFASLAAPLYPLTRPKVPFTWTEAHQEAFGRIKEALLSAPALALPDLTKPFALYVDEKEGVARGVLTQTLGPWRRPVAYLSKKLDPVASGWPTCLKAIAAVALLLKDADKLTLGQNVLVIAPHNLESIVRQPPDRWMTNARMTHYQSLLLNERVSFAPPAILNPATLLPVESDDTPIHICSEILAEETGTRPDLRDQPLPGVPAWYTDGSSFIMDGRRQAGAAIVDNKRTVWASNLPEGTSAQKAELIALTQALRLAEGKSINIYTDSRYAFATAHVHGAIYKQRGWLTSAGKDIKNKEEILALLEAIHLPKRVAIIHCPGHQRGTDPVATGNRKADEAAKQAAQSTRILTETTKNAGKRTADGSEFEKRTADGSEFESPKKKAKVE

SEQ ID NO: 1748 - protein, 2122 aa, synthetic construct
MPAAKRVKLDGGDKKYSIGLDIGTNSVGWAVITDEYKVPSKKFKVLGNTDRHSIKKNLIGALLFDSGETAEATRLKRTARRRYTRRKNRICYLQEIFSNEMAKVDDSFFHRLEESFLVEEDKKHERHPIFGNIVDEVAYHEKYPTIYHLRKKLVDSTDKADLRLIYLALAHMIKFRGHFLIEGDLNPDNSDVDKLFIQLVQTYNQLFEENPINASGVDAKAILSARLSKSRRLENLIAQLPGEKKNGLFGNLIALSLGLTPNFKSNFDLAEDAKLQLSKDTYDDDLDNLLAQIGDQYADLFLAAKNLSDAILLSDILRVNTEITKAPLSASMIKRYDEHHQDLTLLKALVRQQLPEKYKEIFFDQSKNGYAGYIDGGASQEEFYKFIKPILEKMDGTEELLVKLNREDLLRKQRTFDNGSIPHQIHLGELHAILRRQEDFYPFLKDNREKIEKILTFRIPYYVGPLARGNSRFAWMTRKSEETITPWNFEEVVDKGASAQSFIERMTNFDKNLPNEKVLPKHSLLYEYFTVYNELTKVKYVTEGMRKPAFLSGEQKKAIVDLLFKTNRKVTVKQLKEDYFKKIECFDSVEISGVEDRFNASLGTYHDLLKIIKDKDFLDNEENEDILEDIVLTLTLFEDREMIEERLKTYAHLFDDKVMKQLKRRRYTGWGRLSRKLINGIRDKQSGKTILDFLKSDGFANRNFMQLIHDDSLTFKEDIQKAQVSGQGDSLHEHIANLAGSPAIKKGILQTVKVVDELVKVMGRHKPENIVIEMARENQTTQKGQKNSRERMKRIEEGIKELGSQILKEHPVENTQLQNEKLYLYYLQNGRDMYVDQELDINRLSDYDVDHIVPQSFLKDDSIDNKVLTRSDKARGKSDNVPSEEVVKKMKNYWRQLLNAKLITQRKFDNLTKAERGGLSELDKAGFIKRQLVETRQITKHVAQILDSRMNTKYDENDKLIREVKVITLKSKLVSDFRKDFQFYKVREINNYHHAHDAYLNAVVGTALIKKYPKLESEFVYGDYKVYDVRKMIAKSEQEIGKATAKYFFYSNIMNFFKTEITLANGEIRKRPLIETNGETGEIVWDKGRDFATVRKVLSMPQVNIVKKTEVQTGGFSKESILPKRNSDKLIARKKDWDPKKYGGFDSPTVAYSVLVVAKVEKGKSKKLKSVKELLGITIMERSSFEKNPIDFLEAKGYKEVKKDLIIKLPKYSLFELENGRKRMLASAGELQKGNELALPSKYVNFLYLASHYEKLKGSPEDNEQKQLFVEQHKHYLDEIIEQISEFSKRVILADANLDKVLSAYNKHRDKPIREQAENIIHLFTLTNLGAPAAFKYFDTTIDRKRYTSTKEVLDATLIHQSITGLYETRIDLSQLGGDGGGGGGGSGGLLGRDLLTKLKAQIQFSTEGPQVTWEDRPAMCLVLNLEEEYRLHEKPVPPSIDPSWLQLFPMVWAEKAGMGLANQVPPVVVELKSDASPVAVRQYPMSKEAREGIRPHIQRFLDLGILVPCQSPWNTPLLPVKKPGTNDYRPVQDLREVNKRVQDIHPTVPNPYNLLSSLPPSHTWYSVLDLKDAFFCLKLHPNSQPLFAFEWRDPEKGNTGQLTWTRLPQGFKNSPTLFNEALHRDLASFRALNPQVVMLQYVDDLLVAAPTYRDCKEGTRRLLQELSKLGYRVSAKKAQLCREEVTYLGYLLKGGKRWLTPARKATVMKIPTPTTPRQVREFLGKAGFCRLFIPGFASLAAPLYPLTRPKVPFTWTEAHQEAFGRIKEALLSAPALALPDLTKPFALYVDEKEGVARGVLTQTLGPWRRPVAYLSKKLDPVASGWPTCLKAIAAVALLLKDADKLTLGQNVLVIAPHNLESIVRQPPDRWMTNARMTHYQSLLLNERVSFAPPAILNPATLLPVESDDTPIHICSEILAEETGTRPDLRDQPLPGVPAWYTDGSSFIMDGRRQAGAAIVDNKRTVWASNLPEGTSAQKAELIALTQALRLAEGKSINIYTDSRYAFATAHVHGAIYKQRGWLTSAGKDIKNKEEILALLEAIHLPKRVAIIHCPGHQRGTDPVATGNRKADEAAKQAAQSTRILTETTKNAGKRTADGSEFEKRTADGSEFESPKKKAKVE

SEQ ID NO: 1749 - protein, 2125 aa, synthetic construct
MPAAKRVKLDGGDKKYSIGLDIGTNSVGWAVITDEYKVPSKKFKVLGNTDRHSIKKNLIGALLFDSGETAEATRLKRTARRRYTRRKNRICYLQEIFSNEMAKVDDSFFHRLEESFLVEEDKKHERHPIFGNIVDEVAYHEKYPTIYHLRKKLVDSTDKADLRLIYLALAHMIKFRGHFLIEGDLNPDNSDVDKLFIQLVQTYNQLFEENPINASGVDAKAILSARLSKSRRLENLIAQLPGEKKNGLFGNLIALSLGLTPNFKSNFDLAEDAKLQLSKDTYDDDLDNLLAQIGDQYADLFLAAKNLSDAILLSDILRVNTEITKAPLSASMIKRYDEHHQDLTLLKALVRQQLPEKYKEIFFDQSKNGYAGYIDGGASQEEFYKFIKPILEKMDGTEELLVKLNREDLLRKQRTFDNGSIPHQIHLGELHAILRRQEDFYPFLKDNREKIEKILTFRIPYYVGPLARGNSRFAWMTRKSEETITPWNFEEVVDKGASAQSFIERMTNFDKNLPNEKVLPKHSLLYEYFTVYNELTKVKYVTEGMRKPAFLSGEQKKAIVDLLFKTNRKVTVKQLKEDYFKKIECFDSVEISGVEDRFNASLGTYHDLLKIIKDKDFLDNEENEDILEDIVLTLTLFEDREMIEERLKTYAHLFDDKVMKQLKRRRYTGWGRLSRKLINGIRDKQSGKTILDFLKSDGFANRNFMQLIHDDSLTFKEDIQKAQVSGQGDSLHEHIANLAGSPAIKKGILQTVKVVDELVKVMGRHKPENIVIEMARENQTTQKGQKNSRERMKRIEEGIKELGSQILKEHPVENTQLQNEKLYLYYLQNGRDMYVDQELDINRLSDYDVDHIVPQSFLKDDSIDNKVLTRSDKARGKSDNVPSEEVVKKMKNYWRQLLNAKLITQRKFDNLTKAERGGLSELDKAGFIKRQLVETRQITKHVAQILDSRMNTKYDENDKLIREVKVITLKSKLVSDFRKDFQFYKVREINNYHHAHDAYLNAVVGTALIKKYPKLESEFVYGDYKVYDVRKMIAKSEQEIGKATAKYFFYSNIMNFFKTEITLANGEIRKRPLIETNGETGEIVWDKGRDFATVRKVLSMPQVNIVKKTEVQTGGFSKESILPKRNSDKLIARKKDWDPKKYGGFDSPTVAYSVLVVAKVEKGKSKKLKSVKELLGITIMERSSFEKNPIDFLEAKGYKEVKKDLIIKLPKYSLFELENGRKRMLASAGELQKGNELALPSKYVNFLYLASHYEKLKGSPEDNEQKQLFVEQHKHYLDEIIEQISEFSKRVILADANLDKVLSAYNKHRDKPIREQAENIIHLFTLTNLGAPAAFKYFDTTIDRKRYTSTKEVLDATLIHQSITGLYETRIDLSQLGGDGGPAPGSSGGSGGLLGRDLLTKLKAQIQFSTEGPQVTWEDRPAMCLVLNLEEEYRLHEKPVPPSIDPSWLQLFPMVWAEKAGMGLANQVPPVVVELKSDASPVAVRQYPMSKEAREGIRPHIQRFLDLGILVPCQSPWNTPLLPVKKPGTNDYRPVQDLREVNKRVQDIHPTVPNPYNLLSSLPPSHTWYSVLDLKDAFFCLKLHPNSQPLFAFEWRDPEKGNTGQLTWTRLPQGFKNSPTLFNEALHRDLASFRALNPQVVMLQYVDDLLVAAPTYRDCKEGTRRLLQELSKLGYRVSAKKAQLCREEVTYLGYLLKGGKRWLTPARKATVMKIPTPTTPRQVREFLGKAGFCRLFIPGFASLAAPLYPLTRPKVPFTWTEAHQEAFGRIKEALLSAPALALPDLTKPFALYVDEKEGVARGVLTQTLGPWRRPVAYLSKKLDPVASGWPTCLKAIAAVALLLKDADKLTLGQNVLVIAPHNLESIVRQPPDRWMTNARMTHYQSLLLNERVSFAPPAILNPATLLPVESDDTPIHICSEILAEETGTRPDLRDQPLPGVPAWYTDGSSFIMDGRRQAGAAIVDNKRTVWASNLPEGTSAQKAELIALTQALRLAEGKSINIYTDSRYAFATAHVHGAIYKQRGWLTSAGKDIKNKEEILALLEAIHLPKRVAIIHCPGHQRGTDPVATGNRKADEAAKQAAQSTRILTETTKNAGKRTADGSEFEKRTADGSEFESPKKKAKVE

SEQ ID NO: 1750 - protein, 2122 aa, synthetic construct
MPAAKRVKLDGGDKKYSIGLDIGTNSVGWAVITDEYKVPSKKFKVLGNTDRHSIKKNLIGALLFDSGETAEATRLKRTARRRYTRRKNRICYLQEIFSNEMAKVDDSFFHRLEESFLVEEDKKHERHPIFGNIVDEVAYHEKYPTIYHLRKKLVDSTDKADLRLIYLALAHMIKFRGHFLIEGDLNPDNSDVDKLFIQLVQTYNQLFEENPINASGVDAKAILSARLSKSRRLENLIAQLPGEKKNGLFGNLIALSLGLTPNFKSNFDLAEDAKLQLSKDTYDDDLDNLLAQIGDQYADLFLAAKNLSDAILLSDILRVNTEITKAPLSASMIKRYDEHHQDLTLLKALVRQQLPEKYKEIFFDQSKNGYAGYIDGGASQEEFYKFIKPILEKMDGTEELLVKLNREDLLRKQRTFDNGSIPHQIHLGELHAILRRQEDFYPFLKDNREKIEKILTFRIPYYVGPLARGNSRFAWMTRKSEETITPWNFEEVVDKGASAQSFIERMTNFDKNLPNEKVLPKHSLLYEYFTVYNELTKVKYVTEGMRKPAFLSGEQKKAIVDLLFKTNRKVTVKQLKEDYFKKIECFDSVEISGVEDRFNASLGTYHDLLKIIKDKDFLDNEENEDILEDIVLTLTLFEDREMIEERLKTYAHLFDDKVMKQLKRRRYTGWGRLSRKLINGIRDKQSGKTILDFLKSDGFANRNFMQLIHDDSLTFKEDIQKAQVSGQGDSLHEHIANLAGSPAIKKGILQTVKVVDELVKVMGRHKPENIVIEMARENQTTQKGQKNSRERMKRIEEGIKELGSQILKEHPVENTQLQNEKLYLYYLQNGRDMYVDQELDINRLSDYDVDHIVPQSFLKDDSIDNKVLTRSDKARGKSDNVPSEEVVKKMKNYWRQLLNAKLITQRKFDNLTKAERGGLSELDKAGFIKRQLVETRQITKHVAQILDSRMNTKYDENDKLIREVKVITLKSKLVSDFRKDFQFYKVREINNYHHAHDAYLNAVVGTALIKKYPKLESEFVYGDYKVYDVRKMIAKSEQEIGKATAKYFFYSNIMNFFKTEITLANGEIRKRPLIETNGETGEIVWDKGRDFATVRKVLSMPQVNIVKKTEVQTGGFSKESILPKRNSDKLIARKKDWDPKKYGGFDSPTVAYSVLVVAKVEKGKSKKLKSVKELLGITIMERSSFEKNPIDFLEAKGYKEVKKDLIIKLPKYSLFELENGRKRMLASAGELQKGNELALPSKYVNFLYLASHYEKLKGSPEDNEQKQLFVEQHKHYLDEIIEQISEFSKRVILADANLDKVLSAYNKHRDKPIREQAENIIHLFTLTNLGAPAAFKYFDTTIDRKRYTSTKEVLDATLIHQSITGLYETRIDLSQLGGDGGGGSGGSGGLLGRDLLTKLKAQIQFSTEGPQVTWEDRPAMCLVLNLEEEYRLHEKPVPPSIDPSWLQLFPMVWAEKAGMGLANQVPPVVVELKSDASPVAVRQYPMSKEAREGIRPHIQRFLDLGILVPCQSPWNTPLLPVKKPGTNDYRPVQDLREVNKRVQDIHPTVPNPYNLLSSLPPSHTWYSVLDLKDAFFCLKLHPNSQPLFAFEWRDPEKGNTGQLTWTRLPQGFKNSPTLFNEALHRDLASFRALNPQVVMLQYVDDLLVAAPTYRDCKEGTRRLLQELSKLGYRVSAKKAQLCREEVTYLGYLLKGGKRWLTPARKATVMKIPTPTTPRQVREFLGKAGFCRLFIPGFASLAAPLYPLTRPKVPFTWTEAHQEAFGRIKEALLSAPALALPDLTKPFALYVDEKEGVARGVLTQTLGPWRRPVAYLSKKLDPVASGWPTCLKAIAAVALLLKDADKLTLGQNVLVIAPHNLESIVRQPPDRWMTNARMTHYQSLLLNERVSFAPPAILNPATLLPVESDDTPIHICSEILAEETGTRPDLRDQPLPGVPAWYTDGSSFIMDGRRQAGAAIVDNKRTVWASNLPEGTSAQKAELIALTQALRLAEGKSINIYTDSRYAFATAHVHGAIYKQRGWLTSAGKDIKNKEEILALLEAIHLPKRVAIIHCPGHQRGTDPVATGNRKADEAAKQAAQSTRILTETTKNAGKRTADGSEFEKRTADGSEFESPKKKAKVE

SEQ ID NO: 1751 - protein, 2216 aa, synthetic construct
MPAAKRVKLDGGDKKYSIGLDIGTNSVGWAVITDEYKVPSKKFKVLGNTDRHSIKKNLIGALLFDSGETAEATRLKRTARRRYTRRKNRICYLQEIFSNEMAKVDDSFFHRLEESFLVEEDKKHERHPIFGNIVDEVAYHEKYPTIYHLRKKLVDSTDKADLRLIYLALAHMIKFRGHFLIEGDLNPDNSDVDKLFIQLVQTYNQLFEENPINASGVDAKAILSARLSKSRRLENLIAQLPGEKKNGLFGNLIALSLGLTPNFKSNFDLAEDAKLQLSKDTYDDDLDNLLAQIGDQYADLFLAAKNLSDAILLSDILRVNTEITKAPLSASMIKRYDEHHQDLTLLKALVRQQLPEKYKEIFFDQSKNGYAGYIDGGASQEEFYKFIKPILEKMDGTEELLVKLNREDLLRKQRTFDNGSIPHQIHLGELHAILRRQEDFYPFLKDNREKIEKILTFRIPYYVGPLARGNSRFAWMTRKSEETITPWNFEEVVDKGASAQSFIERMTNFDKNLPNEKVLPKHSLLYEYFTVYNELTKVKYVTEGMRKPAFLSGEQKKAIVDLLFKTNRKVTVKQLKEDYFKKIECFDSVEISGVEDRFNASLGTYHDLLKIIKDKDFLDNEENEDILEDIVLTLTLFEDREMIEERLKTYAHLFDDKVMKQLKRRRYTGWGRLSRKLINGIRDKQSGKTILDFLKSDGFANRNFMQLIHDDSLTFKEDIQKAQVSGQGDSLHEHIANLAGSPAIKKGILQTVKVVDELVKVMGRHKPENIVIEMARENQTTQKGQKNSRERMKRIEEGIKELGSQILKEHPVENTQLQNEKLYLYYLQNGRDMYVDQELDINRLSDYDVDHIVPQSFLKDDSIDNKVLTRSDKARGKSDNVPSEEVVKKMKNYWRQLLNAKLITQRKFDNLTKAERGGLSELDKAGFIKRQLVETRQITKHVAQILDSRMNTKYDENDKLIREVKVITLKSKLVSDFRKDFQFYKVREINNYHHAHDAYLNAVVGTALIKKYPKLESEFVYGDYKVYDVRKMIAKSEQEIGKATAKYFFYSNIMNFFKTEITLANGEIRKRPLIETNGETGEIVWDKGRDFATVRKVLSMPQVNIVKKTEVQTGGFSKESILPKRNSDKLIARKKDWDPKKYGGFDSPTVAYSVLVVAKVEKGKSKKLKSVKELLGITIMERSSFEKNPIDFLEAKGYKEVKKDLIIKLPKYSLFELENGRKRMLASAGELQKGNELALPSKYVNFLYLASHYEKLKGSPEDNEQKQLFVEQHKHYLDEIIEQISEFSKRVILADANLDKVLSAYNKHRDKPIREQAENIIHLFTLTNLGAPAAFKYFDTTIDRKRYTSTKEVLDATLIHQSITGLYETRIDLSQLGGDGGGGGGGSGSSGGTLGDQGSRGSDPLPEPRVTLTVEGIPTEFLVNTGAEHSVLTKPMGKMGSKRTVVAGATGSKVYPWTTKRLLKIGQKQVTHSFLVIPECPAPLLGRDLLTKLKAQIQFSTEGPQVTWEDRPAMCLVLNLEEEYRLHEKPVPPSIDPSWLQLFPMVWAEKAGMGLANQVPPVVVELKSDASPVAVRQYPMSKEAREGIRPHIQRFLDLGILVPCQSPWNTPLLPVKKPGTNDYRPVQDLREVNKRVQDIHPTVPNPYNLLSSLPPSHTWYSVLDLKDAFFCLKLHPNSQPLFAFEWRDPEKGNTGQLTWTRLPQGFKNSPTLFNEALHRDLASFRALNPQVVMLQYVDDLLVAAPTYRDCKEGTRRLLQELSKLGYRVSAKKAQLCREEVTYLGYLLKGGKRWLTPARKATVMKIPTPTTPRQVREFLGTAGFCRLWIPGFASLAAPLYPLTRPKVPFTWTEAHQEAFGRIKEALLSAPALALPDLTKPFALYVDEKEGVARGVLTQTLGPWRRPVAYLSKKLDPVASGWPTCLKAIAAVALLLKDADKLTLGQNVLVIAPHNLESIVRQPPDRWMTNARMTHYQSLLLNERVSFAPPAILNPATLLPVESDDTPIHICSEILAEETGTRPDLRDQPLPGVPAWYTDGSSFIMDGRRQAGAAIVDNKRTVWASNLPEGTSAQKAELIALTQALRLAEGKSINIYTDSRYAFATAHVHGAIYKQRGWLTSAGKDIKNKEEILALLEAIHLPKRVAIIHCPGHQRGTDPVATGNRKADEAAKQAAQSTRILTETTKNAGKRTADGSEFEKRTADGSEFESPKKKAKVE

SEQ ID NO: 1752 - protein, 2237 aa, synthetic construct
MPAAKRVKLDGGDKKYSIGLDIGTNSVGWAVITDEYKVPSKKFKVLGNTDRHSIKKNLIGALLFDSGETAEATRLKRTARRRYTRRKNRICYLQEIFSNEMAKVDDSFFHRLEESFLVEEDKKHERHPIFGNIVDEVAYHEKYPTIYHLRKKLVDSTDKADLRLIYLALAHMIKFRGHFLIEGDLNPDNSDVDKLFIQLVQTYNQLFEENPINASGVDAKAILSARLSKSRRLENLIAQLPGEKKNGLFGNLIALSLGLTPNFKSNFDLAEDAKLQLSKDTYDDDLDNLLAQIGDQYADLFLAAKNLSDAILLSDILRVNTEITKAPLSASMIKRYDEHHQDLTLLKALVRQQLPEKYKEIFFDQSKNGYAGYIDGGASQEEFYKFIKPILEKMDGTEELLVKLNREDLLRKQRTFDNGSIPHQIHLGELHAILRRQEDFYPFLKDNREKIEKILTFRIPYYVGPLARGNSRFAWMTRKSEETITPWNFEEVVDKGASAQSFIERMTNFDKNLPNEKVLPKHSLLYEYFTVYNELTKVKYVTEGMRKPAFLSGEQKKAIVDLLFKTNRKVTVKQLKEDYFKKIECFDSVEISGVEDRFNASLGTYHDLLKIIKDKDFLDNEENEDILEDIVLTLTLFEDREMIEERLKTYAHLFDDKVMKQLKRRRYTGWGRLSRKLINGIRDKQSGKTILDFLKSDGFANRNFMQLIHDDSLTFKEDIQKAQVSGQGDSLHEHIANLAGSPAIKKGILQTVKVVDELVKVMGRHKPENIVIEMARENQTTQKGQKNSRERMKRIEEGIKELGSQILKEHPVENTQLQNEKLYLYYLQNGRDMYVDQELDINRLSDYDVDHIVPQSFLKDDSIDNKVLTRSDKARGKSDNVPSEEVVKKMKNYWRQLLNAKLITQRKFDNLTKAERGGLSELDKAGFIKRQLVETRQITKHVAQILDSRMNTKYDENDKLIREVKVITLKSKLVSDFRKDFQFYKVREINNYHHAHDAYLNAVVGTALIKKYPKLESEFVYGDYKVYDVRKMIAKSEQEIGKATAKYFFYSNIMNFFKTEITLANGEIRKRPLIETNGETGEIVWDKGRDFATVRKVLSMPQVNIVKKTEVQTGGFSKESILPKRNSDKLIARKKDWDPKKYGGFDSPTVAYSVLVVAKVEKGKSKKLKSVKELLGITIMERSSFEKNPIDFLEAKGYKEVKKDLIIKLPKYSLFELENGRKRMLASAGELQKGNELALPSKYVNFLYLASHYEKLKGSPEDNEQKQLFVEQHKHYLDEIIEQISEFSKRVILADANLDKVLSAYNKHRDKPIREQAENIIHLFTLTNLGAPAAFKYFDTTIDRKRYTSTKEVLDATLIHQSITGLYETRIDLSQLGGDGGGGGGSGGGGSGGGGSGGGGSGGGGSGGGGSGGTLGDQGSRGSDPLPEPRVTLTVEGIPTEFLVNTGAEHSVLTKPMGKMGSKRTVVAGATGSKVYPWTTKRLLKIGQKQVTHSFLVIPECPAPLLGRDLLTKLKAQIQFSTEGPQVTWEDRPAMCLVLNLEEEYRLHEKPVPPSIDPSWLQLFPMVWAEKAGMGLANQVPPVVVELKSDASPVAVRQYPMSKEAREGIRPHIQRFLDLGILVPCQSPWNTPLLPVKKPGTNDYRPVQDLREVNKRVQDIHPTVPNPYNLLSSLPPSHTWYSVLDLKDAFFCLKLHPNSQPLFAFEWRDPEKGNTGQLTWTRLPQGFKNSPTLFNEALHRDLASFRALNPQVVMLQYVDDLLVAAPTYRDCKEGTRRLLQELSKLGYRVSAKKAQLCREEVTYLGYLLKGGKRWLTPARKATVMKIPTPTTPRQVREFLGTAGFCRLWIPGFASLAAPLYPLTRPKVPFTWTEAHQEAFGRIKEALLSAPALALPDLTKPFALYVDEKEGVARGVLTQTLGPWRRPVAYLSKKLDPVASGWPTCLKAIAAVALLLKDADKLTLGQNVLVIAPHNLESIVRQPPDRWMTNARMTHYQSLLLNERVSFAPPAILNPATLLPVESDDTPIHICSEILAEETGTRPDLRDQPLPGVPAWYTDGSSFIMDGRRQAGAAIVDNKRTVWASNLPEGTSAQKAELIALTQALRLAEGKSINIYTDSRYAFATAHVHGAIYKQRGWLTSAGKDIKNKEEILALLEAIHLPKRVAIIHCPGHQRGTDPVATGNRKADEAAKQAAQSTRILTETTKNAGKRTADGSEFEKRTADGSEFESPKKKAKVE

SEQ ID NO: 1753 - protein, 2218 aa, synthetic construct
MPAAKRVKLDGGDKKYSIGLDIGTNSVGWAVITDEYKVPSKKFKVLGNTDRHSIKKNLIGALLFDSGETAEATRLKRTARRRYTRRKNRICYLQEIFSNEMAKVDDSFFHRLEESFLVEEDKKHERHPIFGNIVDEVAYHEKYPTIYHLRKKLVDSTDKADLRLIYLALAHMIKFRGHFLIEGDLNPDNSDVDKLFIQLVQTYNQLFEENPINASGVDAKAILSARLSKSRRLENLIAQLPGEKKNGLFGNLIALSLGLTPNFKSNFDLAEDAKLQLSKDTYDDDLDNLLAQIGDQYADLFLAAKNLSDAILLSDILRVNTEITKAPLSASMIKRYDEHHQDLTLLKALVRQQLPEKYKEIFFDQSKNGYAGYIDGGASQEEFYKFIKPILEKMDGTEELLVKLNREDLLRKQRTFDNGSIPHQIHLGELHAILRRQEDFYPFLKDNREKIEKILTFRIPYYVGPLARGNSRFAWMTRKSEETITPWNFEEVVDKGASAQSFIERMTNFDKNLPNEKVLPKHSLLYEYFTVYNELTKVKYVTEGMRKPAFLSGEQKKAIVDLLFKTNRKVTVKQLKEDYFKKIECFDSVEISGVEDRFNASLGTYHDLLKIIKDKDFLDNEENEDILEDIVLTLTLFEDREMIEERLKTYAHLFDDKVMKQLKRRRYTGWGRLSRKLINGIRDKQSGKTILDFLKSDGFANRNFMQLIHDDSLTFKEDIQKAQVSGQGDSLHEHIANLAGSPAIKKGILQTVKVVDELVKVMGRHKPENIVIEMARENQTTQKGQKNSRERMKRIEEGIKELGSQILKEHPVENTQLQNEKLYLYYLQNGRDMYVDQELDINRLSDYDVDHIVPQSFLKDDSIDNKVLTRSDKARGKSDNVPSEEVVKKMKNYWRQLLNAKLITQRKFDNLTKAERGGLSELDKAGFIKRQLVETRQITKHVAQILDSRMNTKYDENDKLIREVKVITLKSKLVSDFRKDFQFYKVREINNYHHAHDAYLNAVVGTALIKKYPKLESEFVYGDYKVYDVRKMIAKSEQEIGKATAKYFFYSNIMNFFKTEITLANGEIRKRPLIETNGETGEIVWDKGRDFATVRKVLSMPQVNIVKKTEVQTGGFSKESILPKRNSDKLIARKKDWDPKKYGGFDSPTVAYSVLVVAKVEKGKSKKLKSVKELLGITIMERSSFEKNPIDFLEAKGYKEVKKDLIIKLPKYSLFELENGRKRMLASAGELQKGNELALPSKYVNFLYLASHYEKLKGSPEDNEQKQLFVEQHKHYLDEIIEQISEFSKRVILADANLDKVLSAYNKHRDKPIREQAENIIHLFTLTNLGAPAAFKYFDTTIDRKRYTSTKEVLDATLIHQSITGLYETRIDLSQLGGDGGEAAAKGGGPAPGGTLGDQGSRGSDPLPEPRVTLTVEGIPTEFLVNTGAEHSVLTKPMGKMGSKRTVVAGATGSKVYPWTTKRLLKIGQKQVTHSFLVIPECPAPLLGRDLLTKLKAQIQFSTEGPQVTWEDRPAMCLVLNLEEEYRLHEKPVPPSIDPSWLQLFPMVWAEKAGMGLANQVPPVVVELKSDASPVAVRQYPMSKEAREGIRPHIQRFLDLGILVPCQSPWNTPLLPVKKPGTNDYRPVQDLREVNKRVQDIHPTVPNPYNLLSSLPPSHTWYSVLDLKDAFFCLKLHPNSQPLFAFEWRDPEKGNTGQLTWTRLPQGFKNSPTLFNEALHRDLASFRALNPQVVMLQYVDDLLVAAPTYRDCKEGTRRLLQELSKLGYRVSAKKAQLCREEVTYLGYLLKGGKRWLTPARKATVMKIPTPTTPRQVREFLGTAGFCRLWIPGFASLAAPLYPLTRPKVPFTWTEAHQEAFGRIKEALLSAPALALPDLTKPFALYVDEKEGVARGVLTQTLGPWRRPVAYLSKKLDPVASGWPTCLKAIAAVALLLKDADKLTLGQNVLVIAPHNLESIVRQPPDRWMTNARMTHYQSLLLNERVSFAPPAILNPATLLPVESDDTPIHICSEILAEETGTRPDLRDQPLPGVPAWYTDGSSFIMDGRRQAGAAIVDNKRTVWASNLPEGTSAQKAELIALTQALRLAEGKSINIYTDSRYAFATAHVHGAIYKQRGWLTSAGKDIKNKEEILALLEAIHLPKRVAIIHCPGHQRGTDPVATGNRKADEAAKQAAQSTRILTETTKNAGKRTADGSEFEKRTADGSEFESPKKKAKVE

SEQ ID NO: 1754 - protein, 2218 aa, synthetic construct
MPAAKRVKLDGGDKKYSIGLDIGTNSVGWAVITDEYKVPSKKFKVLGNTDRHSIKKNLIGALLFDSGETAEATRLKRTARRRYTRRKNRICYLQEIFSNEMAKVDDSFFHRLEESFLVEEDKKHERHPIFGNIVDEVAYHEKYPTIYHLRKKLVDSTDKADLRLIYLALAHMIKFRGHFLIEGDLNPDNSDVDKLFIQLVQTYNQLFEENPINASGVDAKAILSARLSKSRRLENLIAQLPGEKKNGLFGNLIALSLGLTPNFKSNFDLAEDAKLQLSKDTYDDDLDNLLAQIGDQYADLFLAAKNLSDAILLSDILRVNTEITKAPLSASMIKRYDEHHQDLTLLKALVRQQLPEKYKEIFFDQSKNGYAGYIDGGASQEEFYKFIKPILEKMDGTEELLVKLNREDLLRKQRTFDNGSIPHQIHLGELHAILRRQEDFYPFLKDNREKIEKILTFRIPYYVGPLARGNSRFAWMTRKSEETITPWNFEEVVDKGASAQSFIERMTNFDKNLPNEKVLPKHSLLYEYFTVYNELTKVKYVTEGMRKPAFLSGEQKKAIVDLLFKTNRKVTVKQLKEDYFKKIECFDSVEISGVEDRFNASLGTYHDLLKIIKDKDFLDNEENEDILEDIVLTLTLFEDREMIEERLKTYAHLFDDKVMKQLKRRRYTGWGRLSRKLINGIRDKQSGKTILDFLKSDGFANRNFMQLIHDDSLTFKEDIQKAQVSGQGDSLHEHIANLAGSPAIKKGILQTVKVVDELVKVMGRHKPENIVIEMARENQTTQKGQKNSRERMKRIEEGIKELGSQILKEHPVENTQLQNEKLYLYYLQNGRDMYVDQELDINRLSDYDVDHIVPQSFLKDDSIDNKVLTRSDKARGKSDNVPSEEVVKKMKNYWRQLLNAKLITQRKFDNLTKAERGGLSELDKAGFIKRQLVETRQITKHVAQILDSRMNTKYDENDKLIREVKVITLKSKLVSDFRKDFQFYKVREINNYHHAHDAYLNAVVGTALIKKYPKLESEFVYGDYKVYDVRKMIAKSEQEIGKATAKYFFYSNIMNFFKTEITLANGEIRKRPLIETNGETGEIVWDKGRDFATVRKVLSMPQVNIVKKTEVQTGGFSKESILPKRNSDKLIARKKDWDPKKYGGFDSPTVAYSVLVVAKVEKGKSKKLKSVKELLGITIMERSSFEKNPIDFLEAKGYKEVKKDLIIKLPKYSLFELENGRKRMLASAGELQKGNELALPSKYVNFLYLASHYEKLKGSPEDNEQKQLFVEQHKHYLDEIIEQISEFSKRVILADANLDKVLSAYNKHRDKPIREQAENIIHLFTLTNLGAPAAFKYFDTTIDRKRYTSTKEVLDATLIHQSITGLYETRIDLSQLGGDGGPAPGGSEAAAKGGTLGDQGSRGSDPLPEPRVTLTVEGIPTEFLVNTGAEHSVLTKPMGKMGSKRTVVAGATGSKVYPWTTKRLLKIGQKQVTHSFLVIPECPAPLLGRDLLTKLKAQIQFSTEGPQVTWEDRPAMCLVLNLEEEYRLHEKPVPPSIDPSWLQLFPMVWAEKAGMGLANQVPPVVVELKSDASPVAVRQYPMSKEAREGIRPHIQRFLDLGILVPCQSPWNTPLLPVKKPGTNDYRPVQDLREVNKRVQDIHPTVPNPYNLLSSLPPSHTWYSVLDLKDAFFCLKLHPNSQPLFAFEWRDPEKGNTGQLTWTRLPQGFKNSPTLFNEALHRDLASFRALNPQVVMLQYVDDLLVAAPTYRDCKEGTRRLLQELSKLGYRVSAKKAQLCREEVTYLGYLLKGGKRWLTPARKATVMKIPTPTTPRQVREFLGTAGFCRLWIPGFASLAAPLYPLTRPKVPFTWTEAHQEAFGRIKEALLSAPALALPDLTKPFALYVDEKEGVARGVLTQTLGPWRRPVAYLSKKLDPVASGWPTCLKAIAAVALLLKDADKLTLGQNVLVIAPHNLESIVRQPPDRWMTNARMTHYQSLLLNERVSFAPPAILNPATLLPVESDDTPIHICSEILAEETGTRPDLRDQPLPGVPAWYTDGSSFIMDGRRQAGAAIVDNKRTVWASNLPEGTSAQKAELIALTQALRLAEGKSINIYTDSRYAFATAHVHGAIYKQRGWLTSAGKDIKNKEEILALLEAIHLPKRVAIIHCPGHQRGTDPVATGNRKADEAAKQAAQSTRILTETTKNAGKRTADGSEFEKRTADGSEFESPKKKAKVE

SEQ ID NO: 1755 - protein, 2219 aa, synthetic construct
MPAAKRVKLDGGDKKYSIGLDIGTNSVGWAVITDEYKVPSKKFKVLGNTDRHSIKKNLIGALLFDSGETAEATRLKRTARRRYTRRKNRICYLQEIFSNEMAKVDDSFFHRLEESFLVEEDKKHERHPIFGNIVDEVAYHEKYPTIYHLRKKLVDSTDKADLRLIYLALAHMIKFRGHFLIEGDLNPDNSDVDKLFIQLVQTYNQLFEENPINASGVDAKAILSARLSKSRRLENLIAQLPGEKKNGLFGNLIALSLGLTPNFKSNFDLAEDAKLQLSKDTYDDDLDNLLAQIGDQYADLFLAAKNLSDAILLSDILRVNTEITKAPLSASMIKRYDEHHQDLTLLKALVRQQLPEKYKEIFFDQSKNGYAGYIDGGASQEEFYKFIKPILEKMDGTEELLVKLNREDLLRKQRTFDNGSIPHQIHLGELHAILRRQEDFYPFLKDNREKIEKILTFRIPYYVGPLARGNSRFAWMTRKSEETITPWNFEEVVDKGASAQSFIERMTNFDKNLPNEKVLPKHSLLYEYFTVYNELTKVKYVTEGMRKPAFLSGEQKKAIVDLLFKTNRKVTVKQLKEDYFKKIECFDSVEISGVEDRFNASLGTYHDLLKIIKDKDFLDNEENEDILEDIVLTLTLFEDREMIEERLKTYAHLFDDKVMKQLKRRRYTGWGRLSRKLINGIRDKQSGKTILDFLKSDGFANRNFMQLIHDDSLTFKEDIQKAQVSGQGDSLHEHIANLAGSPAIKKGILQTVKVVDELVKVMGRHKPENIVIEMARENQTTQKGQKNSRERMKRIEEGIKELGSQILKEHPVENTQLQNEKLYLYYLQNGRDMYVDQELDINRLSDYDVDHIVPQSFLKDDSIDNKVLTRSDKARGKSDNVPSEEVVKKMKNYWRQLLNAKLITQRKFDNLTKAERGGLSELDKAGFIKRQLVETRQITKHVAQILDSRMNTKYDENDKLIREVKVITLKSKLVSDFRKDFQFYKVREINNYHHAHDAYLNAVVGTALIKKYPKLESEFVYGDYKVYDVRKMIAKSEQEIGKATAKYFFYSNIMNFFKTEITLANGEIRKRPLIETNGETGEIVWDKGRDFATVRKVLSMPQVNIVKKTEVQTGGFSKESILPKRNSDKLIARKKDWDPKKYGGFDSPTVAYSVLVVAKVEKGKSKKLKSVKELLGITIMERSSFEKNPIDFLEAKGYKEVKKDLIIKLPKYSLFELENGRKRMLASAGELQKGNELALPSKYVNFLYLASHYEKLKGSPEDNEQKQLFVEQHKHYLDEIIEQISEFSKRVILADANLDKVLSAYNKHRDKPIREQAENIIHLFTLTNLGAPAAFKYFDTTIDRKRYTSTKEVLDATLIHQSITGLYETRIDLSQLGGDGGGGSGGSGGSGGSGGTLGDQGSRGSDPLPEPRVTLTVEGIPTEFLVNTGAEHSVLTKPMGKMGSKRTVVAGATGSKVYPWTTKRLLKIGQKQVTHSFLVIPECPAPLLGRDLLTKLKAQIQFSTEGPQVTWEDRPAMCLVLNLEEEYRLHEKPVPPSIDPSWLQLFPMVWAEKAGMGLANQVPPVVVELKSDASPVAVRQYPMSKEAREGIRPHIQRFLDLGILVPCQSPWNTPLLPVKKPGTNDYRPVQDLREVNKRVQDIHPTVPNPYNLLSSLPPSHTWYSVLDLKDAFFCLKLHPNSQPLFAFEWRDPEKGNTGQLTWTRLPQGFKNSPTLFNEALHRDLASFRALNPQVVMLQYVDDLLVAAPTYRDCKEGTRRLLQELSKLGYRVSAKKAQLCREEVTYLGYLLKGGKRWLTPARKATVMKIPTPTTPRQVREFLGTAGFCRLWIPGFASLAAPLYPLTRPKVPFTWTEAHQEAFGRIKEALLSAPALALPDLTKPFALYVDEKEGVARGVLTQTLGPWRRPVAYLSKKLDPVASGWPTCLKAIAAVALLLKDADKLTLGQNVLVIAPHNLESIVRQPPDRWMTNARMTHYQSLLLNERVSFAPPAILNPATLLPVESDDTPIHICSEILAEETGTRPDLRDQPLPGVPAWYTDGSSFIMDGRRQAGAAIVDNKRTVWASNLPEGTSAQKAELIALTQALRLAEGKSINIYTDSRYAFATAHVHGAIYKQRGWLTSAGKDIKNKEEILALLEAIHLPKRVAIIHCPGHQRGTDPVATGNRKADEAAKQAAQSTRILTETTKNAGKRTADGSEFEKRTADGSEFESPKKKAKVE

SEQ ID NO: 1756 - protein, 2218 aa, synthetic construct
MPAAKRVKLDGGDKKYSIGLDIGTNSVGWAVITDEYKVPSKKFKVLGNTDRHSIKKNLIGALLFDSGETAEATRLKRTARRRYTRRKNRICYLQEIFSNEMAKVDDSFFHRLEESFLVEEDKKHERHPIFGNIVDEVAYHEKYPTIYHLRKKLVDSTDKADLRLIYLALAHMIKFRGHFLIEGDLNPDNSDVDKLFIQLVQTYNQLFEENPINASGVDAKAILSARLSKSRRLENLIAQLPGEKKNGLFGNLIALSLGLTPNFKSNFDLAEDAKLQLSKDTYDDDLDNLLAQIGDQYADLFLAAKNLSDAILLSDILRVNTEITKAPLSASMIKRYDEHHQDLTLLKALVRQQLPEKYKEIFFDQSKNGYAGYIDGGASQEEFYKFIKPILEKMDGTEELLVKLNREDLLRKQRTFDNGSIPHQIHLGELHAILRRQEDFYPFLKDNREKIEKILTFRIPYYVGPLARGNSRFAWMTRKSEETITPWNFEEVVDKGASAQSFIERMTNFDKNLPNEKVLPKHSLLYEYFTVYNELTKVKYVTEGMRKPAFLSGEQKKAIVDLLFKTNRKVTVKQLKEDYFKKIECFDSVEISGVEDRFNASLGTYHDLLKIIKDKDFLDNEENEDILEDIVLTLTLFEDREMIEERLKTYAHLFDDKVMKQLKRRRYTGWGRLSRKLINGIRDKQSGKTILDFLKSDGFANRNFMQLIHDDSLTFKEDIQKAQVSGQGDSLHEHIANLAGSPAIKKGILQTVKVVDELVKVMGRHKPENIVIEMARENQTTQKGQKNSRERMKRIEEGIKELGSQILKEHPVENTQLQNEKLYLYYLQNGRDMYVDQELDINRLSDYDVDHIVPQSFLKDDSIDNKVLTRSDKARGKSDNVPSEEVVKKMKNYWRQLLNAKLITQRKFDNLTKAERGGLSELDKAGFIKRQLVETRQITKHVAQILDSRMNTKYDENDKLIREVKVITLKSKLVSDFRKDFQFYKVREINNYHHAHDAYLNAVVGTALIKKYPKLESEFVYGDYKVYDVRKMIAKSEQEIGKATAKYFFYSNIMNFFKTEITLANGEIRKRPLIETNGETGEIVWDKGRDFATVRKVLSMPQVNIVKKTEVQTGGFSKESILPKRNSDKLIARKKDWDPKKYGGFDSPTVAYSVLVVAKVEKGKSKKLKSVKELLGITIMERSSFEKNPIDFLEAKGYKEVKKDLIIKLPKYSLFELENGRKRMLASAGELQKGNELALPSKYVNFLYLASHYEKLKGSPEDNEQKQLFVEQHKHYLDEIIEQISEFSKRVILADANLDKVLSAYNKHRDKPIREQAENIIHLFTLTNLGAPAAFKYFDTTIDRKRYTSTKEVLDATLIHQSITGLYETRIDLSQLGGDGGEAAAKGSSGGGGGTLGDQGSRGSDPLPEPRVTLTVEGIPTEFLVNTGAEHSVLTKPMGKMGSKRTVVAGATGSKVYPWTTKRLLKIGQKQVTHSFLVIPECPAPLLGRDLLTKLKAQIQFSTEGPQVTWEDRPAMCLVLNLEEEYRLHEKPVPPSIDPSWLQLFPMVWAEKAGMGLANQVPPVVVELKSDASPVAVRQYPMSKEAREGIRPHIQRFLDLGILVPCQSPWNTPLLPVKKPGTNDYRPVQDLREVNKRVQDIHPTVPNPYNLLSSLPPSHTWYSVLDLKDAFFCLKLHPNSQPLFAFEWRDPEKGNTGQLTWTRLPQGFKNSPTLFNEALHRDLASFRALNPQVVMLQYVDDLLVAAPTYRDCKEGTRRLLQELSKLGYRVSAKKAQLCREEVTYLGYLLKGGKRWLTPARKATVMKIPTPTTPRQVREFLGTAGFCRLWIPGFASLAAPLYPLTRPKVPFTWTEAHQEAFGRIKEALLSAPALALPDLTKPFALYVDEKEGVARGVLTQTLGPWRRPVAYLSKKLDPVASGWPTCLKAIAAVALLLKDADKLTLGQNVLVIAPHNLESIVRQPPDRWMTNARMTHYQSLLLNERVSFAPPAILNPATLLPVESDDTPIHICSEILAEETGTRPDLRDQPLPGVPAWYTDGSSFIMDGRRQAGAAIVDNKRTVWASNLPEGTSAQKAELIALTQALRLAEGKSINIYTDSRYAFATAHVHGAIYKQRGWLTSAGKDIKNKEEILALLEAIHLPKRVAIIHCPGHQRGTDPVATGNRKADEAAKQAAQSTRILTETTKNAGKRTADGSEFEKRTADGSEFESPKKKAKVE

SEQ ID NO: 1757 - protein, 2216 aa, synthetic construct
MPAAKRVKLDGGDKKYSIGLDIGTNSVGWAVITDEYKVPSKKFKVLGNTDRHSIKKNLIGALLFDSGETAEATRLKRTARRRYTRRKNRICYLQEIFSNEMAKVDDSFFHRLEESFLVEEDKKHERHPIFGNIVDEVAYHEKYPTIYHLRKKLVDSTDKADLRLIYLALAHMIKFRGHFLIEGDLNPDNSDVDKLFIQLVQTYNQLFEENPINASGVDAKAILSARLSKSRRLENLIAQLPGEKKNGLFGNLIALSLGLTPNFKSNFDLAEDAKLQLSKDTYDDDLDNLLAQIGDQYADLFLAAKNLSDAILLSDILRVNTEITKAPLSASMIKRYDEHHQDLTLLKALVRQQLPEKYKEIFFDQSKNGYAGYIDGGASQEEFYKFIKPILEKMDGTEELLVKLNREDLLRKQRTFDNGSIPHQIHLGELHAILRRQEDFYPFLKDNREKIEKILTFRIPYYVGPLARGNSRFAWMTRKSEETITPWNFEEVVDKGASAQSFIERMTNFDKNLPNEKVLPKHSLLYEYFTVYNELTKVKYVTEGMRKPAFLSGEQKKAIVDLLFKTNRKVTVKQLKEDYFKKIECFDSVEISGVEDRFNASLGTYHDLLKIIKDKDFLDNEENEDILEDIVLTLTLFEDREMIEERLKTYAHLFDDKVMKQLKRRRYTGWGRLSRKLINGIRDKQSGKTILDFLKSDGFANRNFMQLIHDDSLTFKEDIQKAQVSGQGDSLHEHIANLAGSPAIKKGILQTVKVVDELVKVMGRHKPENIVIEMARENQTTQKGQKNSRERMKRIEEGIKELGSQILKEHPVENTQLQNEKLYLYYLQNGRDMYVDQELDINRLSDYDVDHIVPQSFLKDDSIDNKVLTRSDKARGKSDNVPSEEVVKKMKNYWRQLLNAKLITQRKFDNLTKAERGGLSELDKAGFIKRQLVETRQITKHVAQILDSRMNTKYDENDKLIREVKVITLKSKLVSDFRKDFQFYKVREINNYHHAHDAYLNAVVGTALIKKYPKLESEFVYGDYKVYDVRKMIAKSEQEIGKATAKYFFYSNIMNFFKTEITLANGEIRKRPLIETNGETGEIVWDKGRDFATVRKVLSMPQVNIVKKTEVQTGGFSKESILPKRNSDKLIARKKDWDPKKYGGFDSPTVAYSVLVVAKVEKGKSKKLKSVKELLGITIMERSSFEKNPIDFLEAKGYKEVKKDLIIKLPKYSLFELENGRKRMLASAGELQKGNELALPSKYVNFLYLASHYEKLKGSPEDNEQKQLFVEQHKHYLDEIIEQISEFSKRVILADANLDKVLSAYNKHRDKPIREQAENIIHLFTLTNLGAPAAFKYFDTTIDRKRYTSTKEVLDATLIHQSITGLYETRIDLSQLGGDGGGGSPAPGSSGGTLGDQGSRGSDPLPEPRVTLTVEGIPTEFLVNTGAEHSVLTKPMGKMGSKRTVVAGATGSKVYPWTTKRLLKIGQKQVTHSFLVIPECPAPLLGRDLLTKLKAQIQFSTEGPQVTWEDRPAMCLVLNLEEEYRLHEKPVPPSIDPSWLQLFPMVWAEKAGMGLANQVPPVVVELKSDASPVAVRQYPMSKEAREGIRPHIQRFLDLGILVPCQSPWNTPLLPVKKPGTNDYRPVQDLREVNKRVQDIHPTVPNPYNLLSSLPPSHTWYSVLDLKDAFFCLKLHPNSQPLFAFEWRDPEKGNTGQLTWTRLPQGFKNSPTLFNEALHRDLASFRALNPQVVMLQYVDDLLVAAPTYRDCKEGTRRLLQELSKLGYRVSAKKAQLCREEVTYLGYLLKGGKRWLTPARKATVMKIPTPTTPRQVREFLGTAGFCRLWIPGFASLAAPLYPLTRPKVPFTWTEAHQEAFGRIKEALLSAPALALPDLTKPFALYVDEKEGVARGVLTQTLGPWRRPVAYLSKKLDPVASGWPTCLKAIAAVALLLKDADKLTLGQNVLVIAPHNLESIVRQPPDRWMTNARMTHYQSLLLNERVSFAPPAILNPATLLPVESDDTPIHICSEILAEETGTRPDLRDQPLPGVPAWYTDGSSFIMDGRRQAGAAIVDNKRTVWASNLPEGTSAQKAELIALTQALRLAEGKSINIYTDSRYAFATAHVHGAIYKQRGWLTSAGKDIKNKEEILALLEAIHLPKRVAIIHCPGHQRGTDPVATGNRKADEAAKQAAQSTRILTETTKNAGKRTADGSEFEKRTADGSEFESPKKKAKVE

SEQ ID NO: 1758 - protein, 2222 aa, synthetic construct
MPAAKRVKLDGGDKKYSIGLDIGTNSVGWAVITDEYKVPSKKFKVLGNTDRHSIKKNLIGALLFDSGETAEATRLKRTARRRYTRRKNRICYLQEIFSNEMAKVDDSFFHRLEESFLVEEDKKHERHPIFGNIVDEVAYHEKYPTIYHLRKKLVDSTDKADLRLIYLALAHMIKFRGHFLIEGDLNPDNSDVDKLFIQLVQTYNQLFEENPINASGVDAKAILSARLSKSRRLENLIAQLPGEKKNGLFGNLIALSLGLTPNFKSNFDLAEDAKLQLSKDTYDDDLDNLLAQIGDQYADLFLAAKNLSDAILLSDILRVNTEITKAPLSASMIKRYDEHHQDLTLLKALVRQQLPEKYKEIFFDQSKNGYAGYIDGGASQEEFYKFIKPILEKMDGTEELLVKLNREDLLRKQRTFDNGSIPHQIHLGELHAILRRQEDFYPFLKDNREKIEKILTFRIPYYVGPLARGNSRFAWMTRKSEETITPWNFEEVVDKGASAQSFIERMTNFDKNLPNEKVLPKHSLLYEYFTVYNELTKVKYVTEGMRKPAFLSGEQKKAIVDLLFKTNRKVTVKQLKEDYFKKIECFDSVEISGVEDRFNASLGTYHDLLKIIKDKDFLDNEENEDILEDIVLTLTLFEDREMIEERLKTYAHLFDDKVMKQLKRRRYTGWGRLSRKLINGIRDKQSGKTILDFLKSDGFANRNFMQLIHDDSLTFKEDIQKAQVSGQGDSLHEHIANLAGSPAIKKGILQTVKVVDELVKVMGRHKPENIVIEMARENQTTQKGQKNSRERMKRIEEGIKELGSQILKEHPVENTQLQNEKLYLYYLQNGRDMYVDQELDINRLSDYDVDHIVPQSFLKDDSIDNKVLTRSDKARGKSDNVPSEEVVKKMKNYWRQLLNAKLITQRKFDNLTKAERGGLSELDKAGFIKRQLVETRQITKHVAQILDSRMNTKYDENDKLIREVKVITLKSKLVSDFRKDFQFYKVREINNYHHAHDAYLNAVVGTALIKKYPKLESEFVYGDYKVYDVRKMIAKSEQEIGKATAKYFFYSNIMNFFKTEITLANGEIRKRPLIETNGETGEIVWDKGRDFATVRKVLSMPQVNIVKKTEVQTGGFSKESILPKRNSDKLIARKKDWDPKKYGGFDSPTVAYSVLVVAKVEKGKSKKLKSVKELLGITIMERSSFEKNPIDFLEAKGYKEVKKDLIIKLPKYSLFELENGRKRMLASAGELQKGNELALPSKYVNFLYLASHYEKLKGSPEDNEQKQLFVEQHKHYLDEIIEQISEFSKRVILADANLDKVLSAYNKHRDKPIREQAENIIHLFTLTNLGAPAAFKYFDTTIDRKRYTSTKEVLDATLIHQSITGLYETRIDLSQLGGDGGGGGGSGGGGSGGGGSGGTLGDQGSRGSDPLPEPRVTLTVEGIPTEFLVNTGAEHSVLTKPMGKMGSKRTVVAGATGSKVYPWTTKRLLKIGQKQVTHSFLVIPECPAPLLGRDLLTKLKAQIQFSTEGPQVTWEDRPAMCLVLNLEEEYRLHEKPVPPSIDPSWLQLFPMVWAEKAGMGLANQVPPVVVELKSDASPVAVRQYPMSKEAREGIRPHIQRFLDLGILVPCQSPWNTPLLPVKKPGTNDYRPVQDLREVNKRVQDIHPTVPNPYNLLSSLPPSHTWYSVLDLKDAFFCLKLHPNSQPLFAFEWRDPEKGNTGQLTWTRLPQGFKNSPTLFNEALHRDLASFRALNPQVVMLQYVDDLLVAAPTYRDCKEGTRRLLQELSKLGYRVSAKKAQLCREEVTYLGYLLKGGKRWLTPARKATVMKIPTPTTPRQVREFLGTAGFCRLWIPGFASLAAPLYPLTRPKVPFTWTEAHQEAFGRIKEALLSAPALALPDLTKPFALYVDEKEGVARGVLTQTLGPWRRPVAYLSKKLDPVASGWPTCLKAIAAVALLLKDADKLTLGQNVLVIAPHNLESIVRQPPDRWMTNARMTHYQSLLLNERVSFAPPAILNPATLLPVESDDTPIHICSEILAEETGTRPDLRDQPLPGVPAWYTDGSSFIMDGRRQAGAAIVDNKRTVWASNLPEGTSAQKAELIALTQALRLAEGKSINIYTDSRYAFATAHVHGAIYKQRGWLTSAGKDIKNKEEILALLEAIHLPKRVAIIHCPGHQRGTDPVATGNRKADEAAKQAAQSTRILTETTKNAGKRTADGSEFEKRTADGSEFESPKKKAKVE

SEQ ID NO: 1759 - protein, 2218 aa, synthetic construct
MPAAKRVKLDGGDKKYSIGLDIGTNSVGWAVITDEYKVPSKKFKVLGNTDRHSIKKNLIGALLFDSGETAEATRLKRTARRRYTRRKNRICYLQEIFSNEMAKVDDSFFHRLEESFLVEEDKKHERHPIFGNIVDEVAYHEKYPTIYHLRKKLVDSTDKADLRLIYLALAHMIKFRGHFLIEGDLNPDNSDVDKLFIQLVQTYNQLFEENPINASGVDAKAILSARLSKSRRLENLIAQLPGEKKNGLFGNLIALSLGLTPNFKSNFDLAEDAKLQLSKDTYDDDLDNLLAQIGDQYADLFLAAKNLSDAILLSDILRVNTEITKAPLSASMIKRYDEHHQDLTLLKALVRQQLPEKYKEIFFDQSKNGYAGYIDGGASQEEFYKFIKPILEKMDGTEELLVKLNREDLLRKQRTFDNGSIPHQIHLGELHAILRRQEDFYPFLKDNREKIEKILTFRIPYYVGPLARGNSRFAWMTRKSEETITPWNFEEVVDKGASAQSFIERMTNFDKNLPNEKVLPKHSLLYEYFTVYNELTKVKYVTEGMRKPAFLSGEQKKAIVDLLFKTNRKVTVKQLKEDYFKKIECFDSVEISGVEDRFNASLGTYHDLLKIIKDKDFLDNEENEDILEDIVLTLTLFEDREMIEERLKTYAHLFDDKVMKQLKRRRYTGWGRLSRKLINGIRDKQSGKTILDFLKSDGFANRNFMQLIHDDSLTFKEDIQKAQVSGQGDSLHEHIANLAGSPAIKKGILQTVKVVDELVKVMGRHKPENIVIEMARENQTTQKGQKNSRERMKRIEEGIKELGSQILKEHPVENTQLQNEKLYLYYLQNGRDMYVDQELDINRLSDYDVDHIVPQSFLKDDSIDNKVLTRSDKARGKSDNVPSEEVVKKMKNYWRQLLNAKLITQRKFDNLTKAERGGLSELDKAGFIKRQLVETRQITKHVAQILDSRMNTKYDENDKLIREVKVITLKSKLVSDFRKDFQFYKVREINNYHHAHDAYLNAVVGTALIKKYPKLESEFVYGDYKVYDVRKMIAKSEQEIGKATAKYFFYSNIMNFFKTEITLANGEIRKRPLIETNGETGEIVWDKGRDFATVRKVLSMPQVNIVKKTEVQTGGFSKESILPKRNSDKLIARKKDWDPKKYGGFDSPTVAYSVLVVAKVEKGKSKKLKSVKELLGITIMERSSFEKNPIDFLEAKGYKEVKKDLIIKLPKYSLFELENGRKRMLASAGELQKGNELALPSKYVNFLYLASHYEKLKGSPEDNEQKQLFVEQHKHYLDEIIEQISEFSKRVILADANLDKVLSAYNKHRDKPIREQAENIIHLFTLTNLGAPAAFKYFDTTIDRKRYTSTKEVLDATLIHQSITGLYETRIDLSQLGGDGGGSSGGGEAAAKGGTLGDQGSRGSDPLPEPRVTLTVEGIPTEFLVNTGAEHSVLTKPMGKMGSKRTVVAGATGSKVYPWTTKRLLKIGQKQVTHSFLVIPECPAPLLGRDLLTKLKAQIQFSTEGPQVTWEDRPAMCLVLNLEEEYRLHEKPVPPSIDPSWLQLFPMVWAEKAGMGLANQVPPVVVELKSDASPVAVRQYPMSKEAREGIRPHIQRFLDLGILVPCQSPWNTPLLPVKKPGTNDYRPVQDLREVNKRVQDIHPTVPNPYNLLSSLPPSHTWYSVLDLKDAFFCLKLHPNSQPLFAFEWRDPEKGNTGQLTWTRLPQGFKNSPTLFNEALHRDLASFRALNPQVVMLQYVDDLLVAAPTYRDCKEGTRRLLQELSKLGYRVSAKKAQLCREEVTYLGYLLKGGKRWLTPARKATVMKIPTPTTPRQVREFLGTAGFCRLWIPGFASLAAPLYPLTRPKVPFTWTEAHQEAFGRIKEALLSAPALALPDLTKPFALYVDEKEGVARGVLTQTLGPWRRPVAYLSKKLDPVASGWPTCLKAIAAVALLLKDADKLTLGQNVLVIAPHNLESIVRQPPDRWMTNARMTHYQSLLLNERVSFAPPAILNPATLLPVESDDTPIHICSEILAEETGTRPDLRDQPLPGVPAWYTDGSSFIMDGRRQAGAAIVDNKRTVWASNLPEGTSAQKAELIALTQALRLAEGKSINIYTDSRYAFATAHVHGAIYKQRGWLTSAGKDIKNKEEILALLEAIHLPKRVAIIHCPGHQRGTDPVATGNRKADEAAKQAAQSTRILTETTKNAGKRTADGSEFEKRTADGSEFESPKKKAKVE

SEQ ID NO: 1760 - protein, 2215 aa, synthetic construct
MPAAKRVKLDGGDKKYSIGLDIGTNSVGWAVITDEYKVPSKKFKVLGNTDRHSIKKNLIGALLFDSGETAEATRLKRTARRRYTRRKNRICYLQEIFSNEMAKVDDSFFHRLEESFLVEEDKKHERHPIFGNIVDEVAYHEKYPTIYHLRKKLVDSTDKADLRLIYLALAHMIKFRGHFLIEGDLNPDNSDVDKLFIQLVQTYNQLFEENPINASGVDAKAILSARLSKSRRLENLIAQLPGEKKNGLFGNLIALSLGLTPNFKSNFDLAEDAKLQLSKDTYDDDLDNLLAQIGDQYADLFLAAKNLSDAILLSDILRVNTEITKAPLSASMIKRYDEHHQDLTLLKALVRQQLPEKYKEIFFDQSKNGYAGYIDGGASQEEFYKFIKPILEKMDGTEELLVKLNREDLLRKQRTFDNGSIPHQIHLGELHAILRRQEDFYPFLKDNREKIEKILTFRIPYYVGPLARGNSRFAWMTRKSEETITPWNFEEVVDKGASAQSFIERMTNFDKNLPNEKVLPKHSLLYEYFTVYNELTKVKYVTEGMRKPAFLSGEQKKAIVDLLFKTNRKVTVKQLKEDYFKKIECFDSVEISGVEDRFNASLGTYHDLLKIIKDKDFLDNEENEDILEDIVLTLTLFEDREMIEERLKTYAHLFDDKVMKQLKRRRYTGWGRLSRKLINGIRDKQSGKTILDFLKSDGFANRNFMQLIHDDSLTFKEDIQKAQVSGQGDSLHEHIANLAGSPAIKKGILQTVKVVDELVKVMGRHKPENIVIEMARENQTTQKGQKNSRERMKRIEEGIKELGSQILKEHPVENTQLQNEKLYLYYLQNGRDMYVDQELDINRLSDYDVDHIVPQSFLKDDSIDNKVLTRSDKARGKSDNVPSEEVVKKMKNYWRQLLNAKLITQRKFDNLTKAERGGLSELDKAGFIKRQLVETRQITKHVAQILDSRMNTKYDENDKLIREVKVITLKSKLVSDFRKDFQFYKVREINNYHHAHDAYLNAVVGTALIKKYPKLESEFVYGDYKVYDVRKMIAKSEQEIGKATAKYFFYSNIMNFFKTEITLANGEIRKRPLIETNGETGEIVWDKGRDFATVRKVLSMPQVNIVKKTEVQTGGFSKESILPKRNSDKLIARKKDWDPKKYGGFDSPTVAYSVLVVAKVEKGKSKKLKSVKELLGITIMERSSFEKNPIDFLEAKGYKEVKKDLIIKLPKYSLFELENGRKRMLASAGELQKGNELALPSKYVNFLYLASHYEKLKGSPEDNEQKQLFVEQHKHYLDEIIEQISEFSKRVILADANLDKVLSAYNKHRDKPIREQAENIIHLFTLTNLGAPAAFKYFDTTIDRKRYTSTKEVLDATLIHQSITGLYETRIDLSQLGGDGGEAAAKGGGGGTLGDQGSRGSDPLPEPRVTLTVEGIPTEFLVNTGAEHSVLTKPMGKMGSKRTVVAGATGSKVYPWTTKRLLKIGQKQVTHSFLVIPECPAPLLGRDLLTKLKAQIQFSTEGPQVTWEDRPAMCLVLNLEEEYRLHEKPVPPSIDPSWLQLFPMVWAEKAGMGLANQVPPVVVELKSDASPVAVRQYPMSKEAREGIRPHIQRFLDLGILVPCQSPWNTPLLPVKKPGTNDYRPVQDLREVNKRVQDIHPTVPNPYNLLSSLPPSHTWYSVLDLKDAFFCLKLHPNSQPLFAFEWRDPEKGNTGQLTWTRLPQGFKNSPTLFNEALHRDLASFRALNPQVVMLQYVDDLLVAAPTYRDCKEGTRRLLQELSKLGYRVSAKKAQLCREEVTYLGYLLKGGKRWLTPARKATVMKIPTPTTPRQVREFLGTAGFCRLWIPGFASLAAPLYPLTRPKVPFTWTEAHQEAFGRIKEALLSAPALALPDLTKPFALYVDEKEGVARGVLTQTLGPWRRPVAYLSKKLDPVASGWPTCLKAIAAVALLLKDADKLTLGQNVLVIAPHNLESIVRQPPDRWMTNARMTHYQSLLLNERVSFAPPAILNPATLLPVESDDTPIHICSEILAEETGTRPDLRDQPLPGVPAWYTDGSSFIMDGRRQAGAAIVDNKRTVWASNLPEGTSAQKAELIALTQALRLAEGKSINIYTDSRYAFATAHVHGAIYKQRGWLTSAGKDIKNKEEILALLEAIHLPKRVAIIHCPGHQRGTDPVATGNRKADEAAKQAAQSTRILTETTKNAGKRTADGSEFEKRTADGSEFESPKKKAKVE

SEQ ID NO: 1761 - protein, 2213 aa, synthetic construct
MPAAKRVKLDGGDKKYSIGLDIGTNSVGWAVITDEYKVPSKKFKVLGNTDRHSIKKNLIGALLFDSGETAEATRLKRTARRRYTRRKNRICYLQEIFSNEMAKVDDSFFHRLEESFLVEEDKKHERHPIFGNIVDEVAYHEKYPTIYHLRKKLVDSTDKADLRLIYLALAHMIKFRGHFLIEGDLNPDNSDVDKLFIQLVQTYNQLFEENPINASGVDAKAILSARLSKSRRLENLIAQLPGEKKNGLFGNLIALSLGLTPNFKSNFDLAEDAKLQLSKDTYDDDLDNLLAQIGDQYADLFLAAKNLSDAILLSDILRVNTEITKAPLSASMIKRYDEHHQDLTLLKALVRQQLPEKYKEIFFDQSKNGYAGYIDGGASQEEFYKFIKPILEKMDGTEELLVKLNREDLLRKQRTFDNGSIPHQIHLGELHAILRRQEDFYPFLKDNREKIEKILTFRIPYYVGPLARGNSRFAWMTRKSEETITPWNFEEVVDKGASAQSFIERMTNFDKNLPNEKVLPKHSLLYEYFTVYNELTKVKYVTEGMRKPAFLSGEQKKAIVDLLFKTNRKVTVKQLKEDYFKKIECFDSVEISGVEDRFNASLGTYHDLLKIIKDKDFLDNEENEDILEDIVLTLTLFEDREMIEERLKTYAHLFDDKVMKQLKRRRYTGWGRLSRKLINGIRDKQSGKTILDFLKSDGFANRNFMQLIHDDSLTFKEDIQKAQVSGQGDSLHEHIANLAGSPAIKKGILQTVKVVDELVKVMGRHKPENIVIEMARENQTTQKGQKNSRERMKRIEEGIKELGSQILKEHPVENTQLQNEKLYLYYLQNGRDMYVDQELDINRLSDYDVDHIVPQSFLKDDSIDNKVLTRSDKARGKSDNVPSEEVVKKMKNYWRQLLNAKLITQRKFDNLTKAERGGLSELDKAGFIKRQLVETRQITKHVAQILDSRMNTKYDENDKLIREVKVITLKSKLVSDFRKDFQFYKVREINNYHHAHDAYLNAVVGTALIKKYPKLESEFVYGDYKVYDVRKMIAKSEQEIGKATAKYFFYSNIMNFFKTEITLANGEIRKRPLIETNGETGEIVWDKGRDFATVRKVLSMPQVNIVKKTEVQTGGFSKESILPKRNSDKLIARKKDWDPKKYGGFDSPTVAYSVLVVAKVEKGKSKKLKSVKELLGITIMERSSFEKNPIDFLEAKGYKEVKKDLIIKLPKYSLFELENGRKRMLASAGELQKGNELALPSKYVNFLYLASHYEKLKGSPEDNEQKQLFVEQHKHYLDEIIEQISEFSKRVILADANLDKVLSAYNKHRDKPIREQAENIIHLFTLTNLGAPAAFKYFDTTIDRKRYTSTKEVLDATLIHQSITGLYETRIDLSQLGGDGGGGSGGGGGTLGDQGSRGSDPLPEPRVTLTVEGIPTEFLVNTGAEHSVLTKPMGKMGSKRTVVAGATGSKVYPWTTKRLLKIGQKQVTHSFLVIPECPAPLLGRDLLTKLKAQIQFSTEGPQVTWEDRPAMCLVLNLEEEYRLHEKPVPPSIDPSWLQLFPMVWAEKAGMGLANQVPPVVVELKSDASPVAVRQYPMSKEAREGIRPHIQRFLDLGILVPCQSPWNTPLLPVKKPGTNDYRPVQDLREVNKRVQDIHPTVPNPYNLLSSLPPSHTWYSVLDLKDAFFCLKLHPNSQPLFAFEWRDPEKGNTGQLTWTRLPQGFKNSPTLFNEALHRDLASFRALNPQVVMLQYVDDLLVAAPTYRDCKEGTRRLLQELSKLGYRVSAKKAQLCREEVTYLGYLLKGGKRWLTPARKATVMKIPTPTTPRQVREFLGTAGFCRLWIPGFASLAAPLYPLTRPKVPFTWTEAHQEAFGRIKEALLSAPALALPDLTKPFALYVDEKEGVARGVLTQTLGPWRRPVAYLSKKLDPVASGWPTCLKAIAAVALLLKDADKLTLGQNVLVIAPHNLESIVRQPPDRWMTNARMTHYQSLLLNERVSFAPPAILNPATLLPVESDDTPIHICSEILAEETGTRPDLRDQPLPGVPAWYTDGSSFIMDGRRQAGAAIVDNKRTVWASNLPEGTSAQKAELIALTQALRLAEGKSINIYTDSRYAFATAHVHGAIYKQRGWLTSAGKDIKNKEEILALLEAIHLPKRVAIIHCPGHQRGTDPVATGNRKADEAAKQAAQSTRILTETTKNAGKRTADGSEFEKRTADGSEFESPKKKAKVE

SEQ ID NO: 1762 - protein, 2218 aa, synthetic construct
MPAAKRVKLDGGDKKYSIGLDIGTNSVGWAVITDEYKVPSKKFKVLGNTDRHSIKKNLIGALLFDSGETAEATRLKRTARRRYTRRKNRICYLQEIFSNEMAKVDDSFFHRLEESFLVEEDKKHERHPIFGNIVDEVAYHEKYPTIYHLRKKLVDSTDKADLRLIYLALAHMIKFRGHFLIEGDLNPDNSDVDKLFIQLVQTYNQLFEENPINASGVDAKAILSARLSKSRRLENLIAQLPGEKKNGLFGNLIALSLGLTPNFKSNFDLAEDAKLQLSKDTYDDDLDNLLAQIGDQYADLFLAAKNLSDAILLSDILRVNTEITKAPLSASMIKRYDEHHQDLTLLKALVRQQLPEKYKEIFFDQSKNGYAGYIDGGASQEEFYKFIKPILEKMDGTEELLVKLNREDLLRKQRTFDNGSIPHQIHLGELHAILRRQEDFYPFLKDNREKIEKILTFRIPYYVGPLARGNSRFAWMTRKSEETITPWNFEEVVDKGASAQSFIERMTNFDKNLPNEKVLPKHSLLYEYFTVYNELTKVKYVTEGMRKPAFLSGEQKKAIVDLLFKTNRKVTVKQLKEDYFKKIECFDSVEISGVEDRFNASLGTYHDLLKIIKDKDFLDNEENEDILEDIVLTLTLFEDREMIEERLKTYAHLFDDKVMKQLKRRRYTGWGRLSRKLINGIRDKQSGKTILDFLKSDGFANRNFMQLIHDDSLTFKEDIQKAQVSGQGDSLHEHIANLAGSPAIKKGILQTVKVVDELVKVMGRHKPENIVIEMARENQTTQKGQKNSRERMKRIEEGIKELGSQILKEHPVENTQLQNEKLYLYYLQNGRDMYVDQELDINRLSDYDVDHIVPQSFLKDDSIDNKVLTRSDKARGKSDNVPSEEVVKKMKNYWRQLLNAKLITQRKFDNLTKAERGGLSELDKAGFIKRQLVETRQITKHVAQILDSRMNTKYDENDKLIREVKVITLKSKLVSDFRKDFQFYKVREINNYHHAHDAYLNAVVGTALIKKYPKLESEFVYGDYKVYDVRKMIAKSEQEIGKATAKYFFYSNIMNFFKTEITLANGEIRKRPLIETNGETGEIVWDKGRDFATVRKVLSMPQVNIVKKTEVQTGGFSKESILPKRNSDKLIARKKDWDPKKYGGFDSPTVAYSVLVVAKVEKGKSKKLKSVKELLGITIMERSSFEKNPIDFLEAKGYKEVKKDLIIKLPKYSLFELENGRKRMLASAGELQKGNELALPSKYVNFLYLASHYEKLKGSPEDNEQKQLFVEQHKHYLDEIIEQISEFSKRVILADANLDKVLSAYNKHRDKPIREQAENIIHLFTLTNLGAPAAFKYFDTTIDRKRYTSTKEVLDATLIHQSITGLYETRIDLSQLGGDGGPAPEAAAKGSSGGTLGDQGSRGSDPLPEPRVTLTVEGIPTEFLVNTGAEHSVLTKPMGKMGSKRTVVAGATGSKVYPWTTKRLLKIGQKQVTHSFLVIPECPAPLLGRDLLTKLKAQIQFSTEGPQVTWEDRPAMCLVLNLEEEYRLHEKPVPPSIDPSWLQLFPMVWAEKAGMGLANQVPPVVVELKSDASPVAVRQYPMSKEAREGIRPHIQRFLDLGILVPCQSPWNTPLLPVKKPGTNDYRPVQDLREVNKRVQDIHPTVPNPYNLLSSLPPSHTWYSVLDLKDAFFCLKLHPNSQPLFAFEWRDPEKGNTGQLTWTRLPQGFKNSPTLFNEALHRDLASFRALNPQVVMLQYVDDLLVAAPTYRDCKEGTRRLLQELSKLGYRVSAKKAQLCREEVTYLGYLLKGGKRWLTPARKATVMKIPTPTTPRQVREFLGTAGFCRLWIPGFASLAAPLYPLTRPKVPFTWTEAHQEAFGRIKEALLSAPALALPDLTKPFALYVDEKEGVARGVLTQTLGPWRRPVAYLSKKLDPVASGWPTCLKAIAAVALLLKDADKLTLGQNVLVIAPHNLESIVRQPPDRWMTNARMTHYQSLLLNERVSFAPPAILNPATLLPVESDDTPIHICSEILAEETGTRPDLRDQPLPGVPAWYTDGSSFIMDGRRQAGAAIVDNKRTVWASNLPEGTSAQKAELIALTQALRLAEGKSINIYTDSRYAFATAHVHGAIYKQRGWLTSAGKDIKNKEEILALLEAIHLPKRVAIIHCPGHQRGTDPVATGNRKADEAAKQAAQSTRILTETTKNAGKRTADGSEFEKRTADGSEFESPKKKAKVE

SEQ ID NO: 1763 - protein, 2215 aa, synthetic construct
MPAAKRVKLDGGDKKYSIGLDIGTNSVGWAVITDEYKVPSKKFKVLGNTDRHSIKKNLIGALLFDSGETAEATRLKRTARRRYTRRKNRICYLQEIFSNEMAKVDDSFFHRLEESFLVEEDKKHERHPIFGNIVDEVAYHEKYPTIYHLRKKLVDSTDKADLRLIYLALAHMIKFRGHFLIEGDLNPDNSDVDKLFIQLVQTYNQLFEENPINASGVDAKAILSARLSKSRRLENLIAQLPGEKKNGLFGNLIALSLGLTPNFKSNFDLAEDAKLQLSKDTYDDDLDNLLAQIGDQYADLFLAAKNLSDAILLSDILRVNTEITKAPLSASMIKRYDEHHQDLTLLKALVRQQLPEKYKEIFFDQSKNGYAGYIDGGASQEEFYKFIKPILEKMDGTEELLVKLNREDLLRKQRTFDNGSIPHQIHLGELHAILRRQEDFYPFLKDNREKIEKILTFRIPYYVGPLARGNSRFAWMTRKSEETITPWNFEEVVDKGASAQSFIERMTNFDKNLPNEKVLPKHSLLYEYFTVYNELTKVKYVTEGMRKPAFLSGEQKKAIVDLLFKTNRKVTVKQLKEDYFKKIECFDSVEISGVEDRFNASLGTYHDLLKIIKDKDFLDNEENEDILEDIVLTLTLFEDREMIEERLKTYAHLFDDKVMKQLKRRRYTGWGRLSRKLINGIRDKQSGKTILDFLKSDGFANRNFMQLIHDDSLTFKEDIQKAQVSGQGDSLHEHIANLAGSPAIKKGILQTVKVVDELVKVMGRHKPENIVIEMARENQTTQKGQKNSRERMKRIEEGIKELGSQILKEHPVENTQLQNEKLYLYYLQNGRDMYVDQELDINRLSDYDVDHIVPQSFLKDDSIDNKVLTRSDKARGKSDNVPSEEVVKKMKNYWRQLLNAKLITQRKFDNLTKAERGGLSELDKAGFIKRQLVETRQITKHVAQILDSRMNTKYDENDKLIREVKVITLKSKLVSDFRKDFQFYKVREINNYHHAHDAYLNAVVGTALIKKYPKLESEFVYGDYKVYDVRKMIAKSEQEIGKATAKYFFYSNIMNFFKTEITLANGEIRKRPLIETNGETGEIVWDKGRDFATVRKVLSMPQVNIVKKTEVQTGGFSKESILPKRNSDKLIARKKDWDPKKYGGFDSPTVAYSVLVVAKVEKGKSKKLKSVKELLGITIMERSSFEKNPIDFLEAKGYKEVKKDLIIKLPKYSLFELENGRKRMLASAGELQKGNELALPSKYVNFLYLASHYEKLKGSPEDNEQKQLFVEQHKHYLDEIIEQISEFSKRVILADANLDKVLSAYNKHRDKPIREQAENIIHLFTLTNLGAPAAFKYFDTTIDRKRYTSTKEVLDATLIHQSITGLYETRIDLSQLGGDGGEAAAKGGSGGTLGDQGSRGSDPLPEPRVTLTVEGIPTEFLVNTGAEHSVLTKPMGKMGSKRTVVAGATGSKVYPWTTKRLLKIGQKQVTHSFLVIPECPAPLLGRDLLTKLKAQIQFSTEGPQVTWEDRPAMCLVLNLEEEYRLHEKPVPPSIDPSWLQLFPMVWAEKAGMGLANQVPPVVVELKSDASPVAVRQYPMSKEAREGIRPHIQRFLDLGILVPCQSPWNTPLLPVKKPGTNDYRPVQDLREVNKRVQDIHPTVPNPYNLLSSLPPSHTWYSVLDLKDAFFCLKLHPNSQPLFAFEWRDPEKGNTGQLTWTRLPQGFKNSPTLFNEALHRDLASFRALNPQVVMLQYVDDLLVAAPTYRDCKEGTRRLLQELSKLGYRVSAKKAQLCREEVTYLGYLLKGGKRWLTPARKATVMKIPTPTTPRQVREFLGTAGFCRLWIPGFASLAAPLYPLTRPKVPFTWTEAHQEAFGRIKEALLSAPALALPDLTKPFALYVDEKEGVARGVLTQTLGPWRRPVAYLSKKLDPVASGWPTCLKAIAAVALLLKDADKLTLGQNVLVIAPHNLESIVRQPPDRWMTNARMTHYQSLLLNERVSFAPPAILNPATLLPVESDDTPIHICSEILAEETGTRPDLRDQPLPGVPAWYTDGSSFIMDGRRQAGAAIVDNKRTVWASNLPEGTSAQKAELIALTQALRLAEGKSINIYTDSRYAFATAHVHGAIYKQRGWLTSAGKDIKNKEEILALLEAIHLPKRVAIIHCPGHQRGTDPVATGNRKADEAAKQAAQSTRILTETTKNAGKRTADGSEFEKRTADGSEFESPKKKAKVE

SEQ ID NO: 1764 - protein, 2216 aa, synthetic construct
MPAAKRVKLDGGDKKYSIGLDIGTNSVGWAVITDEYKVPSKKFKVLGNTDRHSIKKNLIGALLFDSGETAEATRLKRTARRRYTRRKNRICYLQEIFSNEMAKVDDSFFHRLEESFLVEEDKKHERHPIFGNIVDEVAYHEKYPTIYHLRKKLVDSTDKADLRLIYLALAHMIKFRGHFLIEGDLNPDNSDVDKLFIQLVQTYNQLFEENPINASGVDAKAILSARLSKSRRLENLIAQLPGEKKNGLFGNLIALSLGLTPNFKSNFDLAEDAKLQLSKDTYDDDLDNLLAQIGDQYADLFLAAKNLSDAILLSDILRVNTEITKAPLSASMIKRYDEHHQDLTLLKALVRQQLPEKYKEIFFDQSKNGYAGYIDGGASQEEFYKFIKPILEKMDGTEELLVKLNREDLLRKQRTFDNGSIPHQIHLGELHAILRRQEDFYPFLKDNREKIEKILTFRIPYYVGPLARGNSRFAWMTRKSEETITPWNFEEVVDKGASAQSFIERMTNFDKNLPNEKVLPKHSLLYEYFTVYNELTKVKYVTEGMRKPAFLSGEQKKAIVDLLFKTNRKVTVKQLKEDYFKKIECFDSVEISGVEDRFNASLGTYHDLLKIIKDKDFLDNEENEDILEDIVLTLTLFEDREMIEERLKTYAHLFDDKVMKQLKRRRYTGWGRLSRKLINGIRDKQSGKTILDFLKSDGFANRNFMQLIHDDSLTFKEDIQKAQVSGQGDSLHEHIANLAGSPAIKKGILQTVKVVDELVKVMGRHKPENIVIEMARENQTTQKGQKNSRERMKRIEEGIKELGSQILKEHPVENTQLQNEKLYLYYLQNGRDMYVDQELDINRLSDYDVDHIVPQSFLKDDSIDNKVLTRSDKARGKSDNVPSEEVVKKMKNYWRQLLNAKLITQRKFDNLTKAERGGLSELDKAGFIKRQLVETRQITKHVAQILDSRMNTKYDENDKLIREVKVITLKSKLVSDFRKDFQFYKVREINNYHHAHDAYLNAVVGTALIKKYPKLESEFVYGDYKVYDVRKMIAKSEQEIGKATAKYFFYSNIMNFFKTEITLANGEIRKRPLIETNGETGEIVWDKGRDFATVRKVLSMPQVNIVKKTEVQTGGFSKESILPKRNSDKLIARKKDWDPKKYGGFDSPTVAYSVLVVAKVEKGKSKKLKSVKELLGITIMERSSFEKNPIDFLEAKGYKEVKKDLIIKLPKYSLFELENGRKRMLASAGELQKGNELALPSKYVNFLYLASHYEKLKGSPEDNEQKQLFVEQHKHYLDEIIEQISEFSKRVILADANLDKVLSAYNKHRDKPIREQAENIIHLFTLTNLGAPAAFKYFDTTIDRKRYTSTKEVLDATLIHQSITGLYETRIDLSQLGGDGGGGGGSSGGSGGTLGDQGSRGSDPLPEPRVTLTVEGIPTEFLVNTGAEHSVLTKPMGKMGSKRTVVAGATGSKVYPWTTKRLLKIGQKQVTHSFLVIPECPAPLLGRDLLTKLKAQIQFSTEGPQVTWEDRPAMCLVLNLEEEYRLHEKPVPPSIDPSWLQLFPMVWAEKAGMGLANQVPPVVVELKSDASPVAVRQYPMSKEAREGIRPHIQRFLDLGILVPCQSPWNTPLLPVKKPGTNDYRPVQDLREVNKRVQDIHPTVPNPYNLLSSLPPSHTWYSVLDLKDAFFCLKLHPNSQPLFAFEWRDPEKGNTGQLTWTRLPQGFKNSPTLFNEALHRDLASFRALNPQVVMLQYVDDLLVAAPTYRDCKEGTRRLLQELSKLGYRVSAKKAQLCREEVTYLGYLLKGGKRWLTPARKATVMKIPTPTTPRQVREFLGTAGFCRLWIPGFASLAAPLYPLTRPKVPFTWTEAHQEAFGRIKEALLSAPALALPDLTKPFALYVDEKEGVARGVLTQTLGPWRRPVAYLSKKLDPVASGWPTCLKAIAAVALLLKDADKLTLGQNVLVIAPHNLESIVRQPPDRWMTNARMTHYQSLLLNERVSFAPPAILNPATLLPVESDDTPIHICSEILAEETGTRPDLRDQPLPGVPAWYTDGSSFIMDGRRQAGAAIVDNKRTVWASNLPEGTSAQKAELIALTQALRLAEGKSINIYTDSRYAFATAHVHGAIYKQRGWLTSAGKDIKNKEEILALLEAIHLPKRVAIIHCPGHQRGTDPVATGNRKADEAAKQAAQSTRILTETTKNAGKRTADGSEFEKRTADGSEFESPKKKAKVE

SEQ ID NO: 1765 - protein, 2216 aa, synthetic construct
MPAAKRVKLDGGDKKYSIGLDIGTNSVGWAVITDEYKVPSKKFKVLGNTDRHSIKKNLIGALLFDSGETAEATRLKRTARRRYTRRKNRICYLQEIFSNEMAKVDDSFFHRLEESFLVEEDKKHERHPIFGNIVDEVAYHEKYPTIYHLRKKLVDSTDKADLRLIYLALAHMIKFRGHFLIEGDLNPDNSDVDKLFIQLVQTYNQLFEENPINASGVDAKAILSARLSKSRRLENLIAQLPGEKKNGLFGNLIALSLGLTPNFKSNFDLAEDAKLQLSKDTYDDDLDNLLAQIGDQYADLFLAAKNLSDAILLSDILRVNTEITKAPLSASMIKRYDEHHQDLTLLKALVRQQLPEKYKEIFFDQSKNGYAGYIDGGASQEEFYKFIKPILEKMDGTEELLVKLNREDLLRKQRTFDNGSIPHQIHLGELHAILRRQEDFYPFLKDNREKIEKILTFRIPYYVGPLARGNSRFAWMTRKSEETITPWNFEEVVDKGASAQSFIERMTNFDKNLPNEKVLPKHSLLYEYFTVYNELTKVKYVTEGMRKPAFLSGEQKKAIVDLLFKTNRKVTVKQLKEDYFKKIECFDSVEISGVEDRFNASLGTYHDLLKIIKDKDFLDNEENEDILEDIVLTLTLFEDREMIEERLKTYAHLFDDKVMKQLKRRRYTGWGRLSRKLINGIRDKQSGKTILDFLKSDGFANRNFMQLIHDDSLTFKEDIQKAQVSGQGDSLHEHIANLAGSPAIKKGILQTVKVVDELVKVMGRHKPENIVIEMARENQTTQKGQKNSRERMKRIEEGIKELGSQILKEHPVENTQLQNEKLYLYYLQNGRDMYVDQELDINRLSDYDVDHIVPQSFLKDDSIDNKVLTRSDKARGKSDNVPSEEVVKKMKNYWRQLLNAKLITQRKFDNLTKAERGGLSELDKAGFIKRQLVETRQITKHVAQILDSRMNTKYDENDKLIREVKVITLKSKLVSDFRKDFQFYKVREINNYHHAHDAYLNAVVGTALIKKYPKLESEFVYGDYKVYDVRKMIAKSEQEIGKATAKYFFYSNIMNFFKTEITLANGEIRKRPLIETNGETGEIVWDKGRDFATVRKVLSMPQVNIVKKTEVQTGGFSKESILPKRNSDKLIARKKDWDPKKYGGFDSPTVAYSVLVVAKVEKGKSKKLKSVKELLGITIMERSSFEKNPIDFLEAKGYKEVKKDLIIKLPKYSLFELENGRKRMLASAGELQKGNELALPSKYVNFLYLASHYEKLKGSPEDNEQKQLFVEQHKHYLDEIIEQISEFSKRVILADANLDKVLSAYNKHRDKPIREQAENIIHLFTLTNLGAPAAFKYFDTTIDRKRYTSTKEVLDATLIHQSITGLYETRIDLSQLGGDGGPAPGSSGGSGGTLGDQGSRGSDPLPEPRVTLTVEGIPTEFLVNTGAEHSVLTKPMGKMGSKRTVVAGATGSKVYPWTTKRLLKIGQKQVTHSFLVIPECPAPLLGRDLLTKLKAQIQFSTEGPQVTWEDRPAMCLVLNLEEEYRLHEKPVPPSIDPSWLQLFPMVWAEKAGMGLANQVPPVVVELKSDASPVAVRQYPMSKEAREGIRPHIQRFLDLGILVPCQSPWNTPLLPVKKPGTNDYRPVQDLREVNKRVQDIHPTVPNPYNLLSSLPPSHTWYSVLDLKDAFFCLKLHPNSQPLFAFEWRDPEKGNTGQLTWTRLPQGFKNSPTLFNEALHRDLASFRALNPQVVMLQYVDDLLVAAPTYRDCKEGTRRLLQELSKLGYRVSAKKAQLCREEVTYLGYLLKGGKRWLTPARKATVMKIPTPTTPRQVREFLGTAGFCRLWIPGFASLAAPLYPLTRPKVPFTWTEAHQEAFGRIKEALLSAPALALPDLTKPFALYVDEKEGVARGVLTQTLGPWRRPVAYLSKKLDPVASGWPTCLKAIAAVALLLKDADKLTLGQNVLVIAPHNLESIVRQPPDRWMTNARMTHYQSLLLNERVSFAPPAILNPATLLPVESDDTPIHICSEILAEETGTRPDLRDQPLPGVPAWYTDGSSFIMDGRRQAGAAIVDNKRTVWASNLPEGTSAQKAELIALTQALRLAEGKSINIYTDSRYAFATAHVHGAIYKQRGWLTSAGKDIKNKEEILALLEAIHLPKRVAIIHCPGHQRGTDPVATGNRKADEAAKQAAQSTRILTETTKNAGKRTADGSEFEKRTADGSEFESPKKKAKVE

SEQ ID NO: 1766 - protein, 2216 aa, synthetic construct
MPAAKRVKLDGGDKKYSIGLDIGTNSVGWAVITDEYKVPSKKFKVLGNTDRHSIKKNLIGALLFDSGETAEATRLKRTARRRYTRRKNRICYLQEIFSNEMAKVDDSFFHRLEESFLVEEDKKHERHPIFGNIVDEVAYHEKYPTIYHLRKKLVDSTDKADLRLIYLALAHMIKFRGHFLIEGDLNPDNSDVDKLFIQLVQTYNQLFEENPINASGVDAKAILSARLSKSRRLENLIAQLPGEKKNGLFGNLIALSLGLTPNFKSNFDLAEDAKLQLSKDTYDDDLDNLLAQIGDQYADLFLAAKNLSDAILLSDILRVNTEITKAPLSASMIKRYDEHHQDLTLLKALVRQQLPEKYKEIFFDQSKNGYAGYIDGGASQEEFYKFIKPILEKMDGTEELLVKLNREDLLRKQRTFDNGSIPHQIHLGELHAILRRQEDFYPFLKDNREKIEKILTFRIPYYVGPLARGNSRFAWMTRKSEETITPWNFEEVVDKGASAQSFIERMTNFDKNLPNEKVLPKHSLLYEYFTVYNELTKVKYVTEGMRKPAFLSGEQKKAIVDLLFKTNRKVTVKQLKEDYFKKIECFDSVEISGVEDRFNASLGTYHDLLKIIKDKDFLDNEENEDILEDIVLTLTLFEDREMIEERLKTYAHLFDDKVMKQLKRRRYTGWGRLSRKLINGIRDKQSGKTILDFLKSDGFANRNFMQLIHDDSLTFKEDIQKAQVSGQGDSLHEHIANLAGSPAIKKGILQTVKVVDELVKVMGRHKPENIVIEMARENQTTQKGQKNSRERMKRIEEGIKELGSQILKEHPVENTQLQNEKLYLYYLQNGRDMYVDQELDINRLSDYDVDHIVPQSFLKDDSIDNKVLTRSDKARGKSDNVPSEEVVKKMKNYWRQLLNAKLITQRKFDNLTKAERGGLSELDKAGFIKRQLVETRQITKHVAQILDSRMNTKYDENDKLIREVKVITLKSKLVSDFRKDFQFYKVREINNYHHAHDAYLNAVVGTALIKKYPKLESEFVYGDYKVYDVRKMIAKSEQEIGKATAKYFFYSNIMNFFKTEITLANGEIRKRPLIETNGETGEIVWDKGRDFATVRKVLSMPQVNIVKKTEVQTGGFSKESILPKRNSDKLIARKKDWDPKKYGGFDSPTVAYSVLVVAKVEKGKSKKLKSVKELLGITIMERSSFEKNPIDFLEAKGYKEVKKDLIIKLPKYSLFELENGRKRMLASAGELQKGNELALPSKYVNFLYLASHYEKLKGSPEDNEQKQLFVEQHKHYLDEIIEQISEFSKRVILADANLDKVLSAYNKHRDKPIREQAENIIHLFTLTNLGAPAAFKYFDTTIDRKRYTSTKEVLDATLIHQSITGLYETRIDLSQLGGDGGGGSGGSGGSGGTLGDQGSRGSDPLPEPRVTLTVEGIPTEFLVNTGAEHSVLTKPMGKMGSKRTVVAGATGSKVYPWTTKRLLKIGQKQVTHSFLVIPECPAPLLGRDLLTKLKAQIQFSTEGPQVTWEDRPAMCLVLNLEEEYRLHEKPVPPSIDPSWLQLFPMVWAEKAGMGLANQVPPVVVELKSDASPVAVRQYPMSKEAREGIRPHIQRFLDLGILVPCQSPWNTPLLPVKKPGTNDYRPVQDLREVNKRVQDIHPTVPNPYNLLSSLPPSHTWYSVLDLKDAFFCLKLHPNSQPLFAFEWRDPEKGNTGQLTWTRLPQGFKNSPTLFNEALHRDLASFRALNPQVVMLQYVDDLLVAAPTYRDCKEGTRRLLQELSKLGYRVSAKKAQLCREEVTYLGYLLKGGKRWLTPARKATVMKIPTPTTPRQVREFLGTAGFCRLWIPGFASLAAPLYPLTRPKVPFTWTEAHQEAFGRIKEALLSAPALALPDLTKPFALYVDEKEGVARGVLTQTLGPWRRPVAYLSKKLDPVASGWPTCLKAIAAVALLLKDADKLTLGQNVLVIAPHNLESIVRQPPDRWMTNARMTHYQSLLLNERVSFAPPAILNPATLLPVESDDTPIHICSEILAEETGTRPDLRDQPLPGVPAWYTDGSSFIMDGRRQAGAAIVDNKRTVWASNLPEGTSAQKAELIALTQALRLAEGKSINIYTDSRYAFATAHVHGAIYKQRGWLTSAGKDIKNKEEILALLEAIHLPKRVAIIHCPGHQRGTDPVATGNRKADEAAKQAAQSTRILTETTKNAGKRTADGSEFEKRTADGSEFESPKKKAKVE

SEQ ID NO: 1767 - protein, 2222 aa, synthetic construct
MPAAKRVKLDGGDKKYSIGLDIGTNSVGWAVITDEYKVPSKKFKVLGNTDRHSIKKNLIGALLFDSGETAEATRLKRTARRRYTRRKNRICYLQEIFSNEMAKVDDSFFHRLEESFLVEEDKKHERHPIFGNIVDEVAYHEKYPTIYHLRKKLVDSTDKADLRLIYLALAHMIKFRGHFLIEGDLNPDNSDVDKLFIQLVQTYNQLFEENPINASGVDAKAILSARLSKSRRLENLIAQLPGEKKNGLFGNLIALSLGLTPNFKSNFDLAEDAKLQLSKDTYDDDLDNLLAQIGDQYADLFLAAKNLSDAILLSDILRVNTEITKAPLSASMIKRYDEHHQDLTLLKALVRQQLPEKYKEIFFDQSKNGYAGYIDGGASQEEFYKFIKPILEKMDGTEELLVKLNREDLLRKQRTFDNGSIPHQIHLGELHAILRRQEDFYPFLKDNREKIEKILTFRIPYYVGPLARGNSRFAWMTRKSEETITPWNFEEVVDKGASAQSFIERMTNFDKNLPNEKVLPKHSLLYEYFTVYNELTKVKYVTEGMRKPAFLSGEQKKAIVDLLFKTNRKVTVKQLKEDYFKKIECFDSVEISGVEDRFNASLGTYHDLLKIIKDKDFLDNEENEDILEDIVLTLTLFEDREMIEERLKTYAHLFDDKVMKQLKRRRYTGWGRLSRKLINGIRDKQSGKTILDFLKSDGFANRNFMQLIHDDSLTFKEDIQKAQVSGQGDSLHEHIANLAGSPAIKKGILQTVKVVDELVKVMGRHKPENIVIEMARENQTTQKGQKNSRERMKRIEEGIKELGSQILKEHPVENTQLQNEKLYLYYLQNGRDMYVDQELDINRLSDYDVDHIVPQSFLKDDSIDNKVLTRSDKARGKSDNVPSEEVVKKMKNYWRQLLNAKLITQRKFDNLTKAERGGLSELDKAGFIKRQLVETRQITKHVAQILDSRMNTKYDENDKLIREVKVITLKSKLVSDFRKDFQFYKVREINNYHHAHDAYLNAVVGTALIKKYPKLESEFVYGDYKVYDVRKMIAKSEQEIGKATAKYFFYSNIMNFFKTEITLANGEIRKRPLIETNGETGEIVWDKGRDFATVRKVLSMPQVNIVKKTEVQTGGFSKESILPKRNSDKLIARKKDWDPKKYGGFDSPTVAYSVLVVAKVEKGKSKKLKSVKELLGITIMERSSFEKNPIDFLEAKGYKEVKKDLIIKLPKYSLFELENGRKRMLASAGELQKGNELALPSKYVNFLYLASHYEKLKGSPEDNEQKQLFVEQHKHYLDEIIEQISEFSKRVILADANLDKVLSAYNKHRDKPIREQAENIIHLFTLTNLGAPAAFKYFDTTIDRKRYTSTKEVLDATLIHQSITGLYETRIDLSQLGGDGGGGGGSEAAAKGGGGSGGTLGDQGSRGSDPLPEPRVTLTVEGIPTEFLVNTGAEHSVLTKPMGKMGSKRTVVAGATGSKVYPWTTKRLLKIGQKQVTHSFLVIPECPAPLLGRDLLTKLKAQIQFSTEGPQVTWEDRPAMCLVLNLEEEYRLHEKPVPPSIDPSWLQLFPMVWAEKAGMGLANQVPPVVVELKSDASPVAVRQYPMSKEAREGIRPHIQRFLDLGILVPCQSPWNTPLLPVKKPGTNDYRPVQDLREVNKRVQDIHPTVPNPYNLLSSLPPSHTWYSVLDLKDAFFCLKLHPNSQPLFAFEWRDPEKGNTGQLTWTRLPQGFKNSPTLFNEALHRDLASFRALNPQVVMLQYVDDLLVAAPTYRDCKEGTRRLLQELSKLGYRVSAKKAQLCREEVTYLGYLLKGGKRWLTPARKATVMKIPTPTTPRQVREFLGTAGFCRLWIPGFASLAAPLYPLTRPKVPFTWTEAHQEAFGRIKEALLSAPALALPDLTKPFALYVDEKEGVARGVLTQTLGPWRRPVAYLSKKLDPVASGWPTCLKAIAAVALLLKDADKLTLGQNVLVIAPHNLESIVRQPPDRWMTNARMTHYQSLLLNERVSFAPPAILNPATLLPVESDDTPIHICSEILAEETGTRPDLRDQPLPGVPAWYTDGSSFIMDGRRQAGAAIVDNKRTVWASNLPEGTSAQKAELIALTQALRLAEGKSINIYTDSRYAFATAHVHGAIYKQRGWLTSAGKDIKNKEEILALLEAIHLPKRVAIIHCPGHQRGTDPVATGNRKADEAAKQAAQSTRILTETTKNAGKRTADGSEFEKRTADGSEFESPKKKAKVE

SEQ ID NO: 1768 - protein, 2213 aa, synthetic construct
MPAAKRVKLDGGDKKYSIGLDIGTNSVGWAVITDEYKVPSKKFKVLGNTDRHSIKKNLIGALLFDSGETAEATRLKRTARRRYTRRKNRICYLQEIFSNEMAKVDDSFFHRLEESFLVEEDKKHERHPIFGNIVDEVAYHEKYPTIYHLRKKLVDSTDKADLRLIYLALAHMIKFRGHFLIEGDLNPDNSDVDKLFIQLVQTYNQLFEENPINASGVDAKAILSARLSKSRRLENLIAQLPGEKKNGLFGNLIALSLGLTPNFKSNFDLAEDAKLQLSKDTYDDDLDNLLAQIGDQYADLFLAAKNLSDAILLSDILRVNTEITKAPLSASMIKRYDEHHQDLTLLKALVRQQLPEKYKEIFFDQSKNGYAGYIDGGASQEEFYKFIKPILEKMDGTEELLVKLNREDLLRKQRTFDNGSIPHQIHLGELHAILRRQEDFYPFLKDNREKIEKILTFRIPYYVGPLARGNSRFAWMTRKSEETITPWNFEEVVDKGASAQSFIERMTNFDKNLPNEKVLPKHSLLYEYFTVYNELTKVKYVTEGMRKPAFLSGEQKKAIVDLLFKTNRKVTVKQLKEDYFKKIECFDSVEISGVEDRFNASLGTYHDLLKIIKDKDFLDNEENEDILEDIVLTLTLFEDREMIEERLKTYAHLFDDKVMKQLKRRRYTGWGRLSRKLINGIRDKQSGKTILDFLKSDGFANRNFMQLIHDDSLTFKEDIQKAQVSGQGDSLHEHIANLAGSPAIKKGILQTVKVVDELVKVMGRHKPENIVIEMARENQTTQKGQKNSRERMKRIEEGIKELGSQILKEHPVENTQLQNEKLYLYYLQNGRDMYVDQELDINRLSDYDVDHIVPQSFLKDDSIDNKVLTRSDKARGKSDNVPSEEVVKKMKNYWRQLLNAKLITQRKFDNLTKAERGGLSELDKAGFIKRQLVETRQITKHVAQILDSRMNTKYDENDKLIREVKVITLKSKLVSDFRKDFQFYKVREINNYHHAHDAYLNAVVGTALIKKYPKLESEFVYGDYKVYDVRKMIAKSEQEIGKATAKYFFYSNIMNFFKTEITLANGEIRKRPLIETNGETGEIVWDKGRDFATVRKVLSMPQVNIVKKTEVQTGGFSKESILPKRNSDKLIARKKDWDPKKYGGFDSPTVAYSVLVVAKVEKGKSKKLKSVKELLGITIMERSSFEKNPIDFLEAKGYKEVKKDLIIKLPKYSLFELENGRKRMLASAGELQKGNELALPSKYVNFLYLASHYEKLKGSPEDNEQKQLFVEQHKHYLDEIIEQISEFSKRVILADANLDKVLSAYNKHRDKPIREQAENIIHLFTLTNLGAPAAFKYFDTTIDRKRYTSTKEVLDATLIHQSITGLYETRIDLSQLGGDGGGGSGSSGGTLGDQGSRGSDPLPEPRVTLTVEGIPTEFLVNTGAEHSVLTKPMGKMGSKRTVVAGATGSKVYPWTTKRLLKIGQKQVTHSFLVIPECPAPLLGRDLLTKLKAQIQFSTEGPQVTWEDRPAMCLVLNLEEEYRLHEKPVPPSIDPSWLQLFPMVWAEKAGMGLANQVPPVVVELKSDASPVAVRQYPMSKEAREGIRPHIQRFLDLGILVPCQSPWNTPLLPVKKPGTNDYRPVQDLREVNKRVQDIHPTVPNPYNLLSSLPPSHTWYSVLDLKDAFFCLKLHPNSQPLFAFEWRDPEKGNTGQLTWTRLPQGFKNSPTLFNEALHRDLASFRALNPQVVMLQYVDDLLVAAPTYRDCKEGTRRLLQELSKLGYRVSAKKAQLCREEVTYLGYLLKGGKRWLTPARKATVMKIPTPTTPRQVREFLGTAGFCRLWIPGFASLAAPLYPLTRPKVPFTWTEAHQEAFGRIKEALLSAPALALPDLTKPFALYVDEKEGVARGVLTQTLGPWRRPVAYLSKKLDPVASGWPTCLKAIAAVALLLKDADKLTLGQNVLVIAPHNLESIVRQPPDRWMTNARMTHYQSLLLNERVSFAPPAILNPATLLPVESDDTPIHICSEILAEETGTRPDLRDQPLPGVPAWYTDGSSFIMDGRRQAGAAIVDNKRTVWASNLPEGTSAQKAELIALTQALRLAEGKSINIYTDSRYAFATAHVHGAIYKQRGWLTSAGKDIKNKEEILALLEAIHLPKRVAIIHCPGHQRGTDPVATGNRKADEAAKQAAQSTRILTETTKNAGKRTADGSEFEKRTADGSEFESPKKKAKVE

SEQ ID NO: 1769 - protein, 2218 aa, synthetic construct
MPAAKRVKLDGGDKKYSIGLDIGTNSVGWAVITDEYKVPSKKFKVLGNTDRHSIKKNLIGALLFDSGETAEATRLKRTARRRYTRRKNRICYLQEIFSNEMAKVDDSFFHRLEESFLVEEDKKHERHPIFGNIVDEVAYHEKYPTIYHLRKKLVDSTDKADLRLIYLALAHMIKFRGHFLIEGDLNPDNSDVDKLFIQLVQTYNQLFEENPINASGVDAKAILSARLSKSRRLENLIAQLPGEKKNGLFGNLIALSLGLTPNFKSNFDLAEDAKLQLSKDTYDDDLDNLLAQIGDQYADLFLAAKNLSDAILLSDILRVNTEITKAPLSASMIKRYDEHHQDLTLLKALVRQQLPEKYKEIFFDQSKNGYAGYIDGGASQEEFYKFIKPILEKMDGTEELLVKLNREDLLRKQRTFDNGSIPHQIHLGELHAILRRQEDFYPFLKDNREKIEKILTFRIPYYVGPLARGNSRFAWMTRKSEETITPWNFEEVVDKGASAQSFIERMTNFDKNLPNEKVLPKHSLLYEYFTVYNELTKVKYVTEGMRKPAFLSGEQKKAIVDLLFKTNRKVTVKQLKEDYFKKIECFDSVEISGVEDRFNASLGTYHDLLKIIKDKDFLDNEENEDILEDIVLTLTLFEDREMIEERLKTYAHLFDDKVMKQLKRRRYTGWGRLSRKLINGIRDKQSGKTILDFLKSDGFANRNFMQLIHDDSLTFKEDIQKAQVSGQGDSLHEHIANLAGSPAIKKGILQTVKVVDELVKVMGRHKPENIVIEMARENQTTQKGQKNSRERMKRIEEGIKELGSQILKEHPVENTQLQNEKLYLYYLQNGRDMYVDQELDINRLSDYDVDHIVPQSFLKDDSIDNKVLTRSDKARGKSDNVPSEEVVKKMKNYWRQLLNAKLITQRKFDNLTKAERGGLSELDKAGFIKRQLVETRQITKHVAQILDSRMNTKYDENDKLIREVKVITLKSKLVSDFRKDFQFYKVREINNYHHAHDAYLNAVVGTALIKKYPKLESEFVYGDYKVYDVRKMIAKSEQEIGKATAKYFFYSNIMNFFKTEITLANGEIRKRPLIETNGETGEIVWDKGRDFATVRKVLSMPQVNIVKKTEVQTGGFSKESILPKRNSDKLIARKKDWDPKKYGGFDSPTVAYSVLVVAKVEKGKSKKLKSVKELLGITIMERSSFEKNPIDFLEAKGYKEVKKDLIIKLPKYSLFELENGRKRMLASAGELQKGNELALPSKYVNFLYLASHYEKLKGSPEDNEQKQLFVEQHKHYLDEIIEQISEFSKRVILADANLDKVLSAYNKHRDKPIREQAENIIHLFTLTNLGAPAAFKYFDTTIDRKRYTSTKEVLDATLIHQSITGLYETRIDLSQLGGDGGGGSEAAAKGSSGGTLGDQGSRGSDPLPEPRVTLTVEGIPTEFLVNTGAEHSVLTKPMGKMGSKRTVVAGATGSKVYPWTTKRLLKIGQKQVTHSFLVIPECPAPLLGRDLLTKLKAQIQFSTEGPQVTWEDRPAMCLVLNLEEEYRLHEKPVPPSIDPSWLQLFPMVWAEKAGMGLANQVPPVVVELKSDASPVAVRQYPMSKEAREGIRPHIQRFLDLGILVPCQSPWNTPLLPVKKPGTNDYRPVQDLREVNKRVQDIHPTVPNPYNLLSSLPPSHTWYSVLDLKDAFFCLKLHPNSQPLFAFEWRDPEKGNTGQLTWTRLPQGFKNSPTLFNEALHRDLASFRALNPQVVMLQYVDDLLVAAPTYRDCKEGTRRLLQELSKLGYRVSAKKAQLCREEVTYLGYLLKGGKRWLTPARKATVMKIPTPTTPRQVREFLGKAGFCRLFIPGFASLAAPLYPLTRPKVPFTWTEAHQEAFGRIKEALLSAPALALPDLTKPFALYVDEKEGVARGVLTQTLGPWRRPVAYLSKKLDPVASGWPTCLKAIAAVALLLKDADKLTLGQNVLVIAPHNLESIVRQPPDRWMTNARMTHYQSLLLNERVSFAPPAILNPATLLPVESDDTPIHICSEILAEETGTRPDLRDQPLPGVPAWYTDGSSFIMDGRRQAGAAIVDNKRTVWASNLPEGTSAQKAELIALTQALRLAEGKSINIYTDSRYAFATAHVHGAIYKQRGWLTSAGKDIKNKEEILALLEAIHLPKRVAIIHCPGHQRGTDPVATGNRKADEAAKQAAQSTRILTETTKNAGKRTADGSEFEKRTADGSEFESPKKKAKVE

SEQ ID NO: 1770 - protein, 2218 aa, synthetic construct
MPAAKRVKLDGGDKKYSIGLDIGTNSVGWAVITDEYKVPSKKFKVLGNTDRHSIKKNLIGALLFDSGETAEATRLKRTARRRYTRRKNRICYLQEIFSNEMAKVDDSFFHRLEESFLVEEDKKHERHPIFGNIVDEVAYHEKYPTIYHLRKKLVDSTDKADLRLIYLALAHMIKFRGHFLIEGDLNPDNSDVDKLFIQLVQTYNQLFEENPINASGVDAKAILSARLSKSRRLENLIAQLPGEKKNGLFGNLIALSLGLTPNFKSNFDLAEDAKLQLSKDTYDDDLDNLLAQIGDQYADLFLAAKNLSDAILLSDILRVNTEITKAPLSASMIKRYDEHHQDLTLLKALVRQQLPEKYKEIFFDQSKNGYAGYIDGGASQEEFYKFIKPILEKMDGTEELLVKLNREDLLRKQRTFDNGSIPHQIHLGELHAILRRQEDFYPFLKDNREKIEKILTFRIPYYVGPLARGNSRFAWMTRKSEETITPWNFEEVVDKGASAQSFIERMTNFDKNLPNEKVLPKHSLLYEYFTVYNELTKVKYVTEGMRKPAFLSGEQKKAIVDLLFKTNRKVTVKQLKEDYFKKIECFDSVEISGVEDRFNASLGTYHDLLKIIKDKDFLDNEENEDILEDIVLTLTLFEDREMIEERLKTYAHLFDDKVMKQLKRRRYTGWGRLSRKLINGIRDKQSGKTILDFLKSDGFANRNFMQLIHDDSLTFKEDIQKAQVSGQGDSLHEHIANLAGSPAIKKGILQTVKVVDELVKVMGRHKPENIVIEMARENQTTQKGQKNSRERMKRIEEGIKELGSQILKEHPVENTQLQNEKLYLYYLQNGRDMYVDQELDINRLSDYDVDHIVPQSFLKDDSIDNKVLTRSDKARGKSDNVPSEEVVKKMKNYWRQLLNAKLITQRKFDNLTKAERGGLSELDKAGFIKRQLVETRQITKHVAQILDSRMNTKYDENDKLIREVKVITLKSKLVSDFRKDFQFYKVREINNYHHAHDAYLNAVVGTALIKKYPKLESEFVYGDYKVYDVRKMIAKSEQEIGKATAKYFFYSNIMNFFKTEITLANGEIRKRPLIETNGETGEIVWDKGRDFATVRKVLSMPQVNIVKKTEVQTGGFSKESILPKRNSDKLIARKKDWDPKKYGGFDSPTVAYSVLVVAKVEKGKSKKLKSVKELLGITIMERSSFEKNPIDFLEAKGYKEVKKDLIIKLPKYSLFELENGRKRMLASAGELQKGNELALPSKYVNFLYLASHYEKLKGSPEDNEQKQLFVEQHKHYLDEIIEQISEFSKRVILADANLDKVLSAYNKHRDKPIREQAENIIHLFTLTNLGAPAAFKYFDTTIDRKRYTSTKEVLDATLIHQSITGLYETRIDLSQLGGDGGEAAAKGGGPAPGGTLGDQGSRGSDPLPEPRVTLTVEGIPTEFLVNTGAEHSVLTKPMGKMGSKRTVVAGATGSKVYPWTTKRLLKIGQKQVTHSFLVIPECPAPLLGRDLLTKLKAQIQFSTEGPQVTWEDRPAMCLVLNLEEEYRLHEKPVPPSIDPSWLQLFPMVWAEKAGMGLANQVPPVVVELKSDASPVAVRQYPMSKEAREGIRPHIQRFLDLGILVPCQSPWNTPLLPVKKPGTNDYRPVQDLREVNKRVQDIHPTVPNPYNLLSSLPPSHTWYSVLDLKDAFFCLKLHPNSQPLFAFEWRDPEKGNTGQLTWTRLPQGFKNSPTLFNEALHRDLASFRALNPQVVMLQYVDDLLVAAPTYRDCKEGTRRLLQELSKLGYRVSAKKAQLCREEVTYLGYLLKGGKRWLTPARKATVMKIPTPTTPRQVREFLGKAGFCRLFIPGFASLAAPLYPLTRPKVPFTWTEAHQEAFGRIKEALLSAPALALPDLTKPFALYVDEKEGVARGVLTQTLGPWRRPVAYLSKKLDPVASGWPTCLKAIAAVALLLKDADKLTLGQNVLVIAPHNLESIVRQPPDRWMTNARMTHYQSLLLNERVSFAPPAILNPATLLPVESDDTPIHICSEILAEETGTRPDLRDQPLPGVPAWYTDGSSFIMDGRRQAGAAIVDNKRTVWASNLPEGTSAQKAELIALTQALRLAEGKSINIYTDSRYAFATAHVHGAIYKQRGWLTSAGKDIKNKEEILALLEAIHLPKRVAIIHCPGHQRGTDPVATGNRKADEAAKQAAQSTRILTETTKNAGKRTADGSEFEKRTADGSEFESPKKKAKVE

SEQ ID NO: 1771 - protein, 2218 aa, synthetic construct
MPAAKRVKLDGGDKKYSIGLDIGTNSVGWAVITDEYKVPSKKFKVLGNTDRHSIKKNLIGALLFDSGETAEATRLKRTARRRYTRRKNRICYLQEIFSNEMAKVDDSFFHRLEESFLVEEDKKHERHPIFGNIVDEVAYHEKYPTIYHLRKKLVDSTDKADLRLIYLALAHMIKFRGHFLIEGDLNPDNSDVDKLFIQLVQTYNQLFEENPINASGVDAKAILSARLSKSRRLENLIAQLPGEKKNGLFGNLIALSLGLTPNFKSNFDLAEDAKLQLSKDTYDDDLDNLLAQIGDQYADLFLAAKNLSDAILLSDILRVNTEITKAPLSASMIKRYDEHHQDLTLLKALVRQQLPEKYKEIFFDQSKNGYAGYIDGGASQEEFYKFIKPILEKMDGTEELLVKLNREDLLRKQRTFDNGSIPHQIHLGELHAILRRQEDFYPFLKDNREKIEKILTFRIPYYVGPLARGNSRFAWMTRKSEETITPWNFEEVVDKGASAQSFIERMTNFDKNLPNEKVLPKHSLLYEYFTVYNELTKVKYVTEGMRKPAFLSGEQKKAIVDLLFKTNRKVTVKQLKEDYFKKIECFDSVEISGVEDRFNASLGTYHDLLKIIKDKDFLDNEENEDILEDIVLTLTLFEDREMIEERLKTYAHLFDDKVMKQLKRRRYTGWGRLSRKLINGIRDKQSGKTILDFLKSDGFANRNFMQLIHDDSLTFKEDIQKAQVSGQGDSLHEHIANLAGSPAIKKGILQTVKVVDELVKVMGRHKPENIVIEMARENQTTQKGQKNSRERMKRIEEGIKELGSQILKEHPVENTQLQNEKLYLYYLQNGRDMYVDQELDINRLSDYDVDHIVPQSFLKDDSIDNKVLTRSDKARGKSDNVPSEEVVKKMKNYWRQLLNAKLITQRKFDNLTKAERGGLSELDKAGFIKRQLVETRQITKHVAQILDSRMNTKYDENDKLIREVKVITLKSKLVSDFRKDFQFYKVREINNYHHAHDAYLNAVVGTALIKKYPKLESEFVYGDYKVYDVRKMIAKSEQEIGKATAKYFFYSNIMNFFKTEITLANGEIRKRPLIETNGETGEIVWDKGRDFATVRKVLSMPQVNIVKKTEVQTGGFSKESILPKRNSDKLIARKKDWDPKKYGGFDSPTVAYSVLVVAKVEKGKSKKLKSVKELLGITIMERSSFEKNPIDFLEAKGYKEVKKDLIIKLPKYSLFELENGRKRMLASAGELQKGNELALPSKYVNFLYLASHYEKLKGSPEDNEQKQLFVEQHKHYLDEIIEQISEFSKRVILADANLDKVLSAYNKHRDKPIREQAENIIHLFTLTNLGAPAAFKYFDTTIDRKRYTSTKEVLDATLIHQSITGLYETRIDLSQLGGDGGGGGEAAAKGGSGGTLGDQGSRGSDPLPEPRVTLTVEGIPTEFLVNTGAEHSVLTKPMGKMGSKRTVVAGATGSKVYPWTTKRLLKIGQKQVTHSFLVIPECPAPLLGRDLLTKLKAQIQFSTEGPQVTWEDRPAMCLVLNLEEEYRLHEKPVPPSIDPSWLQLFPMVWAEKAGMGLANQVPPVVVELKSDASPVAVRQYPMSKEAREGIRPHIQRFLDLGILVPCQSPWNTPLLPVKKPGTNDYRPVQDLREVNKRVQDIHPTVPNPYNLLSSLPPSHTWYSVLDLKDAFFCLKLHPNSQPLFAFEWRDPEKGNTGQLTWTRLPQGFKNSPTLFNEALHRDLASFRALNPQVVMLQYVDDLLVAAPTYRDCKEGTRRLLQELSKLGYRVSAKKAQLCREEVTYLGYLLKGGKRWLTPARKATVMKIPTPTTPRQVREFLGKAGFCRLFIPGFASLAAPLYPLTRPKVPFTWTEAHQEAFGRIKEALLSAPALALPDLTKPFALYVDEKEGVARGVLTQTLGPWRRPVAYLSKKLDPVASGWPTCLKAIAAVALLLKDADKLTLGQNVLVIAPHNLESIVRQPPDRWMTNARMTHYQSLLLNERVSFAPPAILNPATLLPVESDDTPIHICSEILAEETGTRPDLRDQPLPGVPAWYTDGSSFIMDGRRQAGAAIVDNKRTVWASNLPEGTSAQKAELIALTQALRLAEGKSINIYTDSRYAFATAHVHGAIYKQRGWLTSAGKDIKNKEEILALLEAIHLPKRVAIIHCPGHQRGTDPVATGNRKADEAAKQAAQSTRILTETTKNAGKRTADGSEFEKRTADGSEFESPKKKAKVE

SEQ ID NO: 1772 - protein, 2213 aa, synthetic construct
MPAAKRVKLDGGDKKYSIGLDIGTNSVGWAVITDEYKVPSKKFKVLGNTDRHSIKKNLIGALLFDSGETAEATRLKRTARRRYTRRKNRICYLQEIFSNEMAKVDDSFFHRLEESFLVEEDKKHERHPIFGNIVDEVAYHEKYPTIYHLRKKLVDSTDKADLRLIYLALAHMIKFRGHFLIEGDLNPDNSDVDKLFIQLVQTYNQLFEENPINASGVDAKAILSARLSKSRRLENLIAQLPGEKKNGLFGNLIALSLGLTPNFKSNFDLAEDAKLQLSKDTYDDDLDNLLAQIGDQYADLFLAAKNLSDAILLSDILRVNTEITKAPLSASMIKRYDEHHQDLTLLKALVRQQLPEKYKEIFFDQSKNGYAGYIDGGASQEEFYKFIKPILEKMDGTEELLVKLNREDLLRKQRTFDNGSIPHQIHLGELHAILRRQEDFYPFLKDNREKIEKILTFRIPYYVGPLARGNSRFAWMTRKSEETITPWNFEEVVDKGASAQSFIERMTNFDKNLPNEKVLPKHSLLYEYFTVYNELTKVKYVTEGMRKPAFLSGEQKKAIVDLLFKTNRKVTVKQLKEDYFKKIECFDSVEISGVEDRFNASLGTYHDLLKIIKDKDFLDNEENEDILEDIVLTLTLFEDREMIEERLKTYAHLFDDKVMKQLKRRRYTGWGRLSRKLINGIRDKQSGKTILDFLKSDGFANRNFMQLIHDDSLTFKEDIQKAQVSGQGDSLHEHIANLAGSPAIKKGILQTVKVVDELVKVMGRHKPENIVIEMARENQTTQKGQKNSRERMKRIEEGIKELGSQILKEHPVENTQLQNEKLYLYYLQNGRDMYVDQELDINRLSDYDVDHIVPQSFLKDDSIDNKVLTRSDKARGKSDNVPSEEVVKKMKNYWRQLLNAKLITQRKFDNLTKAERGGLSELDKAGFIKRQLVETRQITKHVAQILDSRMNTKYDENDKLIREVKVITLKSKLVSDFRKDFQFYKVREINNYHHAHDAYLNAVVGTALIKKYPKLESEFVYGDYKVYDVRKMIAKSEQEIGKATAKYFFYSNIMNFFKTEITLANGEIRKRPLIETNGETGEIVWDKGRDFATVRKVLSMPQVNIVKKTEVQTGGFSKESILPKRNSDKLIARKKDWDPKKYGGFDSPTVAYSVLVVAKVEKGKSKKLKSVKELLGITIMERSSFEKNPIDFLEAKGYKEVKKDLIIKLPKYSLFELENGRKRMLASAGELQKGNELALPSKYVNFLYLASHYEKLKGSPEDNEQKQLFVEQHKHYLDEIIEQISEFSKRVILADANLDKVLSAYNKHRDKPIREQAENIIHLFTLTNLGAPAAFKYFDTTIDRKRYTSTKEVLDATLIHQSITGLYETRIDLSQLGGDGGGGGGSSGGTLGDQGSRGSDPLPEPRVTLTVEGIPTEFLVNTGAEHSVLTKPMGKMGSKRTVVAGATGSKVYPWTTKRLLKIGQKQVTHSFLVIPECPAPLLGRDLLTKLKAQIQFSTEGPQVTWEDRPAMCLVLNLEEEYRLHEKPVPPSIDPSWLQLFPMVWAEKAGMGLANQVPPVVVELKSDASPVAVRQYPMSKEAREGIRPHIQRFLDLGILVPCQSPWNTPLLPVKKPGTNDYRPVQDLREVNKRVQDIHPTVPNPYNLLSSLPPSHTWYSVLDLKDAFFCLKLHPNSQPLFAFEWRDPEKGNTGQLTWTRLPQGFKNSPTLFNEALHRDLASFRALNPQVVMLQYVDDLLVAAPTYRDCKEGTRRLLQELSKLGYRVSAKKAQLCREEVTYLGYLLKGGKRWLTPARKATVMKIPTPTTPRQVREFLGKAGFCRLFIPGFASLAAPLYPLTRPKVPFTWTEAHQEAFGRIKEALLSAPALALPDLTKPFALYVDEKEGVARGVLTQTLGPWRRPVAYLSKKLDPVASGWPTCLKAIAAVALLLKDADKLTLGQNVLVIAPHNLESIVRQPPDRWMTNARMTHYQSLLLNERVSFAPPAILNPATLLPVESDDTPIHICSEILAEETGTRPDLRDQPLPGVPAWYTDGSSFIMDGRRQAGAAIVDNKRTVWASNLPEGTSAQKAELIALTQALRLAEGKSINIYTDSRYAFATAHVHGAIYKQRGWLTSAGKDIKNKEEILALLEAIHLPKRVAIIHCPGHQRGTDPVATGNRKADEAAKQAAQSTRILTETTKNAGKRTADGSEFEKRTADGSEFESPKKKAKVE

SEQ ID NO: 1773 - protein, 2217 aa, synthetic construct
MPAAKRVKLDGGDKKYSIGLDIGTNSVGWAVITDEYKVPSKKFKVLGNTDRHSIKKNLIGALLFDSGETAEATRLKRTARRRYTRRKNRICYLQEIFSNEMAKVDDSFFHRLEESFLVEEDKKHERHPIFGNIVDEVAYHEKYPTIYHLRKKLVDSTDKADLRLIYLALAHMIKFRGHFLIEGDLNPDNSDVDKLFIQLVQTYNQLFEENPINASGVDAKAILSARLSKSRRLENLIAQLPGEKKNGLFGNLIALSLGLTPNFKSNFDLAEDAKLQLSKDTYDDDLDNLLAQIGDQYADLFLAAKNLSDAILLSDILRVNTEITKAPLSASMIKRYDEHHQDLTLLKALVRQQLPEKYKEIFFDQSKNGYAGYIDGGASQEEFYKFIKPILEKMDGTEELLVKLNREDLLRKQRTFDNGSIPHQIHLGELHAILRRQEDFYPFLKDNREKIEKILTFRIPYYVGPLARGNSRFAWMTRKSEETITPWNFEEVVDKGASAQSFIERMTNFDKNLPNEKVLPKHSLLYEYFTVYNELTKVKYVTEGMRKPAFLSGEQKKAIVDLLFKTNRKVTVKQLKEDYFKKIECFDSVEISGVEDRFNASLGTYHDLLKIIKDKDFLDNEENEDILEDIVLTLTLFEDREMIEERLKTYAHLFDDKVMKQLKRRRYTGWGRLSRKLINGIRDKQSGKTILDFLKSDGFANRNFMQLIHDDSLTFKEDIQKAQVSGQGDSLHEHIANLAGSPAIKKGILQTVKVVDELVKVMGRHKPENIVIEMARENQTTQKGQKNSRERMKRIEEGIKELGSQILKEHPVENTQLQNEKLYLYYLQNGRDMYVDQELDINRLSDYDVDHIVPQSFLKDDSIDNKVLTRSDKARGKSDNVPSEEVVKKMKNYWRQLLNAKLITQRKFDNLTKAERGGLSELDKAGFIKRQLVETRQITKHVAQILDSRMNTKYDENDKLIREVKVITLKSKLVSDFRKDFQFYKVREINNYHHAHDAYLNAVVGTALIKKYPKLESEFVYGDYKVYDVRKMIAKSEQEIGKATAKYFFYSNIMNFFKTEITLANGEIRKRPLIETNGETGEIVWDKGRDFATVRKVLSMPQVNIVKKTEVQTGGFSKESILPKRNSDKLIARKKDWDPKKYGGFDSPTVAYSVLVVAKVEKGKSKKLKSVKELLGITIMERSSFEKNPIDFLEAKGYKEVKKDLIIKLPKYSLFELENGRKRMLASAGELQKGNELALPSKYVNFLYLASHYEKLKGSPEDNEQKQLFVEQHKHYLDEIIEQISEFSKRVILADANLDKVLSAYNKHRDKPIREQAENIIHLFTLTNLGAPAAFKYFDTTIDRKRYTSTKEVLDATLIHQSITGLYETRIDLSQLGGDGGEAAAKEAAAKGGTLGDQGSRGSDPLPEPRVTLTVEGIPTEFLVNTGAEHSVLTKPMGKMGSKRTVVAGATGSKVYPWTTKRLLKIGQKQVTHSFLVIPECPAPLLGRDLLTKLKAQIQFSTEGPQVTWEDRPAMCLVLNLEEEYRLHEKPVPPSIDPSWLQLFPMVWAEKAGMGLANQVPPVVVELKSDASPVAVRQYPMSKEAREGIRPHIQRFLDLGILVPCQSPWNTPLLPVKKPGTNDYRPVQDLREVNKRVQDIHPTVPNPYNLLSSLPPSHTWYSVLDLKDAFFCLKLHPNSQPLFAFEWRDPEKGNTGQLTWTRLPQGFKNSPTLFNEALHRDLASFRALNPQVVMLQYVDDLLVAAPTYRDCKEGTRRLLQELSKLGYRVSAKKAQLCREEVTYLGYLLKGGKRWLTPARKATVMKIPTPTTPRQVREFLGKAGFCRLFIPGFASLAAPLYPLTRPKVPFTWTEAHQEAFGRIKEALLSAPALALPDLTKPFALYVDEKEGVARGVLTQTLGPWRRPVAYLSKKLDPVASGWPTCLKAIAAVALLLKDADKLTLGQNVLVIAPHNLESIVRQPPDRWMTNARMTHYQSLLLNERVSFAPPAILNPATLLPVESDDTPIHICSEILAEETGTRPDLRDQPLPGVPAWYTDGSSFIMDGRRQAGAAIVDNKRTVWASNLPEGTSAQKAELIALTQALRLAEGKSINIYTDSRYAFATAHVHGAIYKQRGWLTSAGKDIKNKEEILALLEAIHLPKRVAIIHCPGHQRGTDPVATGNRKADEAAKQAAQSTRILTETTKNAGKRTADGSEFEKRTADGSEFESPKKKAKVE

SEQ ID NO: 1774 - protein, 2216 aa, synthetic construct
MPAAKRVKLDGGDKKYSIGLDIGTNSVGWAVITDEYKVPSKKFKVLGNTDRHSIKKNLIGALLFDSGETAEATRLKRTARRRYTRRKNRICYLQEIFSNEMAKVDDSFFHRLEESFLVEEDKKHERHPIFGNIVDEVAYHEKYPTIYHLRKKLVDSTDKADLRLIYLALAHMIKFRGHFLIEGDLNPDNSDVDKLFIQLVQTYNQLFEENPINASGVDAKAILSARLSKSRRLENLIAQLPGEKKNGLFGNLIALSLGLTPNFKSNFDLAEDAKLQLSKDTYDDDLDNLLAQIGDQYADLFLAAKNLSDAILLSDILRVNTEITKAPLSASMIKRYDEHHQDLTLLKALVRQQLPEKYKEIFFDQSKNGYAGYIDGGASQEEFYKFIKPILEKMDGTEELLVKLNREDLLRKQRTFDNGSIPHQIHLGELHAILRRQEDFYPFLKDNREKIEKILTFRIPYYVGPLARGNSRFAWMTRKSEETITPWNFEEVVDKGASAQSFIERMTNFDKNLPNEKVLPKHSLLYEYFTVYNELTKVKYVTEGMRKPAFLSGEQKKAIVDLLFKTNRKVTVKQLKEDYFKKIECFDSVEISGVEDRFNASLGTYHDLLKIIKDKDFLDNEENEDILEDIVLTLTLFEDREMIEERLKTYAHLFDDKVMKQLKRRRYTGWGRLSRKLINGIRDKQSGKTILDFLKSDGFANRNFMQLIHDDSLTFKEDIQKAQVSGQGDSLHEHIANLAGSPAIKKGILQTVKVVDELVKVMGRHKPENIVIEMARENQTTQKGQKNSRERMKRIEEGIKELGSQILKEHPVENTQLQNEKLYLYYLQNGRDMYVDQELDINRLSDYDVDHIVPQSFLKDDSIDNKVLTRSDKARGKSDNVPSEEVVKKMKNYWRQLLNAKLITQRKFDNLTKAERGGLSELDKAGFIKRQLVETRQITKHVAQILDSRMNTKYDENDKLIREVKVITLKSKLVSDFRKDFQFYKVREINNYHHAHDAYLNAVVGTALIKKYPKLESEFVYGDYKVYDVRKMIAKSEQEIGKATAKYFFYSNIMNFFKTEITLANGEIRKRPLIETNGETGEIVWDKGRDFATVRKVLSMPQVNIVKKTEVQTGGFSKESILPKRNSDKLIARKKDWDPKKYGGFDSPTVAYSVLVVAKVEKGKSKKLKSVKELLGITIMERSSFEKNPIDFLEAKGYKEVKKDLIIKLPKYSLFELENGRKRMLASAGELQKGNELALPSKYVNFLYLASHYEKLKGSPEDNEQKQLFVEQHKHYLDEIIEQISEFSKRVILADANLDKVLSAYNKHRDKPIREQAENIIHLFTLTNLGAPAAFKYFDTTIDRKRYTSTKEVLDATLIHQSITGLYETRIDLSQLGGDGGPAPGGGGSSGGTLGDQGSRGSDPLPEPRVTLTVEGIPTEFLVNTGAEHSVLTKPMGKMGSKRTVVAGATGSKVYPWTTKRLLKIGQKQVTHSFLVIPECPAPLLGRDLLTKLKAQIQFSTEGPQVTWEDRPAMCLVLNLEEEYRLHEKPVPPSIDPSWLQLFPMVWAEKAGMGLANQVPPVVVELKSDASPVAVRQYPMSKEAREGIRPHIQRFLDLGILVPCQSPWNTPLLPVKKPGTNDYRPVQDLREVNKRVQDIHPTVPNPYNLLSSLPPSHTWYSVLDLKDAFFCLKLHPNSQPLFAFEWRDPEKGNTGQLTWTRLPQGFKNSPTLFNEALHRDLASFRALNPQVVMLQYVDDLLVAAPTYRDCKEGTRRLLQELSKLGYRVSAKKAQLCREEVTYLGYLLKGGKRWLTPARKATVMKIPTPTTPRQVREFLGKAGFCRLFIPGFASLAAPLYPLTRPKVPFTWTEAHQEAFGRIKEALLSAPALALPDLTKPFALYVDEKEGVARGVLTQTLGPWRRPVAYLSKKLDPVASGWPTCLKAIAAVALLLKDADKLTLGQNVLVIAPHNLESIVRQPPDRWMTNARMTHYQSLLLNERVSFAPPAILNPATLLPVESDDTPIHICSEILAEETGTRPDLRDQPLPGVPAWYTDGSSFIMDGRRQAGAAIVDNKRTVWASNLPEGTSAQKAELIALTQALRLAEGKSINIYTDSRYAFATAHVHGAIYKQRGWLTSAGKDIKNKEEILALLEAIHLPKRVAIIHCPGHQRGTDPVATGNRKADEAAKQAAQSTRILTETTKNAGKRTADGSEFEKRTADGSEFESPKKKAKVE

SEQ ID NO: 1775 - protein, 2216 aa, synthetic construct
MPAAKRVKLDGGDKKYSIGLDIGTNSVGWAVITDEYKVPSKKFKVLGNTDRHSIKKNLIGALLFDSGETAEATRLKRTARRRYTRRKNRICYLQEIFSNEMAKVDDSFFHRLEESFLVEEDKKHERHPIFGNIVDEVAYHEKYPTIYHLRKKLVDSTDKADLRLIYLALAHMIKFRGHFLIEGDLNPDNSDVDKLFIQLVQTYNQLFEENPINASGVDAKAILSARLSKSRRLENLIAQLPGEKKNGLFGNLIALSLGLTPNFKSNFDLAEDAKLQLSKDTYDDDLDNLLAQIGDQYADLFLAAKNLSDAILLSDILRVNTEITKAPLSASMIKRYDEHHQDLTLLKALVRQQLPEKYKEIFFDQSKNGYAGYIDGGASQEEFYKFIKPILEKMDGTEELLVKLNREDLLRKQRTFDNGSIPHQIHLGELHAILRRQEDFYPFLKDNREKIEKILTFRIPYYVGPLARGNSRFAWMTRKSEETITPWNFEEVVDKGASAQSFIERMTNFDKNLPNEKVLPKHSLLYEYFTVYNELTKVKYVTEGMRKPAFLSGEQKKAIVDLLFKTNRKVTVKQLKEDYFKKIECFDSVEISGVEDRFNASLGTYHDLLKIIKDKDFLDNEENEDILEDIVLTLTLFEDREMIEERLKTYAHLFDDKVMKQLKRRRYTGWGRLSRKLINGIRDKQSGKTILDFLKSDGFANRNFMQLIHDDSLTFKEDIQKAQVSGQGDSLHEHIANLAGSPAIKKGILQTVKVVDELVKVMGRHKPENIVIEMARENQTTQKGQKNSRERMKRIEEGIKELGSQILKEHPVENTQLQNEKLYLYYLQNGRDMYVDQELDINRLSDYDVDHIVPQSFLKDDSIDNKVLTRSDKARGKSDNVPSEEVVKKMKNYWRQLLNAKLITQRKFDNLTKAERGGLSELDKAGFIKRQLVETRQITKHVAQILDSRMNTKYDENDKLIREVKVITLKSKLVSDFRKDFQFYKVREINNYHHAHDAYLNAVVGTALIKKYPKLESEFVYGDYKVYDVRKMIAKSEQEIGKATAKYFFYSNIMNFFKTEITLANGEIRKRPLIETNGETGEIVWDKGRDFATVRKVLSMPQVNIVKKTEVQTGGFSKESILPKRNSDKLIARKKDWDPKKYGGFDSPTVAYSVLVVAKVEKGKSKKLKSVKELLGITIMERSSFEKNPIDFLEAKGYKEVKKDLIIKLPKYSLFELENGRKRMLASAGELQKGNELALPSKYVNFLYLASHYEKLKGSPEDNEQKQLFVEQHKHYLDEIIEQISEFSKRVILADANLDKVLSAYNKHRDKPIREQAENIIHLFTLTNLGAPAAFKYFDTTIDRKRYTSTKEVLDATLIHQSITGLYETRIDLSQLGGDGGGGGGGSGSSGGTLGDQGSRGSDPLPEPRVTLTVEGIPTEFLVNTGAEHSVLTKPMGKMGSKRTVVAGATGSKVYPWTTKRLLKIGQKQVTHSFLVIPECPAPLLGRDLLTKLKAQIQFSTEGPQVTWEDRPAMCLVLNLEEEYRLHEKPVPPSIDPSWLQLFPMVWAEKAGMGLANQVPPVVVELKSDASPVAVRQYPMSKEAREGIRPHIQRFLDLGILVPCQSPWNTPLLPVKKPGTNDYRPVQDLREVNKRVQDIHPTVPNPYNLLSSLPPSHTWYSVLDLKDAFFCLKLHPNSQPLFAFEWRDPEKGNTGQLTWTRLPQGFKNSPTLFNEALHRDLASFRALNPQVVMLQYVDDLLVAAPTYRDCKEGTRRLLQELSKLGYRVSAKKAQLCREEVTYLGYLLKGGKRWLTPARKATVMKIPTPTTPRQVREFLGKAGFCRLFIPGFASLAAPLYPLTRPKVPFTWTEAHQEAFGRIKEALLSAPALALPDLTKPFALYVDEKEGVARGVLTQTLGPWRRPVAYLSKKLDPVASGWPTCLKAIAAVALLLKDADKLTLGQNVLVIAPHNLESIVRQPPDRWMTNARMTHYQSLLLNERVSFAPPAILNPATLLPVESDDTPIHICSEILAEETGTRPDLRDQPLPGVPAWYTDGSSFIMDGRRQAGAAIVDNKRTVWASNLPEGTSAQKAELIALTQALRLAEGKSINIYTDSRYAFATAHVHGAIYKQRGWLTSAGKDIKNKEEILALLEAIHLPKRVAIIHCPGHQRGTDPVATGNRKADEAAKQAAQSTRILTETTKNAGKRTADGSEFEKRTADGSEFESPKKKAKVE

SEQ ID NO: 1776 - protein, 2210 aa, synthetic construct
MPAAKRVKLDGGDKKYSIGLDIGTNSVGWAVITDEYKVPSKKFKVLGNTDRHSIKKNLIGALLFDSGETAEATRLKRTARRRYTRRKNRICYLQEIFSNEMAKVDDSFFHRLEESFLVEEDKKHERHPIFGNIVDEVAYHEKYPTIYHLRKKLVDSTDKADLRLIYLALAHMIKFRGHFLIEGDLNPDNSDVDKLFIQLVQTYNQLFEENPINASGVDAKAILSARLSKSRRLENLIAQLPGEKKNGLFGNLIALSLGLTPNFKSNFDLAEDAKLQLSKDTYDDDLDNLLAQIGDQYADLFLAAKNLSDAILLSDILRVNTEITKAPLSASMIKRYDEHHQDLTLLKALVRQQLPEKYKEIFFDQSKNGYAGYIDGGASQEEFYKFIKPILEKMDGTEELLVKLNREDLLRKQRTFDNGSIPHQIHLGELHAILRRQEDFYPFLKDNREKIEKILTFRIPYYVGPLARGNSRFAWMTRKSEETITPWNFEEVVDKGASAQSFIERMTNFDKNLPNEKVLPKHSLLYEYFTVYNELTKVKYVTEGMRKPAFLSGEQKKAIVDLLFKTNRKVTVKQLKEDYFKKIECFDSVEISGVEDRFNASLGTYHDLLKIIKDKDFLDNEENEDILEDIVLTLTLFEDREMIEERLKTYAHLFDDKVMKQLKRRRYTGWGRLSRKLINGIRDKQSGKTILDFLKSDGFANRNFMQLIHDDSLTFKEDIQKAQVSGQGDSLHEHIANLAGSPAIKKGILQTVKVVDELVKVMGRHKPENIVIEMARENQTTQKGQKNSRERMKRIEEGIKELGSQILKEHPVENTQLQNEKLYLYYLQNGRDMYVDQELDINRLSDYDVDHIVPQSFLKDDSIDNKVLTRSDKARGKSDNVPSEEVVKKMKNYWRQLLNAKLITQRKFDNLTKAERGGLSELDKAGFIKRQLVETRQITKHVAQILDSRMNTKYDENDKLIREVKVITLKSKLVSDFRKDFQFYKVREINNYHHAHDAYLNAVVGTALIKKYPKLESEFVYGDYKVYDVRKMIAKSEQEIGKATAKYFFYSNIMNFFKTEITLANGEIRKRPLIETNGETGEIVWDKGRDFATVRKVLSMPQVNIVKKTEVQTGGFSKESILPKRNSDKLIARKKDWDPKKYGGFDSPTVAYSVLVVAKVEKGKSKKLKSVKELLGITIMERSSFEKNPIDFLEAKGYKEVKKDLIIKLPKYSLFELENGRKRMLASAGELQKGNELALPSKYVNFLYLASHYEKLKGSPEDNEQKQLFVEQHKHYLDEIIEQISEFSKRVILADANLDKVLSAYNKHRDKPIREQAENIIHLFTLTNLGAPAAFKYFDTTIDRKRYTSTKEVLDATLIHQSITGLYETRIDLSQLGGDGGGSSGGTLGDQGSRGSDPLPEPRVTLTVEGIPTEFLVNTGAEHSVLTKPMGKMGSKRTVVAGATGSKVYPWTTKRLLKIGQKQVTHSFLVIPECPAPLLGRDLLTKLKAQIQFSTEGPQVTWEDRPAMCLVLNLEEEYRLHEKPVPPSIDPSWLQLFPMVWAEKAGMGLANQVPPVVVELKSDASPVAVRQYPMSKEAREGIRPHIQRFLDLGILVPCQSPWNTPLLPVKKPGTNDYRPVQDLREVNKRVQDIHPTVPNPYNLLSSLPPSHTWYSVLDLKDAFFCLKLHPNSQPLFAFEWRDPEKGNTGQLTWTRLPQGFKNSPTLFNEALHRDLASFRALNPQVVMLQYVDDLLVAAPTYRDCKEGTRRLLQELSKLGYRVSAKKAQLCREEVTYLGYLLKGGKRWLTPARKATVMKIPTPTTPRQVREFLGKAGFCRLFIPGFASLAAPLYPLTRPKVPFTWTEAHQEAFGRIKEALLSAPALALPDLTKPFALYVDEKEGVARGVLTQTLGPWRRPVAYLSKKLDPVASGWPTCLKAIAAVALLLKDADKLTLGQNVLVIAPHNLESIVRQPPDRWMTNARMTHYQSLLLNERVSFAPPAILNPATLLPVESDDTPIHICSEILAEETGTRPDLRDQPLPGVPAWYTDGSSFIMDGRRQAGAAIVDNKRTVWASNLPEGTSAQKAELIALTQALRLAEGKSINIYTDSRYAFATAHVHGAIYKQRGWLTSAGKDIKNKEEILALLEAIHLPKRVAIIHCPGHQRGTDPVATGNRKADEAAKQAAQSTRILTETTKNAGKRTADGSEFEKRTADGSEFESPKKKAKVE

SEQ ID NO: 1777 - protein, 2222 aa, synthetic construct
MPAAKRVKLDGGDKKYSIGLDIGTNSVGWAVITDEYKVPSKKFKVLGNTDRHSIKKNLIGALLFDSGETAEATRLKRTARRRYTRRKNRICYLQEIFSNEMAKVDDSFFHRLEESFLVEEDKKHERHPIFGNIVDEVAYHEKYPTIYHLRKKLVDSTDKADLRLIYLALAHMIKFRGHFLIEGDLNPDNSDVDKLFIQLVQTYNQLFEENPINASGVDAKAILSARLSKSRRLENLIAQLPGEKKNGLFGNLIALSLGLTPNFKSNFDLAEDAKLQLSKDTYDDDLDNLLAQIGDQYADLFLAAKNLSDAILLSDILRVNTEITKAPLSASMIKRYDEHHQDLTLLKALVRQQLPEKYKEIFFDQSKNGYAGYIDGGASQEEFYKFIKPILEKMDGTEELLVKLNREDLLRKQRTFDNGSIPHQIHLGELHAILRRQEDFYPFLKDNREKIEKILTFRIPYYVGPLARGNSRFAWMTRKSEETITPWNFEEVVDKGASAQSFIERMTNFDKNLPNEKVLPKHSLLYEYFTVYNELTKVKYVTEGMRKPAFLSGEQKKAIVDLLFKTNRKVTVKQLKEDYFKKIECFDSVEISGVEDRFNASLGTYHDLLKIIKDKDFLDNEENEDILEDIVLTLTLFEDREMIEERLKTYAHLFDDKVMKQLKRRRYTGWGRLSRKLINGIRDKQSGKTILDFLKSDGFANRNFMQLIHDDSLTFKEDIQKAQVSGQGDSLHEHIANLAGSPAIKKGILQTVKVVDELVKVMGRHKPENIVIEMARENQTTQKGQKNSRERMKRIEEGIKELGSQILKEHPVENTQLQNEKLYLYYLQNGRDMYVDQELDINRLSDYDVDHIVPQSFLKDDSIDNKVLTRSDKARGKSDNVPSEEVVKKMKNYWRQLLNAKLITQRKFDNLTKAERGGLSELDKAGFIKRQLVETRQITKHVAQILDSRMNTKYDENDKLIREVKVITLKSKLVSDFRKDFQFYKVREINNYHHAHDAYLNAVVGTALIKKYPKLESEFVYGDYKVYDVRKMIAKSEQEIGKATAKYFFYSNIMNFFKTEITLANGEIRKRPLIETNGETGEIVWDKGRDFATVRKVLSMPQVNIVKKTEVQTGGFSKESILPKRNSDKLIARKKDWDPKKYGGFDSPTVAYSVLVVAKVEKGKSKKLKSVKELLGITIMERSSFEKNPIDFLEAKGYKEVKKDLIIKLPKYSLFELENGRKRMLASAGELQKGNELALPSKYVNFLYLASHYEKLKGSPEDNEQKQLFVEQHKHYLDEIIEQISEFSKRVILADANLDKVLSAYNKHRDKPIREQAENIIHLFTLTNLGAPAAFKYFDTTIDRKRYTSTKEVLDATLIHQSITGLYETRIDLSQLGGDGGGGGGSEAAAKGGGGSGGTLGDQGSRGSDPLPEPRVTLTVEGIPTEFLVNTGAEHSVLTKPMGKMGSKRTVVAGATGSKVYPWTTKRLLKIGQKQVTHSFLVIPECPAPLLGRDLLTKLKAQIQFSTEGPQVTWEDRPAMCLVLNLEEEYRLHEKPVPPSIDPSWLQLFPMVWAEKAGMGLANQVPPVVVELKSDASPVAVRQYPMSKEAREGIRPHIQRFLDLGILVPCQSPWNTPLLPVKKPGTNDYRPVQDLREVNKRVQDIHPTVPNPYNLLSSLPPSHTWYSVLDLKDAFFCLKLHPNSQPLFAFEWRDPEKGNTGQLTWTRLPQGFKNSPTLFNEALHRDLASFRALNPQVVMLQYVDDLLVAAPTYRDCKEGTRRLLQELSKLGYRVSAKKAQLCREEVTYLGYLLKGGKRWLTPARKATVMKIPTPTTPRQVREFLGKAGFCRLFIPGFASLAAPLYPLTRPKVPFTWTEAHQEAFGRIKEALLSAPALALPDLTKPFALYVDEKEGVARGVLTQTLGPWRRPVAYLSKKLDPVASGWPTCLKAIAAVALLLKDADKLTLGQNVLVIAPHNLESIVRQPPDRWMTNARMTHYQSLLLNERVSFAPPAILNPATLLPVESDDTPIHICSEILAEETGTRPDLRDQPLPGVPAWYTDGSSFIMDGRRQAGAAIVDNKRTVWASNLPEGTSAQKAELIALTQALRLAEGKSINIYTDSRYAFATAHVHGAIYKQRGWLTSAGKDIKNKEEILALLEAIHLPKRVAIIHCPGHQRGTDPVATGNRKADEAAKQAAQSTRILTETTKNAGKRTADGSEFEKRTADGSEFESPKKKAKVE

SEQ ID NO: 1778 - protein, 2237 aa, synthetic construct
MPAAKRVKLDGGDKKYSIGLDIGTNSVGWAVITDEYKVPSKKFKVLGNTDRHSIKKNLIGALLFDSGETAEATRLKRTARRRYTRRKNRICYLQEIFSNEMAKVDDSFFHRLEESFLVEEDKKHERHPIFGNIVDEVAYHEKYPTIYHLRKKLVDSTDKADLRLIYLALAHMIKFRGHFLIEGDLNPDNSDVDKLFIQLVQTYNQLFEENPINASGVDAKAILSARLSKSRRLENLIAQLPGEKKNGLFGNLIALSLGLTPNFKSNFDLAEDAKLQLSKDTYDDDLDNLLAQIGDQYADLFLAAKNLSDAILLSDILRVNTEITKAPLSASMIKRYDEHHQDLTLLKALVRQQLPEKYKEIFFDQSKNGYAGYIDGGASQEEFYKFIKPILEKMDGTEELLVKLNREDLLRKQRTFDNGSIPHQIHLGELHAILRRQEDFYPFLKDNREKIEKILTFRIPYYVGPLARGNSRFAWMTRKSEETITPWNFEEVVDKGASAQSFIERMTNFDKNLPNEKVLPKHSLLYEYFTVYNELTKVKYVTEGMRKPAFLSGEQKKAIVDLLFKTNRKVTVKQLKEDYFKKIECFDSVEISGVEDRFNASLGTYHDLLKIIKDKDFLDNEENEDILEDIVLTLTLFEDREMIEERLKTYAHLFDDKVMKQLKRRRYTGWGRLSRKLINGIRDKQSGKTILDFLKSDGFANRNFMQLIHDDSLTFKEDIQKAQVSGQGDSLHEHIANLAGSPAIKKGILQTVKVVDELVKVMGRHKPENIVIEMARENQTTQKGQKNSRERMKRIEEGIKELGSQILKEHPVENTQLQNEKLYLYYLQNGRDMYVDQELDINRLSDYDVDHIVPQSFLKDDSIDNKVLTRSDKARGKSDNVPSEEVVKKMKNYWRQLLNAKLITQRKFDNLTKAERGGLSELDKAGFIKRQLVETRQITKHVAQILDSRMNTKYDENDKLIREVKVITLKSKLVSDFRKDFQFYKVREINNYHHAHDAYLNAVVGTALIKKYPKLESEFVYGDYKVYDVRKMIAKSEQEIGKATAKYFFYSNIMNFFKTEITLANGEIRKRPLIETNGETGEIVWDKGRDFATVRKVLSMPQVNIVKKTEVQTGGFSKESILPKRNSDKLIARKKDWDPKKYGGFDSPTVAYSVLVVAKVEKGKSKKLKSVKELLGITIMERSSFEKNPIDFLEAKGYKEVKKDLIIKLPKYSLFELENGRKRMLASAGELQKGNELALPSKYVNFLYLASHYEKLKGSPEDNEQKQLFVEQHKHYLDEIIEQISEFSKRVILADANLDKVLSAYNKHRDKPIREQAENIIHLFTLTNLGAPAAFKYFDTTIDRKRYTSTKEVLDATLIHQSITGLYETRIDLSQLGGDGGEAAAKEAAAKEAAAKEAAAKEAAAKEAAAKGGTLGDQGSRGSDPLPEPRVTLTVEGIPTEFLVNTGAEHSVLTKPMGKMGSKRTVVAGATGSKVYPWTTKRLLKIGQKQVTHSFLVIPECPAPLLGRDLLTKLKAQIQFSTEGPQVTWEDRPAMCLVLNLEEEYRLHEKPVPPSIDPSWLQLFPMVWAEKAGMGLANQVPPVVVELKSDASPVAVRQYPMSKEAREGIRPHIQRFLDLGILVPCQSPWNTPLLPVKKPGTNDYRPVQDLREVNKRVQDIHPTVPNPYNLLSSLPPSHTWYSVLDLKDAFFCLKLHPNSQPLFAFEWRDPEKGNTGQLTWTRLPQGFKNSPTLFNEALHRDLASFRALNPQVVMLQYVDDLLVAAPTYRDCKEGTRRLLQELSKLGYRVSAKKAQLCREEVTYLGYLLKGGKRWLTPARKATVMKIPTPTTPRQVREFLGKAGFCRLFIPGFASLAAPLYPLTRPKVPFTWTEAHQEAFGRIKEALLSAPALALPDLTKPFALYVDEKEGVARGVLTQTLGPWRRPVAYLSKKLDPVASGWPTCLKAIAAVALLLKDADKLTLGQNVLVIAPHNLESIVRQPPDRWMTNARMTHYQSLLLNERVSFAPPAILNPATLLPVESDDTPIHICSEILAEETGTRPDLRDQPLPGVPAWYTDGSSFIMDGRRQAGAAIVDNKRTVWASNLPEGTSAQKAELIALTQALRLAEGKSINIYTDSRYAFATAHVHGAIYKQRGWLTSAGKDIKNKEEILALLEAIHLPKRVAIIHCPGHQRGTDPVATGNRKADEAAKQAAQSTRILTETTKNAGKRTADGSEFEKRTADGSEFESPKKKAKVE

SEQ ID NO: 1779 - protein, 2216 aa, synthetic construct
MPAAKRVKLDGGDKKYSIGLDIGTNSVGWAVITDEYKVPSKKFKVLGNTDRHSIKKNLIGALLFDSGETAEATRLKRTARRRYTRRKNRICYLQEIFSNEMAKVDDSFFHRLEESFLVEEDKKHERHPIFGNIVDEVAYHEKYPTIYHLRKKLVDSTDKADLRLIYLALAHMIKFRGHFLIEGDLNPDNSDVDKLFIQLVQTYNQLFEENPINASGVDAKAILSARLSKSRRLENLIAQLPGEKKNGLFGNLIALSLGLTPNFKSNFDLAEDAKLQLSKDTYDDDLDNLLAQIGDQYADLFLAAKNLSDAILLSDILRVNTEITKAPLSASMIKRYDEHHQDLTLLKALVRQQLPEKYKEIFFDQSKNGYAGYIDGGASQEEFYKFIKPILEKMDGTEELLVKLNREDLLRKQRTFDNGSIPHQIHLGELHAILRRQEDFYPFLKDNREKIEKILTFRIPYYVGPLARGNSRFAWMTRKSEETITPWNFEEVVDKGASAQSFIERMTNFDKNLPNEKVLPKHSLLYEYFTVYNELTKVKYVTEGMRKPAFLSGEQKKAIVDLLFKTNRKVTVKQLKEDYFKKIECFDSVEISGVEDRFNASLGTYHDLLKIIKDKDFLDNEENEDILEDIVLTLTLFEDREMIEERLKTYAHLFDDKVMKQLKRRRYTGWGRLSRKLINGIRDKQSGKTILDFLKSDGFANRNFMQLIHDDSLTFKEDIQKAQVSGQGDSLHEHIANLAGSPAIKKGILQTVKVVDELVKVMGRHKPENIVIEMARENQTTQKGQKNSRERMKRIEEGIKELGSQILKEHPVENTQLQNEKLYLYYLQNGRDMYVDQELDINRLSDYDVDHIVPQSFLKDDSIDNKVLTRSDKARGKSDNVPSEEVVKKMKNYWRQLLNAKLITQRKFDNLTKAERGGLSELDKAGFIKRQLVETRQITKHVAQILDSRMNTKYDENDKLIREVKVITLKSKLVSDFRKDFQFYKVREINNYHHAHDAYLNAVVGTALIKKYPKLESEFVYGDYKVYDVRKMIAKSEQEIGKATAKYFFYSNIMNFFKTEITLANGEIRKRPLIETNGETGEIVWDKGRDFATVRKVLSMPQVNIVKKTEVQTGGFSKESILPKRNSDKLIARKKDWDPKKYGGFDSPTVAYSVLVVAKVEKGKSKKLKSVKELLGITIMERSSFEKNPIDFLEAKGYKEVKKDLIIKLPKYSLFELENGRKRMLASAGELQKGNELALPSKYVNFLYLASHYEKLKGSPEDNEQKQLFVEQHKHYLDEIIEQISEFSKRVILADANLDKVLSAYNKHRDKPIREQAENIIHLFTLTNLGAPAAFKYFDTTIDRKRYTSTKEVLDATLIHQSITGLYETRIDLSQLGGDGGGGSPAPGGGGGTLGDQGSRGSDPLPEPRVTLTVEGIPTEFLVNTGAEHSVLTKPMGKMGSKRTVVAGATGSKVYPWTTKRLLKIGQKQVTHSFLVIPECPAPLLGRDLLTKLKAQIQFSTEGPQVTWEDRPAMCLVLNLEEEYRLHEKPVPPSIDPSWLQLFPMVWAEKAGMGLANQVPPVVVELKSDASPVAVRQYPMSKEAREGIRPHIQRFLDLGILVPCQSPWNTPLLPVKKPGTNDYRPVQDLREVNKRVQDIHPTVPNPYNLLSSLPPSHTWYSVLDLKDAFFCLKLHPNSQPLFAFEWRDPEKGNTGQLTWTRLPQGFKNSPTLFNEALHRDLASFRALNPQVVMLQYVDDLLVAAPTYRDCKEGTRRLLQELSKLGYRVSAKKAQLCREEVTYLGYLLKGGKRWLTPARKATVMKIPTPTTPRQVREFLGKAGFCRLFIPGFASLAAPLYPLTRPKVPFTWTEAHQEAFGRIKEALLSAPALALPDLTKPFALYVDEKEGVARGVLTQTLGPWRRPVAYLSKKLDPVASGWPTCLKAIAAVALLLKDADKLTLGQNVLVIAPHNLESIVRQPPDRWMTNARMTHYQSLLLNERVSFAPPAILNPATLLPVESDDTPIHICSEILAEETGTRPDLRDQPLPGVPAWYTDGSSFIMDGRRQAGAAIVDNKRTVWASNLPEGTSAQKAELIALTQALRLAEGKSINIYTDSRYAFATAHVHGAIYKQRGWLTSAGKDIKNKEEILALLEAIHLPKRVAIIHCPGHQRGTDPVATGNRKADEAAKQAAQSTRILTETTKNAGKRTADGSEFEKRTADGSEFESPKKKAKVE

SEQ ID NO: 1780 - protein, 2213 aa, synthetic construct
MPAAKRVKLDGGDKKYSIGLDIGTNSVGWAVITDEYKVPSKKFKVLGNTDRHSIKKNLIGALLFDSGETAEATRLKRTARRRYTRRKNRICYLQEIFSNEMAKVDDSFFHRLEESFLVEEDKKHERHPIFGNIVDEVAYHEKYPTIYHLRKKLVDSTDKADLRLIYLALAHMIKFRGHFLIEGDLNPDNSDVDKLFIQLVQTYNQLFEENPINASGVDAKAILSARLSKSRRLENLIAQLPGEKKNGLFGNLIALSLGLTPNFKSNFDLAEDAKLQLSKDTYDDDLDNLLAQIGDQYADLFLAAKNLSDAILLSDILRVNTEITKAPLSASMIKRYDEHHQDLTLLKALVRQQLPEKYKEIFFDQSKNGYAGYIDGGASQEEFYKFIKPILEKMDGTEELLVKLNREDLLRKQRTFDNGSIPHQIHLGELHAILRRQEDFYPFLKDNREKIEKILTFRIPYYVGPLARGNSRFAWMTRKSEETITPWNFEEVVDKGASAQSFIERMTNFDKNLPNEKVLPKHSLLYEYFTVYNELTKVKYVTEGMRKPAFLSGEQKKAIVDLLFKTNRKVTVKQLKEDYFKKIECFDSVEISGVEDRFNASLGTYHDLLKIIKDKDFLDNEENEDILEDIVLTLTLFEDREMIEERLKTYAHLFDDKVMKQLKRRRYTGWGRLSRKLINGIRDKQSGKTILDFLKSDGFANRNFMQLIHDDSLTFKEDIQKAQVSGQGDSLHEHIANLAGSPAIKKGILQTVKVVDELVKVMGRHKPENIVIEMARENQTTQKGQKNSRERMKRIEEGIKELGSQILKEHPVENTQLQNEKLYLYYLQNGRDMYVDQELDINRLSDYDVDHIVPQSFLKDDSIDNKVLTRSDKARGKSDNVPSEEVVKKMKNYWRQLLNAKLITQRKFDNLTKAERGGLSELDKAGFIKRQLVETRQITKHVAQILDSRMNTKYDENDKLIREVKVITLKSKLVSDFRKDFQFYKVREINNYHHAHDAYLNAVVGTALIKKYPKLESEFVYGDYKVYDVRKMIAKSEQEIGKATAKYFFYSNIMNFFKTEITLANGEIRKRPLIETNGETGEIVWDKGRDFATVRKVLSMPQVNIVKKTEVQTGGFSKESILPKRNSDKLIARKKDWDPKKYGGFDSPTVAYSVLVVAKVEKGKSKKLKSVKELLGITIMERSSFEKNPIDFLEAKGYKEVKKDLIIKLPKYSLFELENGRKRMLASAGELQKGNELALPSKYVNFLYLASHYEKLKGSPEDNEQKQLFVEQHKHYLDEIIEQISEFSKRVILADANLDKVLSAYNKHRDKPIREQAENIIHLFTLTNLGAPAAFKYFDTTIDRKRYTSTKEVLDATLIHQSITGLYETRIDLSQLGGDGGPAPGSSGGTLGDQGSRGSDPLPEPRVTLTVEGIPTEFLVNTGAEHSVLTKPMGKMGSKRTVVAGATGSKVYPWTTKRLLKIGQKQVTHSFLVIPECPAPLLGRDLLTKLKAQIQFSTEGPQVTWEDRPAMCLVLNLEEEYRLHEKPVPPSIDPSWLQLFPMVWAEKAGMGLANQVPPVVVELKSDASPVAVRQYPMSKEAREGIRPHIQRFLDLGILVPCQSPWNTPLLPVKKPGTNDYRPVQDLREVNKRVQDIHPTVPNPYNLLSSLPPSHTWYSVLDLKDAFFCLKLHPNSQPLFAFEWRDPEKGNTGQLTWTRLPQGFKNSPTLFNEALHRDLASFRALNPQVVMLQYVDDLLVAAPTYRDCKEGTRRLLQELSKLGYRVSAKKAQLCREEVTYLGYLLKGGKRWLTPARKATVMKIPTPTTPRQVREFLGKAGFCRLFIPGFASLAAPLYPLTRPKVPFTWTEAHQEAFGRIKEALLSAPALALPDLTKPFALYVDEKEGVARGVLTQTLGPWRRPVAYLSKKLDPVASGWPTCLKAIAAVALLLKDADKLTLGQNVLVIAPHNLESIVRQPPDRWMTNARMTHYQSLLLNERVSFAPPAILNPATLLPVESDDTPIHICSEILAEETGTRPDLRDQPLPGVPAWYTDGSSFIMDGRRQAGAAIVDNKRTVWASNLPEGTSAQKAELIALTQALRLAEGKSINIYTDSRYAFATAHVHGAIYKQRGWLTSAGKDIKNKEEILALLEAIHLPKRVAIIHCPGHQRGTDPVATGNRKADEAAKQAAQSTRILTETTKNAGKRTADGSEFEKRTADGSEFESPKKKAKVE

SEQ ID NO: 1781 - protein, 2222 aa, synthetic construct
MPAAKRVKLDGGDKKYSIGLDIGTNSVGWAVITDEYKVPSKKFKVLGNTDRHSIKKNLIGALLFDSGETAEATRLKRTARRRYTRRKNRICYLQEIFSNEMAKVDDSFFHRLEESFLVEEDKKHERHPIFGNIVDEVAYHEKYPTIYHLRKKLVDSTDKADLRLIYLALAHMIKFRGHFLIEGDLNPDNSDVDKLFIQLVQTYNQLFEENPINASGVDAKAILSARLSKSRRLENLIAQLPGEKKNGLFGNLIALSLGLTPNFKSNFDLAEDAKLQLSKDTYDDDLDNLLAQIGDQYADLFLAAKNLSDAILLSDILRVNTEITKAPLSASMIKRYDEHHQDLTLLKALVRQQLPEKYKEIFFDQSKNGYAGYIDGGASQEEFYKFIKPILEKMDGTEELLVKLNREDLLRKQRTFDNGSIPHQIHLGELHAILRRQEDFYPFLKDNREKIEKILTFRIPYYVGPLARGNSRFAWMTRKSEETITPWNFEEVVDKGASAQSFIERMTNFDKNLPNEKVLPKHSLLYEYFTVYNELTKVKYVTEGMRKPAFLSGEQKKAIVDLLFKTNRKVTVKQLKEDYFKKIECFDSVEISGVEDRFNASLGTYHDLLKIIKDKDFLDNEENEDILEDIVLTLTLFEDREMIEERLKTYAHLFDDKVMKQLKRRRYTGWGRLSRKLINGIRDKQSGKTILDFLKSDGFANRNFMQLIHDDSLTFKEDIQKAQVSGQGDSLHEHIANLAGSPAIKKGILQTVKVVDELVKVMGRHKPENIVIEMARENQTTQKGQKNSRERMKRIEEGIKELGSQILKEHPVENTQLQNEKLYLYYLQNGRDMYVDQELDINRLSDYDVDHIVPQSFLKDDSIDNKVLTRSDKARGKSDNVPSEEVVKKMKNYWRQLLNAKLITQRKFDNLTKAERGGLSELDKAGFIKRQLVETRQITKHVAQILDSRMNTKYDENDKLIREVKVITLKSKLVSDFRKDFQFYKVREINNYHHAHDAYLNAVVGTALIKKYPKLESEFVYGDYKVYDVRKMIAKSEQEIGKATAKYFFYSNIMNFFKTEITLANGEIRKRPLIETNGETGEIVWDKGRDFATVRKVLSMPQVNIVKKTEVQTGGFSKESILPKRNSDKLIARKKDWDPKKYGGFDSPTVAYSVLVVAKVEKGKSKKLKSVKELLGITIMERSSFEKNPIDFLEAKGYKEVKKDLIIKLPKYSLFELENGRKRMLASAGELQKGNELALPSKYVNFLYLASHYEKLKGSPEDNEQKQLFVEQHKHYLDEIIEQISEFSKRVILADANLDKVLSAYNKHRDKPIREQAENIIHLFTLTNLGAPAAFKYFDTTIDRKRYTSTKEVLDATLIHQSITGLYETRIDLSQLGGDGGEAAAKGGGGSEAAAKGGTLGDQGSRGSDPLPEPRVTLTVEGIPTEFLVNTGAEHSVLTKPMGKMGSKRTVVAGATGSKVYPWTTKRLLKIGQKQVTHSFLVIPECPAPLLGRDLLTKLKAQIQFSTEGPQVTWEDRPAMCLVLNLEEEYRLHEKPVPPSIDPSWLQLFPMVWAEKAGMGLANQVPPVVVELKSDASPVAVRQYPMSKEAREGIRPHIQRFLDLGILVPCQSPWNTPLLPVKKPGTNDYRPVQDLREVNKRVQDIHPTVPNPYNLLSSLPPSHTWYSVLDLKDAFFCLKLHPNSQPLFAFEWRDPEKGNTGQLTWTRLPQGFKNSPTLFNEALHRDLASFRALNPQVVMLQYVDDLLVAAPTYRDCKEGTRRLLQELSKLGYRVSAKKAQLCREEVTYLGYLLKGGKRWLTPARKATVMKIPTPTTPRQVREFLGKAGFCRLFIPGFASLAAPLYPLTRPKVPFTWTEAHQEAFGRIKEALLSAPALALPDLTKPFALYVDEKEGVARGVLTQTLGPWRRPVAYLSKKLDPVASGWPTCLKAIAAVALLLKDADKLTLGQNVLVIAPHNLESIVRQPPDRWMTNARMTHYQSLLLNERVSFAPPAILNPATLLPVESDDTPIHICSEILAEETGTRPDLRDQPLPGVPAWYTDGSSFIMDGRRQAGAAIVDNKRTVWASNLPEGTSAQKAELIALTQALRLAEGKSINIYTDSRYAFATAHVHGAIYKQRGWLTSAGKDIKNKEEILALLEAIHLPKRVAIIHCPGHQRGTDPVATGNRKADEAAKQAAQSTRILTETTKNAGKRTADGSEFEKRTADGSEFESPKKKAKVE

SEQ ID NO: 1782 - protein, 2219 aa, synthetic construct
MPAAKRVKLDGGDKKYSIGLDIGTNSVGWAVITDEYKVPSKKFKVLGNTDRHSIKKNLIGALLFDSGETAEATRLKRTARRRYTRRKNRICYLQEIFSNEMAKVDDSFFHRLEESFLVEEDKKHERHPIFGNIVDEVAYHEKYPTIYHLRKKLVDSTDKADLRLIYLALAHMIKFRGHFLIEGDLNPDNSDVDKLFIQLVQTYNQLFEENPINASGVDAKAILSARLSKSRRLENLIAQLPGEKKNGLFGNLIALSLGLTPNFKSNFDLAEDAKLQLSKDTYDDDLDNLLAQIGDQYADLFLAAKNLSDAILLSDILRVNTEITKAPLSASMIKRYDEHHQDLTLLKALVRQQLPEKYKEIFFDQSKNGYAGYIDGGASQEEFYKFIKPILEKMDGTEELLVKLNREDLLRKQRTFDNGSIPHQIHLGELHAILRRQEDFYPFLKDNREKIEKILTFRIPYYVGPLARGNSRFAWMTRKSEETITPWNFEEVVDKGASAQSFIERMTNFDKNLPNEKVLPKHSLLYEYFTVYNELTKVKYVTEGMRKPAFLSGEQKKAIVDLLFKTNRKVTVKQLKEDYFKKIECFDSVEISGVEDRFNASLGTYHDLLKIIKDKDFLDNEENEDILEDIVLTLTLFEDREMIEERLKTYAHLFDDKVMKQLKRRRYTGWGRLSRKLINGIRDKQSGKTILDFLKSDGFANRNFMQLIHDDSLTFKEDIQKAQVSGQGDSLHEHIANLAGSPAIKKGILQTVKVVDELVKVMGRHKPENIVIEMARENQTTQKGQKNSRERMKRIEEGIKELGSQILKEHPVENTQLQNEKLYLYYLQNGRDMYVDQELDINRLSDYDVDHIVPQSFLKDDSIDNKVLTRSDKARGKSDNVPSEEVVKKMKNYWRQLLNAKLITQRKFDNLTKAERGGLSELDKAGFIKRQLVETRQITKHVAQILDSRMNTKYDENDKLIREVKVITLKSKLVSDFRKDFQFYKVREINNYHHAHDAYLNAVVGTALIKKYPKLESEFVYGDYKVYDVRKMIAKSEQEIGKATAKYFFYSNIMNFFKTEITLANGEIRKRPLIETNGETGEIVWDKGRDFATVRKVLSMPQVNIVKKTEVQTGGFSKESILPKRNSDKLIARKKDWDPKKYGGFDSPTVAYSVLVVAKVEKGKSKKLKSVKELLGITIMERSSFEKNPIDFLEAKGYKEVKKDLIIKLPKYSLFELENGRKRMLASAGELQKGNELALPSKYVNFLYLASHYEKLKGSPEDNEQKQLFVEQHKHYLDEIIEQISEFSKRVILADANLDKVLSAYNKHRDKPIREQAENIIHLFTLTNLGAPAAFKYFDTTIDRKRYTSTKEVLDATLIHQSITGLYETRIDLSQLGGDGGGSAGSAAGSGEFGGTLGDQGSRGSDPLPEPRVTLTVEGIPTEFLVNTGAEHSVLTKPMGKMGSKRTVVAGATGSKVYPWTTKRLLKIGQKQVTHSFLVIPECPAPLLGRDLLTKLKAQIQFSTEGPQVTWEDRPAMCLVLNLEEEYRLHEKPVPPSIDPSWLQLFPMVWAEKAGMGLANQVPPVVVELKSDASPVAVRQYPMSKEAREGIRPHIQRFLDLGILVPCQSPWNTPLLPVKKPGTNDYRPVQDLREVNKRVQDIHPTVPNPYNLLSSLPPSHTWYSVLDLKDAFFCLKLHPNSQPLFAFEWRDPEKGNTGQLTWTRLPQGFKNSPTLFNEALHRDLASFRALNPQVVMLQYVDDLLVAAPTYRDCKEGTRRLLQELSKLGYRVSAKKAQLCREEVTYLGYLLKGGKRWLTPARKATVMKIPTPTTPRQVREFLGKAGFCRLFIPGFASLAAPLYPLTRPKVPFTWTEAHQEAFGRIKEALLSAPALALPDLTKPFALYVDEKEGVARGVLTQTLGPWRRPVAYLSKKLDPVASGWPTCLKAIAAVALLLKDADKLTLGQNVLVIAPHNLESIVRQPPDRWMTNARMTHYQSLLLNERVSFAPPAILNPATLLPVESDDTPIHICSEILAEETGTRPDLRDQPLPGVPAWYTDGSSFIMDGRRQAGAAIVDNKRTVWASNLPEGTSAQKAELIALTQALRLAEGKSINIYTDSRYAFATAHVHGAIYKQRGWLTSAGKDIKNKEEILALLEAIHLPKRVAIIHCPGHQRGTDPVATGNRKADEAAKQAAQSTRILTETTKNAGKRTADGSEFEKRTADGSEFESPKKKAKVE

SEQ ID NO: 1783 - protein, 2218 aa, synthetic construct
MPAAKRVKLDGGDKKYSIGLDIGTNSVGWAVITDEYKVPSKKFKVLGNTDRHSIKKNLIGALLFDSGETAEATRLKRTARRRYTRRKNRICYLQEIFSNEMAKVDDSFFHRLEESFLVEEDKKHERHPIFGNIVDEVAYHEKYPTIYHLRKKLVDSTDKADLRLIYLALAHMIKFRGHFLIEGDLNPDNSDVDKLFIQLVQTYNQLFEENPINASGVDAKAILSARLSKSRRLENLIAQLPGEKKNGLFGNLIALSLGLTPNFKSNFDLAEDAKLQLSKDTYDDDLDNLLAQIGDQYADLFLAAKNLSDAILLSDILRVNTEITKAPLSASMIKRYDEHHQDLTLLKALVRQQLPEKYKEIFFDQSKNGYAGYIDGGASQEEFYKFIKPILEKMDGTEELLVKLNREDLLRKQRTFDNGSIPHQIHLGELHAILRRQEDFYPFLKDNREKIEKILTFRIPYYVGPLARGNSRFAWMTRKSEETITPWNFEEVVDKGASAQSFIERMTNFDKNLPNEKVLPKHSLLYEYFTVYNELTKVKYVTEGMRKPAFLSGEQKKAIVDLLFKTNRKVTVKQLKEDYFKKIECFDSVEISGVEDRFNASLGTYHDLLKIIKDKDFLDNEENEDILEDIVLTLTLFEDREMIEERLKTYAHLFDDKVMKQLKRRRYTGWGRLSRKLINGIRDKQSGKTILDFLKSDGFANRNFMQLIHDDSLTFKEDIQKAQVSGQGDSLHEHIANLAGSPAIKKGILQTVKVVDELVKVMGRHKPENIVIEMARENQTTQKGQKNSRERMKRIEEGIKELGSQILKEHPVENTQLQNEKLYLYYLQNGRDMYVDQELDINRLSDYDVDHIVPQSFLKDDSIDNKVLTRSDKARGKSDNVPSEEVVKKMKNYWRQLLNAKLITQRKFDNLTKAERGGLSELDKAGFIKRQLVETRQITKHVAQILDSRMNTKYDENDKLIREVKVITLKSKLVSDFRKDFQFYKVREINNYHHAHDAYLNAVVGTALIKKYPKLESEFVYGDYKVYDVRKMIAKSEQEIGKATAKYFFYSNIMNFFKTEITLANGEIRKRPLIETNGETGEIVWDKGRDFATVRKVLSMPQVNIVKKTEVQTGGFSKESILPKRNSDKLIARKKDWDPKKYGGFDSPTVAYSVLVVAKVEKGKSKKLKSVKELLGITIMERSSFEKNPIDFLEAKGYKEVKKDLIIKLPKYSLFELENGRKRMLASAGELQKGNELALPSKYVNFLYLASHYEKLKGSPEDNEQKQLFVEQHKHYLDEIIEQISEFSKRVILADANLDKVLSAYNKHRDKPIREQAENIIHLFTLTNLGAPAAFKYFDTTIDRKRYTSTKEVLDATLIHQSITGLYETRIDLSQLGGDGGPAPAPAPAPAPGGTLGDQGSRGSDPLPEPRVTLTVEGIPTEFLVNTGAEHSVLTKPMGKMGSKRTVVAGATGSKVYPWTTKRLLKIGQKQVTHSFLVIPECPAPLLGRDLLTKLKAQIQFSTEGPQVTWEDRPAMCLVLNLEEEYRLHEKPVPPSIDPSWLQLFPMVWAEKAGMGLANQVPPVVVELKSDASPVAVRQYPMSKEAREGIRPHIQRFLDLGILVPCQSPWNTPLLPVKKPGTNDYRPVQDLREVNKRVQDIHPTVPNPYNLLSSLPPSHTWYSVLDLKDAFFCLKLHPNSQPLFAFEWRDPEKGNTGQLTWTRLPQGFKNSPTLFNEALHRDLASFRALNPQVVMLQYVDDLLVAAPTYRDCKEGTRRLLQELSKLGYRVSAKKAQLCREEVTYLGYLLKGGKRWLTPARKATVMKIPTPTTPRQVREFLGKAGFCRLFIPGFASLAAPLYPLTRPKVPFTWTEAHQEAFGRIKEALLSAPALALPDLTKPFALYVDEKEGVARGVLTQTLGPWRRPVAYLSKKLDPVASGWPTCLKAIAAVALLLKDADKLTLGQNVLVIAPHNLESIVRQPPDRWMTNARMTHYQSLLLNERVSFAPPAILNPATLLPVESDDTPIHICSEILAEETGTRPDLRDQPLPGVPAWYTDGSSFIMDGRRQAGAAIVDNKRTVWASNLPEGTSAQKAELIALTQALRLAEGKSINIYTDSRYAFATAHVHGAIYKQRGWLTSAGKDIKNKEEILALLEAIHLPKRVAIIHCPGHQRGTDPVATGNRKADEAAKQAAQSTRILTETTKNAGKRTADGSEFEKRTADGSEFESPKKKAKVE

SEQ ID NO: 1784 - protein, 2253 aa, synthetic construct
MPAAKRVKLDGGDKKYSIGLDIGTNSVGWAVITDEYKVPSKKFKVLGNTDRHSIKKNLIGALLFDSGETAEATRLKRTARRRYTRRKNRICYLQEIFSNEMAKVDDSFFHRLEESFLVEEDKKHERHPIFGNIVDEVAYHEKYPTIYHLRKKLVDSTDKADLRLIYLALAHMIKFRGHFLIEGDLNPDNSDVDKLFIQLVQTYNQLFEENPINASGVDAKAILSARLSKSRRLENLIAQLPGEKKNGLFGNLIALSLGLTPNFKSNFDLAEDAKLQLSKDTYDDDLDNLLAQIGDQYADLFLAAKNLSDAILLSDILRVNTEITKAPLSASMIKRYDEHHQDLTLLKALVRQQLPEKYKEIFFDQSKNGYAGYIDGGASQEEFYKFIKPILEKMDGTEELLVKLNREDLLRKQRTFDNGSIPHQIHLGELHAILRRQEDFYPFLKDNREKIEKILTFRIPYYVGPLARGNSRFAWMTRKSEETITPWNFEEVVDKGASAQSFIERMTNFDKNLPNEKVLPKHSLLYEYFTVYNELTKVKYVTEGMRKPAFLSGEQKKAIVDLLFKTNRKVTVKQLKEDYFKKIECFDSVEISGVEDRFNASLGTYHDLLKIIKDKDFLDNEENEDILEDIVLTLTLFEDREMIEERLKTYAHLFDDKVMKQLKRRRYTGWGRLSRKLINGIRDKQSGKTILDFLKSDGFANRNFMQLIHDDSLTFKEDIQKAQVSGQGDSLHEHIANLAGSPAIKKGILQTVKVVDELVKVMGRHKPENIVIEMARENQTTQKGQKNSRERMKRIEEGIKELGSQILKEHPVENTQLQNEKLYLYYLQNGRDMYVDQELDINRLSDYDVDHIVPQSFLKDDSIDNKVLTRSDKARGKSDNVPSEEVVKKMKNYWRQLLNAKLITQRKFDNLTKAERGGLSELDKAGFIKRQLVETRQITKHVAQILDSRMNTKYDENDKLIREVKVITLKSKLVSDFRKDFQFYKVREINNYHHAHDAYLNAVVGTALIKKYPKLESEFVYGDYKVYDVRKMIAKSEQEIGKATAKYFFYSNIMNFFKTEITLANGEIRKRPLIETNGETGEIVWDKGRDFATVRKVLSMPQVNIVKKTEVQTGGFSKESILPKRNSDKLIARKKDWDPKKYGGFDSPTVAYSVLVVAKVEKGKSKKLKSVKELLGITIMERSSFEKNPIDFLEAKGYKEVKKDLIIKLPKYSLFELENGRKRMLASAGELQKGNELALPSKYVNFLYLASHYEKLKGSPEDNEQKQLFVEQHKHYLDEIIEQISEFSKRVILADANLDKVLSAYNKHRDKPIREQAENIIHLFTLTNLGAPAAFKYFDTTIDRKRYTSTKEVLDATLIHQSITGLYETRIDLSQLGGDGGAEAAAKEAAAKEAAAKEAAAKALEAEAAAKEAAAKEAAAKEAAAKAGGTLGDQGSRGSDPLPEPRVTLTVEGIPTEFLVNTGAEHSVLTKPMGKMGSKRTVVAGATGSKVYPWTTKRLLKIGQKQVTHSFLVIPECPAPLLGRDLLTKLKAQIQFSTEGPQVTWEDRPAMCLVLNLEEEYRLHEKPVPPSIDPSWLQLFPMVWAEKAGMGLANQVPPVVVELKSDASPVAVRQYPMSKEAREGIRPHIQRFLDLGILVPCQSPWNTPLLPVKKPGTNDYRPVQDLREVNKRVQDIHPTVPNPYNLLSSLPPSHTWYSVLDLKDAFFCLKLHPNSQPLFAFEWRDPEKGNTGQLTWTRLPQGFKNSPTLFNEALHRDLASFRALNPQVVMLQYVDDLLVAAPTYRDCKEGTRRLLQELSKLGYRVSAKKAQLCREEVTYLGYLLKGGKRWLTPARKATVMKIPTPTTPRQVREFLGKAGFCRLFIPGFASLAAPLYPLTRPKVPFTWTEAHQEAFGRIKEALLSAPALALPDLTKPFALYVDEKEGVARGVLTQTLGPWRRPVAYLSKKLDPVASGWPTCLKAIAAVALLLKDADKLTLGQNVLVIAPHNLESIVRQPPDRWMTNARMTHYQSLLLNERVSFAPPAILNPATLLPVESDDTPIHICSEILAEETGTRPDLRDQPLPGVPAWYTDGSSFIMDGRRQAGAAIVDNKRTVWASNLPEGTSAQKAELIALTQALRLAEGKSINIYTDSRYAFATAHVHGAIYKQRGWLTSAGKDIKNKEEILALLEAIHLPKRVAIIHCPGHQRGTDPVATGNRKADEAAKQAAQSTRILTETTKNAGKRTADGSEFEKRTADGSEFESPKKKAKVE

SEQ ID NO: 1785 - protein, 2216 aa, synthetic construct
MPAAKRVKLDGGDKKYSIGLDIGTNSVGWAVITDEYKVPSKKFKVLGNTDRHSIKKNLIGALLFDSGETAEATRLKRTARRRYTRRKNRICYLQEIFSNEMAKVDDSFFHRLEESFLVEEDKKHERHPIFGNIVDEVAYHEKYPTIYHLRKKLVDSTDKADLRLIYLALAHMIKFRGHFLIEGDLNPDNSDVDKLFIQLVQTYNQLFEENPINASGVDAKAILSARLSKSRRLENLIAQLPGEKKNGLFGNLIALSLGLTPNFKSNFDLAEDAKLQLSKDTYDDDLDNLLAQIGDQYADLFLAAKNLSDAILLSDILRVNTEITKAPLSASMIKRYDEHHQDLTLLKALVRQQLPEKYKEIFFDQSKNGYAGYIDGGASQEEFYKFIKPILEKMDGTEELLVKLNREDLLRKQRTFDNGSIPHQIHLGELHAILRRQEDFYPFLKDNREKIEKILTFRIPYYVGPLARGNSRFAWMTRKSEETITPWNFEEVVDKGASAQSFIERMTNFDKNLPNEKVLPKHSLLYEYFTVYNELTKVKYVTEGMRKPAFLSGEQKKAIVDLLFKTNRKVTVKQLKEDYFKKIECFDSVEISGVEDRFNASLGTYHDLLKIIKDKDFLDNEENEDILEDIVLTLTLFEDREMIEERLKTYAHLFDDKVMKQLKRRRYTGWGRLSRKLINGIRDKQSGKTILDFLKSDGFANRNFMQLIHDDSLTFKEDIQKAQVSGQGDSLHEHIANLAGSPAIKKGILQTVKVVDELVKVMGRHKPENIVIEMARENQTTQKGQKNSRERMKRIEEGIKELGSQILKEHPVENTQLQNEKLYLYYLQNGRDMYVDQELDINRLSDYDVDHIVPQSFLKDDSIDNKVLTRSDKARGKSDNVPSEEVVKKMKNYWRQLLNAKLITQRKFDNLTKAERGGLSELDKAGFIKRQLVETRQITKHVAQILDSRMNTKYDENDKLIREVKVITLKSKLVSDFRKDFQFYKVREINNYHHAHDAYLNAVVGTALIKKYPKLESEFVYGDYKVYDVRKMIAKSEQEIGKATAKYFFYSNIMNFFKTEITLANGEIRKRPLIETNGETGEIVWDKGRDFATVRKVLSMPQVNIVKKTEVQTGGFSKESILPKRNSDKLIARKKDWDPKKYGGFDSPTVAYSVLVVAKVEKGKSKKLKSVKELLGITIMERSSFEKNPIDFLEAKGYKEVKKDLIIKLPKYSLFELENGRKRMLASAGELQKGNELALPSKYVNFLYLASHYEKLKGSPEDNEQKQLFVEQHKHYLDEIIEQISEFSKRVILADANLDKVLSAYNKHRDKPIREQAENIIHLFTLTNLGAPAAFKYFDTTIDRKRYTSTKEVLDATLIHQSITGLYETRIDLSQLGGDGGGGSGSSGGGGGTLGDQGSRGSDPLPEPRVTLTVEGIPTEFLVNTGAEHSVLTKPMGKMGSKRTVVAGATGSKVYPWTTKRLLKIGQKQVTHSFLVIPECPAPLLGRDLLTKLKAQIQFSTEGPQVTWEDRPAMCLVLNLEEEYRLHEKPVPPSIDPSWLQLFPMVWAEKAGMGLANQVPPVVVELKSDASPVAVRQYPMSKEAREGIRPHIQRFLDLGILVPCQSPWNTPLLPVKKPGTNDYRPVQDLREVNKRVQDIHPTVPNPYNLLSSLPPSHTWYSVLDLKDAFFCLKLHPNSQPLFAFEWRDPEKGNTGQLTWTRLPQGFKNSPTLFNEALHRDLASFRALNPQVVMLQYVDDLLVAAPTYRDCKEGTRRLLQELSKLGYRVSAKKAQLCREEVTYLGYLLKGGKRWLTPARKATVMKIPTPTTPRQVREFLGKAGFCRLFIPGFASLAAPLYPLTRPKVPFTWTEAHQEAFGRIKEALLSAPALALPDLTKPFALYVDEKEGVARGVLTQTLGPWRRPVAYLSKKLDPVASGWPTCLKAIAAVALLLKDADKLTLGQNVLVIAPHNLESIVRQPPDRWMTNARMTHYQSLLLNERVSFAPPAILNPATLLPVESDDTPIHICSEILAEETGTRPDLRDQPLPGVPAWYTDGSSFIMDGRRQAGAAIVDNKRTVWASNLPEGTSAQKAELIALTQALRLAEGKSINIYTDSRYAFATAHVHGAIYKQRGWLTSAGKDIKNKEEILALLEAIHLPKRVAIIHCPGHQRGTDPVATGNRKADEAAKQAAQSTRILTETTKNAGKRTADGSEFEKRTADGSEFESPKKKAKVE

SEQ ID NO: 1786 - protein, 2218 aa, synthetic construct
MPAAKRVKLDGGDKKYSIGLDIGTNSVGWAVITDEYKVPSKKFKVLGNTDRHSIKKNLIGALLFDSGETAEATRLKRTARRRYTRRKNRICYLQEIFSNEMAKVDDSFFHRLEESFLVEEDKKHERHPIFGNIVDEVAYHEKYPTIYHLRKKLVDSTDKADLRLIYLALAHMIKFRGHFLIEGDLNPDNSDVDKLFIQLVQTYNQLFEENPINASGVDAKAILSARLSKSRRLENLIAQLPGEKKNGLFGNLIALSLGLTPNFKSNFDLAEDAKLQLSKDTYDDDLDNLLAQIGDQYADLFLAAKNLSDAILLSDILRVNTEITKAPLSASMIKRYDEHHQDLTLLKALVRQQLPEKYKEIFFDQSKNGYAGYIDGGASQEEFYKFIKPILEKMDGTEELLVKLNREDLLRKQRTFDNGSIPHQIHLGELHAILRRQEDFYPFLKDNREKIEKILTFRIPYYVGPLARGNSRFAWMTRKSEETITPWNFEEVVDKGASAQSFIERMTNFDKNLPNEKVLPKHSLLYEYFTVYNELTKVKYVTEGMRKPAFLSGEQKKAIVDLLFKTNRKVTVKQLKEDYFKKIECFDSVEISGVEDRFNASLGTYHDLLKIIKDKDFLDNEENEDILEDIVLTLTLFEDREMIEERLKTYAHLFDDKVMKQLKRRRYTGWGRLSRKLINGIRDKQSGKTILDFLKSDGFANRNFMQLIHDDSLTFKEDIQKAQVSGQGDSLHEHIANLAGSPAIKKGILQTVKVVDELVKVMGRHKPENIVIEMARENQTTQKGQKNSRERMKRIEEGIKELGSQILKEHPVENTQLQNEKLYLYYLQNGRDMYVDQELDINRLSDYDVDHIVPQSFLKDDSIDNKVLTRSDKARGKSDNVPSEEVVKKMKNYWRQLLNAKLITQRKFDNLTKAERGGLSELDKAGFIKRQLVETRQITKHVAQILDSRMNTKYDENDKLIREVKVITLKSKLVSDFRKDFQFYKVREINNYHHAHDAYLNAVVGTALIKKYPKLESEFVYGDYKVYDVRKMIAKSEQEIGKATAKYFFYSNIMNFFKTEITLANGEIRKRPLIETNGETGEIVWDKGRDFATVRKVLSMPQVNIVKKTEVQTGGFSKESILPKRNSDKLIARKKDWDPKKYGGFDSPTVAYSVLVVAKVEKGKSKKLKSVKELLGITIMERSSFEKNPIDFLEAKGYKEVKKDLIIKLPKYSLFELENGRKRMLASAGELQKGNELALPSKYVNFLYLASHYEKLKGSPEDNEQKQLFVEQHKHYLDEIIEQISEFSKRVILADANLDKVLSAYNKHRDKPIREQAENIIHLFTLTNLGAPAAFKYFDTTIDRKRYTSTKEVLDATLIHQSITGLYETRIDLSQLGGDGGEAAAKPAPGGSGGTLGDQGSRGSDPLPEPRVTLTVEGIPTEFLVNTGAEHSVLTKPMGKMGSKRTVVAGATGSKVYPWTTKRLLKIGQKQVTHSFLVIPECPAPLLGRDLLTKLKAQIQFSTEGPQVTWEDRPAMCLVLNLEEEYRLHEKPVPPSIDPSWLQLFPMVWAEKAGMGLANQVPPVVVELKSDASPVAVRQYPMSKEAREGIRPHIQRFLDLGILVPCQSPWNTPLLPVKKPGTNDYRPVQDLREVNKRVQDIHPTVPNPYNLLSSLPPSHTWYSVLDLKDAFFCLKLHPNSQPLFAFEWRDPEKGNTGQLTWTRLPQGFKNSPTLFNEALHRDLASFRALNPQVVMLQYVDDLLVAAPTYRDCKEGTRRLLQELSKLGYRVSAKKAQLCREEVTYLGYLLKGGKRWLTPARKATVMKIPTPTTPRQVREFLGKAGFCRLFIPGFASLAAPLYPLTRPKVPFTWTEAHQEAFGRIKEALLSAPALALPDLTKPFALYVDEKEGVARGVLTQTLGPWRRPVAYLSKKLDPVASGWPTCLKAIAAVALLLKDADKLTLGQNVLVIAPHNLESIVRQPPDRWMTNARMTHYQSLLLNERVSFAPPAILNPATLLPVESDDTPIHICSEILAEETGTRPDLRDQPLPGVPAWYTDGSSFIMDGRRQAGAAIVDNKRTVWASNLPEGTSAQKAELIALTQALRLAEGKSINIYTDSRYAFATAHVHGAIYKQRGWLTSAGKDIKNKEEILALLEAIHLPKRVAIIHCPGHQRGTDPVATGNRKADEAAKQAAQSTRILTETTKNAGKRTADGSEFEKRTADGSEFESPKKKAKVE

SEQ ID NO: 1787 - protein, 2218 aa, synthetic construct
MPAAKRVKLDGGDKKYSIGLDIGTNSVGWAVITDEYKVPSKKFKVLGNTDRHSIKKNLIGALLFDSGETAEATRLKRTARRRYTRRKNRICYLQEIFSNEMAKVDDSFFHRLEESFLVEEDKKHERHPIFGNIVDEVAYHEKYPTIYHLRKKLVDSTDKADLRLIYLALAHMIKFRGHFLIEGDLNPDNSDVDKLFIQLVQTYNQLFEENPINASGVDAKAILSARLSKSRRLENLIAQLPGEKKNGLFGNLIALSLGLTPNFKSNFDLAEDAKLQLSKDTYDDDLDNLLAQIGDQYADLFLAAKNLSDAILLSDILRVNTEITKAPLSASMIKRYDEHHQDLTLLKALVRQQLPEKYKEIFFDQSKNGYAGYIDGGASQEEFYKFIKPILEKMDGTEELLVKLNREDLLRKQRTFDNGSIPHQIHLGELHAILRRQEDFYPFLKDNREKIEKILTFRIPYYVGPLARGNSRFAWMTRKSEETITPWNFEEVVDKGASAQSFIERMTNFDKNLPNEKVLPKHSLLYEYFTVYNELTKVKYVTEGMRKPAFLSGEQKKAIVDLLFKTNRKVTVKQLKEDYFKKIECFDSVEISGVEDRFNASLGTYHDLLKIIKDKDFLDNEENEDILEDIVLTLTLFEDREMIEERLKTYAHLFDDKVMKQLKRRRYTGWGRLSRKLINGIRDKQSGKTILDFLKSDGFANRNFMQLIHDDSLTFKEDIQKAQVSGQGDSLHEHIANLAGSPAIKKGILQTVKVVDELVKVMGRHKPENIVIEMARENQTTQKGQKNSRERMKRIEEGIKELGSQILKEHPVENTQLQNEKLYLYYLQNGRDMYVDQELDINRLSDYDVDHIVPQSFLKDDSIDNKVLTRSDKARGKSDNVPSEEVVKKMKNYWRQLLNAKLITQRKFDNLTKAERGGLSELDKAGFIKRQLVETRQITKHVAQILDSRMNTKYDENDKLIREVKVITLKSKLVSDFRKDFQFYKVREINNYHHAHDAYLNAVVGTALIKKYPKLESEFVYGDYKVYDVRKMIAKSEQEIGKATAKYFFYSNIMNFFKTEITLANGEIRKRPLIETNGETGEIVWDKGRDFATVRKVLSMPQVNIVKKTEVQTGGFSKESILPKRNSDKLIARKKDWDPKKYGGFDSPTVAYSVLVVAKVEKGKSKKLKSVKELLGITIMERSSFEKNPIDFLEAKGYKEVKKDLIIKLPKYSLFELENGRKRMLASAGELQKGNELALPSKYVNFLYLASHYEKLKGSPEDNEQKQLFVEQHKHYLDEIIEQISEFSKRVILADANLDKVLSAYNKHRDKPIREQAENIIHLFTLTNLGAPAAFKYFDTTIDRKRYTSTKEVLDATLIHQSITGLYETRIDLSQLGGDGGGGSPAPEAAAKGGTLGDQGSRGSDPLPEPRVTLTVEGIPTEFLVNTGAEHSVLTKPMGKMGSKRTVVAGATGSKVYPWTTKRLLKIGQKQVTHSFLVIPECPAPLLGRDLLTKLKAQIQFSTEGPQVTWEDRPAMCLVLNLEEEYRLHEKPVPPSIDPSWLQLFPMVWAEKAGMGLANQVPPVVVELKSDASPVAVRQYPMSKEAREGIRPHIQRFLDLGILVPCQSPWNTPLLPVKKPGTNDYRPVQDLREVNKRVQDIHPTVPNPYNLLSSLPPSHTWYSVLDLKDAFFCLKLHPNSQPLFAFEWRDPEKGNTGQLTWTRLPQGFKNSPTLFNEALHRDLASFRALNPQVVMLQYVDDLLVAAPTYRDCKEGTRRLLQELSKLGYRVSAKKAQLCREEVTYLGYLLKGGKRWLTPARKATVMKIPTPTTPRQVREFLGKAGFCRLFIPGFASLAAPLYPLTRPKVPFTWTEAHQEAFGRIKEALLSAPALALPDLTKPFALYVDEKEGVARGVLTQTLGPWRRPVAYLSKKLDPVASGWPTCLKAIAAVALLLKDADKLTLGQNVLVIAPHNLESIVRQPPDRWMTNARMTHYQSLLLNERVSFAPPAILNPATLLPVESDDTPIHICSEILAEETGTRPDLRDQPLPGVPAWYTDGSSFIMDGRRQAGAAIVDNKRTVWASNLPEGTSAQKAELIALTQALRLAEGKSINIYTDSRYAFATAHVHGAIYKQRGWLTSAGKDIKNKEEILALLEAIHLPKRVAIIHCPGHQRGTDPVATGNRKADEAAKQAAQSTRILTETTKNAGKRTADGSEFEKRTADGSEFESPKKKAKVE

SEQ ID NO: 1788 - protein, 2212 aa, synthetic construct
MPAAKRVKLDGGDKKYSIGLDIGTNSVGWAVITDEYKVPSKKFKVLGNTDRHSIKKNLIGALLFDSGETAEATRLKRTARRRYTRRKNRICYLQEIFSNEMAKVDDSFFHRLEESFLVEEDKKHERHPIFGNIVDEVAYHEKYPTIYHLRKKLVDSTDKADLRLIYLALAHMIKFRGHFLIEGDLNPDNSDVDKLFIQLVQTYNQLFEENPINASGVDAKAILSARLSKSRRLENLIAQLPGEKKNGLFGNLIALSLGLTPNFKSNFDLAEDAKLQLSKDTYDDDLDNLLAQIGDQYADLFLAAKNLSDAILLSDILRVNTEITKAPLSASMIKRYDEHHQDLTLLKALVRQQLPEKYKEIFFDQSKNGYAGYIDGGASQEEFYKFIKPILEKMDGTEELLVKLNREDLLRKQRTFDNGSIPHQIHLGELHAILRRQEDFYPFLKDNREKIEKILTFRIPYYVGPLARGNSRFAWMTRKSEETITPWNFEEVVDKGASAQSFIERMTNFDKNLPNEKVLPKHSLLYEYFTVYNELTKVKYVTEGMRKPAFLSGEQKKAIVDLLFKTNRKVTVKQLKEDYFKKIECFDSVEISGVEDRFNASLGTYHDLLKIIKDKDFLDNEENEDILEDIVLTLTLFEDREMIEERLKTYAHLFDDKVMKQLKRRRYTGWGRLSRKLINGIRDKQSGKTILDFLKSDGFANRNFMQLIHDDSLTFKEDIQKAQVSGQGDSLHEHIANLAGSPAIKKGILQTVKVVDELVKVMGRHKPENIVIEMARENQTTQKGQKNSRERMKRIEEGIKELGSQILKEHPVENTQLQNEKLYLYYLQNGRDMYVDQELDINRLSDYDVDHIVPQSFLKDDSIDNKVLTRSDKARGKSDNVPSEEVVKKMKNYWRQLLNAKLITQRKFDNLTKAERGGLSELDKAGFIKRQLVETRQITKHVAQILDSRMNTKYDENDKLIREVKVITLKSKLVSDFRKDFQFYKVREINNYHHAHDAYLNAVVGTALIKKYPKLESEFVYGDYKVYDVRKMIAKSEQEIGKATAKYFFYSNIMNFFKTEITLANGEIRKRPLIETNGETGEIVWDKGRDFATVRKVLSMPQVNIVKKTEVQTGGFSKESILPKRNSDKLIARKKDWDPKKYGGFDSPTVAYSVLVVAKVEKGKSKKLKSVKELLGITIMERSSFEKNPIDFLEAKGYKEVKKDLIIKLPKYSLFELENGRKRMLASAGELQKGNELALPSKYVNFLYLASHYEKLKGSPEDNEQKQLFVEQHKHYLDEIIEQISEFSKRVILADANLDKVLSAYNKHRDKPIREQAENIIHLFTLTNLGAPAAFKYFDTTIDRKRYTSTKEVLDATLIHQSITGLYETRIDLSQLGGDGGGGGGSGGTLGDQGSRGSDPLPEPRVTLTVEGIPTEFLVNTGAEHSVLTKPMGKMGSKRTVVAGATGSKVYPWTTKRLLKIGQKQVTHSFLVIPECPAPLLGRDLLTKLKAQIQFSTEGPQVTWEDRPAMCLVLNLEEEYRLHEKPVPPSIDPSWLQLFPMVWAEKAGMGLANQVPPVVVELKSDASPVAVRQYPMSKEAREGIRPHIQRFLDLGILVPCQSPWNTPLLPVKKPGTNDYRPVQDLREVNKRVQDIHPTVPNPYNLLSSLPPSHTWYSVLDLKDAFFCLKLHPNSQPLFAFEWRDPEKGNTGQLTWTRLPQGFKNSPTLFNEALHRDLASFRALNPQVVMLQYVDDLLVAAPTYRDCKEGTRRLLQELSKLGYRVSAKKAQLCREEVTYLGYLLKGGKRWLTPARKATVMKIPTPTTPRQVREFLGKAGFCRLFIPGFASLAAPLYPLTRPKVPFTWTEAHQEAFGRIKEALLSAPALALPDLTKPFALYVDEKEGVARGVLTQTLGPWRRPVAYLSKKLDPVASGWPTCLKAIAAVALLLKDADKLTLGQNVLVIAPHNLESIVRQPPDRWMTNARMTHYQSLLLNERVSFAPPAILNPATLLPVESDDTPIHICSEILAEETGTRPDLRDQPLPGVPAWYTDGSSFIMDGRRQAGAAIVDNKRTVWASNLPEGTSAQKAELIALTQALRLAEGKSINIYTDSRYAFATAHVHGAIYKQRGWLTSAGKDIKNKEEILALLEAIHLPKRVAIIHCPGHQRGTDPVATGNRKADEAAKQAAQSTRILTETTKNAGKRTADGSEFEKRTADGSEFESPKKKAKVE

SEQ ID NO: 1789 - protein, 2218 aa, synthetic construct
MPAAKRVKLDGGDKKYSIGLDIGTNSVGWAVITDEYKVPSKKFKVLGNTDRHSIKKNLIGALLFDSGETAEATRLKRTARRRYTRRKNRICYLQEIFSNEMAKVDDSFFHRLEESFLVEEDKKHERHPIFGNIVDEVAYHEKYPTIYHLRKKLVDSTDKADLRLIYLALAHMIKFRGHFLIEGDLNPDNSDVDKLFIQLVQTYNQLFEENPINASGVDAKAILSARLSKSRRLENLIAQLPGEKKNGLFGNLIALSLGLTPNFKSNFDLAEDAKLQLSKDTYDDDLDNLLAQIGDQYADLFLAAKNLSDAILLSDILRVNTEITKAPLSASMIKRYDEHHQDLTLLKALVRQQLPEKYKEIFFDQSKNGYAGYIDGGASQEEFYKFIKPILEKMDGTEELLVKLNREDLLRKQRTFDNGSIPHQIHLGELHAILRRQEDFYPFLKDNREKIEKILTFRIPYYVGPLARGNSRFAWMTRKSEETITPWNFEEVVDKGASAQSFIERMTNFDKNLPNEKVLPKHSLLYEYFTVYNELTKVKYVTEGMRKPAFLSGEQKKAIVDLLFKTNRKVTVKQLKEDYFKKIECFDSVEISGVEDRFNASLGTYHDLLKIIKDKDFLDNEENEDILEDIVLTLTLFEDREMIEERLKTYAHLFDDKVMKQLKRRRYTGWGRLSRKLINGIRDKQSGKTILDFLKSDGFANRNFMQLIHDDSLTFKEDIQKAQVSGQGDSLHEHIANLAGSPAIKKGILQTVKVVDELVKVMGRHKPENIVIEMARENQTTQKGQKNSRERMKRIEEGIKELGSQILKEHPVENTQLQNEKLYLYYLQNGRDMYVDQELDINRLSDYDVDHIVPQSFLKDDSIDNKVLTRSDKARGKSDNVPSEEVVKKMKNYWRQLLNAKLITQRKFDNLTKAERGGLSELDKAGFIKRQLVETRQITKHVAQILDSRMNTKYDENDKLIREVKVITLKSKLVSDFRKDFQFYKVREINNYHHAHDAYLNAVVGTALIKKYPKLESEFVYGDYKVYDVRKMIAKSEQEIGKATAKYFFYSNIMNFFKTEITLANGEIRKRPLIETNGETGEIVWDKGRDFATVRKVLSMPQVNIVKKTEVQTGGFSKESILPKRNSDKLIARKKDWDPKKYGGFDSPTVAYSVLVVAKVEKGKSKKLKSVKELLGITIMERSSFEKNPIDFLEAKGYKEVKKDLIIKLPKYSLFELENGRKRMLASAGELQKGNELALPSKYVNFLYLASHYEKLKGSPEDNEQKQLFVEQHKHYLDEIIEQISEFSKRVILADANLDKVLSAYNKHRDKPIREQAENIIHLFTLTNLGAPAAFKYFDTTIDRKRYTSTKEVLDATLIHQSITGLYETRIDLSQLGGDGGGGGEAAAKPAPGGTLGDQGSRGSDPLPEPRVTLTVEGIPTEFLVNTGAEHSVLTKPMGKMGSKRTVVAGATGSKVYPWTTKRLLKIGQKQVTHSFLVIPECPAPLLGRDLLTKLKAQIQFSTEGPQVTWEDRPAMCLVLNLEEEYRLHEKPVPPSIDPSWLQLFPMVWAEKAGMGLANQVPPVVVELKSDASPVAVRQYPMSKEAREGIRPHIQRFLDLGILVPCQSPWNTPLLPVKKPGTNDYRPVQDLREVNKRVQDIHPTVPNPYNLLSSLPPSHTWYSVLDLKDAFFCLKLHPNSQPLFAFEWRDPEKGNTGQLTWTRLPQGFKNSPTLFNEALHRDLASFRALNPQVVMLQYVDDLLVAAPTYRDCKEGTRRLLQELSKLGYRVSAKKAQLCREEVTYLGYLLKGGKRWLTPARKATVMKIPTPTTPRQVREFLGKAGFCRLFIPGFASLAAPLYPLTRPKVPFTWTEAHQEAFGRIKEALLSAPALALPDLTKPFALYVDEKEGVARGVLTQTLGPWRRPVAYLSKKLDPVASGWPTCLKAIAAVALLLKDADKLTLGQNVLVIAPHNLESIVRQPPDRWMTNARMTHYQSLLLNERVSFAPPAILNPATLLPVESDDTPIHICSEILAEETGTRPDLRDQPLPGVPAWYTDGSSFIMDGRRQAGAAIVDNKRTVWASNLPEGTSAQKAELIALTQALRLAEGKSINIYTDSRYAFATAHVHGAIYKQRGWLTSAGKDIKNKEEILALLEAIHLPKRVAIIHCPGHQRGTDPVATGNRKADEAAKQAAQSTRILTETTKNAGKRTADGSEFEKRTADGSEFESPKKKAKVE

SEQ ID NO: 1790 - protein, 2214 aa, synthetic construct
MPAAKRVKLDGGDKKYSIGLDIGTNSVGWAVITDEYKVPSKKFKVLGNTDRHSIKKNLIGALLFDSGETAEATRLKRTARRRYTRRKNRICYLQEIFSNEMAKVDDSFFHRLEESFLVEEDKKHERHPIFGNIVDEVAYHEKYPTIYHLRKKLVDSTDKADLRLIYLALAHMIKFRGHFLIEGDLNPDNSDVDKLFIQLVQTYNQLFEENPINASGVDAKAILSARLSKSRRLENLIAQLPGEKKNGLFGNLIALSLGLTPNFKSNFDLAEDAKLQLSKDTYDDDLDNLLAQIGDQYADLFLAAKNLSDAILLSDILRVNTEITKAPLSASMIKRYDEHHQDLTLLKALVRQQLPEKYKEIFFDQSKNGYAGYIDGGASQEEFYKFIKPILEKMDGTEELLVKLNREDLLRKQRTFDNGSIPHQIHLGELHAILRRQEDFYPFLKDNREKIEKILTFRIPYYVGPLARGNSRFAWMTRKSEETITPWNFEEVVDKGASAQSFIERMTNFDKNLPNEKVLPKHSLLYEYFTVYNELTKVKYVTEGMRKPAFLSGEQKKAIVDLLFKTNRKVTVKQLKEDYFKKIECFDSVEISGVEDRFNASLGTYHDLLKIIKDKDFLDNEENEDILEDIVLTLTLFEDREMIEERLKTYAHLFDDKVMKQLKRRRYTGWGRLSRKLINGIRDKQSGKTILDFLKSDGFANRNFMQLIHDDSLTFKEDIQKAQVSGQGDSLHEHIANLAGSPAIKKGILQTVKVVDELVKVMGRHKPENIVIEMARENQTTQKGQKNSRERMKRIEEGIKELGSQILKEHPVENTQLQNEKLYLYYLQNGRDMYVDQELDINRLSDYDVDHIVPQSFLKDDSIDNKVLTRSDKARGKSDNVPSEEVVKKMKNYWRQLLNAKLITQRKFDNLTKAERGGLSELDKAGFIKRQLVETRQITKHVAQILDSRMNTKYDENDKLIREVKVITLKSKLVSDFRKDFQFYKVREINNYHHAHDAYLNAVVGTALIKKYPKLESEFVYGDYKVYDVRKMIAKSEQEIGKATAKYFFYSNIMNFFKTEITLANGEIRKRPLIETNGETGEIVWDKGRDFATVRKVLSMPQVNIVKKTEVQTGGFSKESILPKRNSDKLIARKKDWDPKKYGGFDSPTVAYSVLVVAKVEKGKSKKLKSVKELLGITIMERSSFEKNPIDFLEAKGYKEVKKDLIIKLPKYSLFELENGRKRMLASAGELQKGNELALPSKYVNFLYLASHYEKLKGSPEDNEQKQLFVEQHKHYLDEIIEQISEFSKRVILADANLDKVLSAYNKHRDKPIREQAENIIHLFTLTNLGAPAAFKYFDTTIDRKRYTSTKEVLDATLIHQSITGLYETRIDLSQLGGDGGGGGGGGGGGTLGDQGSRGSDPLPEPRVTLTVEGIPTEFLVNTGAEHSVLTKPMGKMGSKRTVVAGATGSKVYPWTTKRLLKIGQKQVTHSFLVIPECPAPLLGRDLLTKLKAQIQFSTEGPQVTWEDRPAMCLVLNLEEEYRLHEKPVPPSIDPSWLQLFPMVWAEKAGMGLANQVPPVVVELKSDASPVAVRQYPMSKEAREGIRPHIQRFLDLGILVPCQSPWNTPLLPVKKPGTNDYRPVQDLREVNKRVQDIHPTVPNPYNLLSSLPPSHTWYSVLDLKDAFFCLKLHPNSQPLFAFEWRDPEKGNTGQLTWTRLPQGFKNSPTLFNEALHRDLASFRALNPQVVMLQYVDDLLVAAPTYRDCKEGTRRLLQELSKLGYRVSAKKAQLCREEVTYLGYLLKGGKRWLTPARKATVMKIPTPTTPRQVREFLGKAGFCRLFIPGFASLAAPLYPLTRPKVPFTWTEAHQEAFGRIKEALLSAPALALPDLTKPFALYVDEKEGVARGVLTQTLGPWRRPVAYLSKKLDPVASGWPTCLKAIAAVALLLKDADKLTLGQNVLVIAPHNLESIVRQPPDRWMTNARMTHYQSLLLNERVSFAPPAILNPATLLPVESDDTPIHICSEILAEETGTRPDLRDQPLPGVPAWYTDGSSFIMDGRRQAGAAIVDNKRTVWASNLPEGTSAQKAELIALTQALRLAEGKSINIYTDSRYAFATAHVHGAIYKQRGWLTSAGKDIKNKEEILALLEAIHLPKRVAIIHCPGHQRGTDPVATGNRKADEAAKQAAQSTRILTETTKNAGKRTADGSEFEKRTADGSEFESPKKKAKVE

SEQ ID NO: 1791 - protein, 2210 aa, synthetic construct
MPAAKRVKLDGGDKKYSIGLDIGTNSVGWAVITDEYKVPSKKFKVLGNTDRHSIKKNLIGALLFDSGETAEATRLKRTARRRYTRRKNRICYLQEIFSNEMAKVDDSFFHRLEESFLVEEDKKHERHPIFGNIVDEVAYHEKYPTIYHLRKKLVDSTDKADLRLIYLALAHMIKFRGHFLIEGDLNPDNSDVDKLFIQLVQTYNQLFEENPINASGVDAKAILSARLSKSRRLENLIAQLPGEKKNGLFGNLIALSLGLTPNFKSNFDLAEDAKLQLSKDTYDDDLDNLLAQIGDQYADLFLAAKNLSDAILLSDILRVNTEITKAPLSASMIKRYDEHHQDLTLLKALVRQQLPEKYKEIFFDQSKNGYAGYIDGGASQEEFYKFIKPILEKMDGTEELLVKLNREDLLRKQRTFDNGSIPHQIHLGELHAILRRQEDFYPFLKDNREKIEKILTFRIPYYVGPLARGNSRFAWMTRKSEETITPWNFEEVVDKGASAQSFIERMTNFDKNLPNEKVLPKHSLLYEYFTVYNELTKVKYVTEGMRKPAFLSGEQKKAIVDLLFKTNRKVTVKQLKEDYFKKIECFDSVEISGVEDRFNASLGTYHDLLKIIKDKDFLDNEENEDILEDIVLTLTLFEDREMIEERLKTYAHLFDDKVMKQLKRRRYTGWGRLSRKLINGIRDKQSGKTILDFLKSDGFANRNFMQLIHDDSLTFKEDIQKAQVSGQGDSLHEHIANLAGSPAIKKGILQTVKVVDELVKVMGRHKPENIVIEMARENQTTQKGQKNSRERMKRIEEGIKELGSQILKEHPVENTQLQNEKLYLYYLQNGRDMYVDQELDINRLSDYDVDHIVPQSFLKDDSIDNKVLTRSDKARGKSDNVPSEEVVKKMKNYWRQLLNAKLITQRKFDNLTKAERGGLSELDKAGFIKRQLVETRQITKHVAQILDSRMNTKYDENDKLIREVKVITLKSKLVSDFRKDFQFYKVREINNYHHAHDAYLNAVVGTALIKKYPKLESEFVYGDYKVYDVRKMIAKSEQEIGKATAKYFFYSNIMNFFKTEITLANGEIRKRPLIETNGETGEIVWDKGRDFATVRKVLSMPQVNIVKKTEVQTGGFSKESILPKRNSDKLIARKKDWDPKKYGGFDSPTVAYSVLVVAKVEKGKSKKLKSVKELLGITIMERSSFEKNPIDFLEAKGYKEVKKDLIIKLPKYSLFELENGRKRMLASAGELQKGNELALPSKYVNFLYLASHYEKLKGSPEDNEQKQLFVEQHKHYLDEIIEQISEFSKRVILADANLDKVLSAYNKHRDKPIREQAENIIHLFTLTNLGAPAAFKYFDTTIDRKRYTSTKEVLDATLIHQSITGLYETRIDLSQLGGDGGGGSGGTLGDQGSRGSDPLPEPRVTLTVEGIPTEFLVNTGAEHSVLTKPMGKMGSKRTVVAGATGSKVYPWTTKRLLKIGQKQVTHSFLVIPECPAPLLGRDLLTKLKAQIQFSTEGPQVTWEDRPAMCLVLNLEEEYRLHEKPVPPSIDPSWLQLFPMVWAEKAGMGLANQVPPVVVELKSDASPVAVRQYPMSKEAREGIRPHIQRFLDLGILVPCQSPWNTPLLPVKKPGTNDYRPVQDLREVNKRVQDIHPTVPNPYNLLSSLPPSHTWYSVLDLKDAFFCLKLHPNSQPLFAFEWRDPEKGNTGQLTWTRLPQGFKNSPTLFNEALHRDLASFRALNPQVVMLQYVDDLLVAAPTYRDCKEGTRRLLQELSKLGYRVSAKKAQLCREEVTYLGYLLKGGKRWLTPARKATVMKIPTPTTPRQVREFLGKAGFCRLFIPGFASLAAPLYPLTRPKVPFTWTEAHQEAFGRIKEALLSAPALALPDLTKPFALYVDEKEGVARGVLTQTLGPWRRPVAYLSKKLDPVASGWPTCLKAIAAVALLLKDADKLTLGQNVLVIAPHNLESIVRQPPDRWMTNARMTHYQSLLLNERVSFAPPAILNPATLLPVESDDTPIHICSEILAEETGTRPDLRDQPLPGVPAWYTDGSSFIMDGRRQAGAAIVDNKRTVWASNLPEGTSAQKAELIALTQALRLAEGKSINIYTDSRYAFATAHVHGAIYKQRGWLTSAGKDIKNKEEILALLEAIHLPKRVAIIHCPGHQRGTDPVATGNRKADEAAKQAAQSTRILTETTKNAGKRTADGSEFEKRTADGSEFESPKKKAKVE

SEQ ID NO: 1792 - protein, 2216 aa, synthetic construct
MPAAKRVKLDGGDKKYSIGLDIGTNSVGWAVITDEYKVPSKKFKVLGNTDRHSIKKNLIGALLFDSGETAEATRLKRTARRRYTRRKNRICYLQEIFSNEMAKVDDSFFHRLEESFLVEEDKKHERHPIFGNIVDEVAYHEKYPTIYHLRKKLVDSTDKADLRLIYLALAHMIKFRGHFLIEGDLNPDNSDVDKLFIQLVQTYNQLFEENPINASGVDAKAILSARLSKSRRLENLIAQLPGEKKNGLFGNLIALSLGLTPNFKSNFDLAEDAKLQLSKDTYDDDLDNLLAQIGDQYADLFLAAKNLSDAILLSDILRVNTEITKAPLSASMIKRYDEHHQDLTLLKALVRQQLPEKYKEIFFDQSKNGYAGYIDGGASQEEFYKFIKPILEKMDGTEELLVKLNREDLLRKQRTFDNGSIPHQIHLGELHAILRRQEDFYPFLKDNREKIEKILTFRIPYYVGPLARGNSRFAWMTRKSEETITPWNFEEVVDKGASAQSFIERMTNFDKNLPNEKVLPKHSLLYEYFTVYNELTKVKYVTEGMRKPAFLSGEQKKAIVDLLFKTNRKVTVKQLKEDYFKKIECFDSVEISGVEDRFNASLGTYHDLLKIIKDKDFLDNEENEDILEDIVLTLTLFEDREMIEERLKTYAHLFDDKVMKQLKRRRYTGWGRLSRKLINGIRDKQSGKTILDFLKSDGFANRNFMQLIHDDSLTFKEDIQKAQVSGQGDSLHEHIANLAGSPAIKKGILQTVKVVDELVKVMGRHKPENIVIEMARENQTTQKGQKNSRERMKRIEEGIKELGSQILKEHPVENTQLQNEKLYLYYLQNGRDMYVDQELDINRLSDYDVDHIVPQSFLKDDSIDNKVLTRSDKARGKSDNVPSEEVVKKMKNYWRQLLNAKLITQRKFDNLTKAERGGLSELDKAGFIKRQLVETRQITKHVAQILDSRMNTKYDENDKLIREVKVITLKSKLVSDFRKDFQFYKVREINNYHHAHDAYLNAVVGTALIKKYPKLESEFVYGDYKVYDVRKMIAKSEQEIGKATAKYFFYSNIMNFFKTEITLANGEIRKRPLIETNGETGEIVWDKGRDFATVRKVLSMPQVNIVKKTEVQTGGFSKESILPKRNSDKLIARKKDWDPKKYGGFDSPTVAYSVLVVAKVEKGKSKKLKSVKELLGITIMERSSFEKNPIDFLEAKGYKEVKKDLIIKLPKYSLFELENGRKRMLASAGELQKGNELALPSKYVNFLYLASHYEKLKGSPEDNEQKQLFVEQHKHYLDEIIEQISEFSKRVILADANLDKVLSAYNKHRDKPIREQAENIIHLFTLTNLGAPAAFKYFDTTIDRKRYTSTKEVLDATLIHQSITGLYETRIDLSQLGGDGGPAPGGSGGGGGTLGDQGSRGSDPLPEPRVTLTVEGIPTEFLVNTGAEHSVLTKPMGKMGSKRTVVAGATGSKVYPWTTKRLLKIGQKQVTHSFLVIPECPAPLLGRDLLTKLKAQIQFSTEGPQVTWEDRPAMCLVLNLEEEYRLHEKPVPPSIDPSWLQLFPMVWAEKAGMGLANQVPPVVVELKSDASPVAVRQYPMSKEAREGIRPHIQRFLDLGILVPCQSPWNTPLLPVKKPGTNDYRPVQDLREVNKRVQDIHPTVPNPYNLLSSLPPSHTWYSVLDLKDAFFCLKLHPNSQPLFAFEWRDPEKGNTGQLTWTRLPQGFKNSPTLFNEALHRDLASFRALNPQVVMLQYVDDLLVAAPTYRDCKEGTRRLLQELSKLGYRVSAKKAQLCREEVTYLGYLLKGGKRWLTPARKATVMKIPTPTTPRQVREFLGKAGFCRLFIPGFASLAAPLYPLTRPKVPFTWTEAHQEAFGRIKEALLSAPALALPDLTKPFALYVDEKEGVARGVLTQTLGPWRRPVAYLSKKLDPVASGWPTCLKAIAAVALLLKDADKLTLGQNVLVIAPHNLESIVRQPPDRWMTNARMTHYQSLLLNERVSFAPPAILNPATLLPVESDDTPIHICSEILAEETGTRPDLRDQPLPGVPAWYTDGSSFIMDGRRQAGAAIVDNKRTVWASNLPEGTSAQKAELIALTQALRLAEGKSINIYTDSRYAFATAHVHGAIYKQRGWLTSAGKDIKNKEEILALLEAIHLPKRVAIIHCPGHQRGTDPVATGNRKADEAAKQAAQSTRILTETTKNAGKRTADGSEFEKRTADGSEFESPKKKAKVE

SEQ ID NO: 1793 - protein, 2220 aa, synthetic construct
MPAAKRVKLDGGDKKYSIGLDIGTNSVGWAVITDEYKVPSKKFKVLGNTDRHSIKKNLIGALLFDSGETAEATRLKRTARRRYTRRKNRICYLQEIFSNEMAKVDDSFFHRLEESFLVEEDKKHERHPIFGNIVDEVAYHEKYPTIYHLRKKLVDSTDKADLRLIYLALAHMIKFRGHFLIEGDLNPDNSDVDKLFIQLVQTYNQLFEENPINASGVDAKAILSARLSKSRRLENLIAQLPGEKKNGLFGNLIALSLGLTPNFKSNFDLAEDAKLQLSKDTYDDDLDNLLAQIGDQYADLFLAAKNLSDAILLSDILRVNTEITKAPLSASMIKRYDEHHQDLTLLKALVRQQLPEKYKEIFFDQSKNGYAGYIDGGASQEEFYKFIKPILEKMDGTEELLVKLNREDLLRKQRTFDNGSIPHQIHLGELHAILRRQEDFYPFLKDNREKIEKILTFRIPYYVGPLARGNSRFAWMTRKSEETITPWNFEEVVDKGASAQSFIERMTNFDKNLPNEKVLPKHSLLYEYFTVYNELTKVKYVTEGMRKPAFLSGEQKKAIVDLLFKTNRKVTVKQLKEDYFKKIECFDSVEISGVEDRFNASLGTYHDLLKIIKDKDFLDNEENEDILEDIVLTLTLFEDREMIEERLKTYAHLFDDKVMKQLKRRRYTGWGRLSRKLINGIRDKQSGKTILDFLKSDGFANRNFMQLIHDDSLTFKEDIQKAQVSGQGDSLHEHIANLAGSPAIKKGILQTVKVVDELVKVMGRHKPENIVIEMARENQTTQKGQKNSRERMKRIEEGIKELGSQILKEHPVENTQLQNEKLYLYYLQNGRDMYVDQELDINRLSDYDVDHIVPQSFLKDDSIDNKVLTRSDKARGKSDNVPSEEVVKKMKNYWRQLLNAKLITQRKFDNLTKAERGGLSELDKAGFIKRQLVETRQITKHVAQILDSRMNTKYDENDKLIREVKVITLKSKLVSDFRKDFQFYKVREINNYHHAHDAYLNAVVGTALIKKYPKLESEFVYGDYKVYDVRKMIAKSEQEIGKATAKYFFYSNIMNFFKTEITLANGEIRKRPLIETNGETGEIVWDKGRDFATVRKVLSMPQVNIVKKTEVQTGGFSKESILPKRNSDKLIARKKDWDPKKYGGFDSPTVAYSVLVVAKVEKGKSKKLKSVKELLGITIMERSSFEKNPIDFLEAKGYKEVKKDLIIKLPKYSLFELENGRKRMLASAGELQKGNELALPSKYVNFLYLASHYEKLKGSPEDNEQKQLFVEQHKHYLDEIIEQISEFSKRVILADANLDKVLSAYNKHRDKPIREQAENIIHLFTLTNLGAPAAFKYFDTTIDRKRYTSTKEVLDATLIHQSITGLYETRIDLSQLGGDGGPAPAPAPAPAPAPGGTLGDQGSRGSDPLPEPRVTLTVEGIPTEFLVNTGAEHSVLTKPMGKMGSKRTVVAGATGSKVYPWTTKRLLKIGQKQVTHSFLVIPECPAPLLGRDLLTKLKAQIQFSTEGPQVTWEDRPAMCLVLNLEEEYRLHEKPVPPSIDPSWLQLFPMVWAEKAGMGLANQVPPVVVELKSDASPVAVRQYPMSKEAREGIRPHIQRFLDLGILVPCQSPWNTPLLPVKKPGTNDYRPVQDLREVNKRVQDIHPTVPNPYNLLSSLPPSHTWYSVLDLKDAFFCLKLHPNSQPLFAFEWRDPEKGNTGQLTWTRLPQGFKNSPTLFNEALHRDLASFRALNPQVVMLQYVDDLLVAAPTYRDCKEGTRRLLQELSKLGYRVSAKKAQLCREEVTYLGYLLKGGKRWLTPARKATVMKIPTPTTPRQVREFLGKAGFCRLFIPGFASLAAPLYPLTRPKVPFTWTEAHQEAFGRIKEALLSAPALALPDLTKPFALYVDEKEGVARGVLTQTLGPWRRPVAYLSKKLDPVASGWPTCLKAIAAVALLLKDADKLTLGQNVLVIAPHNLESIVRQPPDRWMTNARMTHYQSLLLNERVSFAPPAILNPATLLPVESDDTPIHICSEILAEETGTRPDLRDQPLPGVPAWYTDGSSFIMDGRRQAGAAIVDNKRTVWASNLPEGTSAQKAELIALTQALRLAEGKSINIYTDSRYAFATAHVHGAIYKQRGWLTSAGKDIKNKEEILALLEAIHLPKRVAIIHCPGHQRGTDPVATGNRKADEAAKQAAQSTRILTETTKNAGKRTADGSEFEKRTADGSEFESPKKKAKVE

SEQ ID NO: 1794 - protein, 2213 aa, synthetic construct
MPAAKRVKLDGGDKKYSIGLDIGTNSVGWAVITDEYKVPSKKFKVLGNTDRHSIKKNLIGALLFDSGETAEATRLKRTARRRYTRRKNRICYLQEIFSNEMAKVDDSFFHRLEESFLVEEDKKHERHPIFGNIVDEVAYHEKYPTIYHLRKKLVDSTDKADLRLIYLALAHMIKFRGHFLIEGDLNPDNSDVDKLFIQLVQTYNQLFEENPINASGVDAKAILSARLSKSRRLENLIAQLPGEKKNGLFGNLIALSLGLTPNFKSNFDLAEDAKLQLSKDTYDDDLDNLLAQIGDQYADLFLAAKNLSDAILLSDILRVNTEITKAPLSASMIKRYDEHHQDLTLLKALVRQQLPEKYKEIFFDQSKNGYAGYIDGGASQEEFYKFIKPILEKMDGTEELLVKLNREDLLRKQRTFDNGSIPHQIHLGELHAILRRQEDFYPFLKDNREKIEKILTFRIPYYVGPLARGNSRFAWMTRKSEETITPWNFEEVVDKGASAQSFIERMTNFDKNLPNEKVLPKHSLLYEYFTVYNELTKVKYVTEGMRKPAFLSGEQKKAIVDLLFKTNRKVTVKQLKEDYFKKIECFDSVEISGVEDRFNASLGTYHDLLKIIKDKDFLDNEENEDILEDIVLTLTLFEDREMIEERLKTYAHLFDDKVMKQLKRRRYTGWGRLSRKLINGIRDKQSGKTILDFLKSDGFANRNFMQLIHDDSLTFKEDIQKAQVSGQGDSLHEHIANLAGSPAIKKGILQTVKVVDELVKVMGRHKPENIVIEMARENQTTQKGQKNSRERMKRIEEGIKELGSQILKEHPVENTQLQNEKLYLYYLQNGRDMYVDQELDINRLSDYDVDHIVPQSFLKDDSIDNKVLTRSDKARGKSDNVPSEEVVKKMKNYWRQLLNAKLITQRKFDNLTKAERGGLSELDKAGFIKRQLVETRQITKHVAQILDSRMNTKYDENDKLIREVKVITLKSKLVSDFRKDFQFYKVREINNYHHAHDAYLNAVVGTALIKKYPKLESEFVYGDYKVYDVRKMIAKSEQEIGKATAKYFFYSNIMNFFKTEITLANGEIRKRPLIETNGETGEIVWDKGRDFATVRKVLSMPQVNIVKKTEVQTGGFSKESILPKRNSDKLIARKKDWDPKKYGGFDSPTVAYSVLVVAKVEKGKSKKLKSVKELLGITIMERSSFEKNPIDFLEAKGYKEVKKDLIIKLPKYSLFELENGRKRMLASAGELQKGNELALPSKYVNFLYLASHYEKLKGSPEDNEQKQLFVEQHKHYLDEIIEQISEFSKRVILADANLDKVLSAYNKHRDKPIREQAENIIHLFTLTNLGAPAAFKYFDTTIDRKRYTSTKEVLDATLIHQSITGLYETRIDLSQLGGDGGPAPGGGGGTLGDQGSRGSDPLPEPRVTLTVEGIPTEFLVNTGAEHSVLTKPMGKMGSKRTVVAGATGSKVYPWTTKRLLKIGQKQVTHSFLVIPECPAPLLGRDLLTKLKAQIQFSTEGPQVTWEDRPAMCLVLNLEEEYRLHEKPVPPSIDPSWLQLFPMVWAEKAGMGLANQVPPVVVELKSDASPVAVRQYPMSKEAREGIRPHIQRFLDLGILVPCQSPWNTPLLPVKKPGTNDYRPVQDLREVNKRVQDIHPTVPNPYNLLSSLPPSHTWYSVLDLKDAFFCLKLHPNSQPLFAFEWRDPEKGNTGQLTWTRLPQGFKNSPTLFNEALHRDLASFRALNPQVVMLQYVDDLLVAAPTYRDCKEGTRRLLQELSKLGYRVSAKKAQLCREEVTYLGYLLKGGKRWLTPARKATVMKIPTPTTPRQVREFLGKAGFCRLFIPGFASLAAPLYPLTRPKVPFTWTEAHQEAFGRIKEALLSAPALALPDLTKPFALYVDEKEGVARGVLTQTLGPWRRPVAYLSKKLDPVASGWPTCLKAIAAVALLLKDADKLTLGQNVLVIAPHNLESIVRQPPDRWMTNARMTHYQSLLLNERVSFAPPAILNPATLLPVESDDTPIHICSEILAEETGTRPDLRDQPLPGVPAWYTDGSSFIMDGRRQAGAAIVDNKRTVWASNLPEGTSAQKAELIALTQALRLAEGKSINIYTDSRYAFATAHVHGAIYKQRGWLTSAGKDIKNKEEILALLEAIHLPKRVAIIHCPGHQRGTDPVATGNRKADEAAKQAAQSTRILTETTKNAGKRTADGSEFEKRTADGSEFESPKKKAKVE

SEQ ID NO: 1795 - protein, 2218 aa, synthetic construct
MPAAKRVKLDGGDKKYSIGLDIGTNSVGWAVITDEYKVPSKKFKVLGNTDRHSIKKNLIGALLFDSGETAEATRLKRTARRRYTRRKNRICYLQEIFSNEMAKVDDSFFHRLEESFLVEEDKKHERHPIFGNIVDEVAYHEKYPTIYHLRKKLVDSTDKADLRLIYLALAHMIKFRGHFLIEGDLNPDNSDVDKLFIQLVQTYNQLFEENPINASGVDAKAILSARLSKSRRLENLIAQLPGEKKNGLFGNLIALSLGLTPNFKSNFDLAEDAKLQLSKDTYDDDLDNLLAQIGDQYADLFLAAKNLSDAILLSDILRVNTEITKAPLSASMIKRYDEHHQDLTLLKALVRQQLPEKYKEIFFDQSKNGYAGYIDGGASQEEFYKFIKPILEKMDGTEELLVKLNREDLLRKQRTFDNGSIPHQIHLGELHAILRRQEDFYPFLKDNREKIEKILTFRIPYYVGPLARGNSRFAWMTRKSEETITPWNFEEVVDKGASAQSFIERMTNFDKNLPNEKVLPKHSLLYEYFTVYNELTKVKYVTEGMRKPAFLSGEQKKAIVDLLFKTNRKVTVKQLKEDYFKKIECFDSVEISGVEDRFNASLGTYHDLLKIIKDKDFLDNEENEDILEDIVLTLTLFEDREMIEERLKTYAHLFDDKVMKQLKRRRYTGWGRLSRKLINGIRDKQSGKTILDFLKSDGFANRNFMQLIHDDSLTFKEDIQKAQVSGQGDSLHEHIANLAGSPAIKKGILQTVKVVDELVKVMGRHKPENIVIEMARENQTTQKGQKNSRERMKRIEEGIKELGSQILKEHPVENTQLQNEKLYLYYLQNGRDMYVDQELDINRLSDYDVDHIVPQSFLKDDSIDNKVLTRSDKARGKSDNVPSEEVVKKMKNYWRQLLNAKLITQRKFDNLTKAERGGLSELDKAGFIKRQLVETRQITKHVAQILDSRMNTKYDENDKLIREVKVITLKSKLVSDFRKDFQFYKVREINNYHHAHDAYLNAVVGTALIKKYPKLESEFVYGDYKVYDVRKMIAKSEQEIGKATAKYFFYSNIMNFFKTEITLANGEIRKRPLIETNGETGEIVWDKGRDFATVRKVLSMPQVNIVKKTEVQTGGFSKESILPKRNSDKLIARKKDWDPKKYGGFDSPTVAYSVLVVAKVEKGKSKKLKSVKELLGITIMERSSFEKNPIDFLEAKGYKEVKKDLIIKLPKYSLFELENGRKRMLASAGELQKGNELALPSKYVNFLYLASHYEKLKGSPEDNEQKQLFVEQHKHYLDEIIEQISEFSKRVILADANLDKVLSAYNKHRDKPIREQAENIIHLFTLTNLGAPAAFKYFDTTIDRKRYTSTKEVLDATLIHQSITGLYETRIDLSQLGGDGGGSSPAPEAAAKGGTLGDQGSRGSDPLPEPRVTLTVEGIPTEFLVNTGAEHSVLTKPMGKMGSKRTVVAGATGSKVYPWTTKRLLKIGQKQVTHSFLVIPECPAPLLGRDLLTKLKAQIQFSTEGPQVTWEDRPAMCLVLNLEEEYRLHEKPVPPSIDPSWLQLFPMVWAEKAGMGLANQVPPVVVELKSDASPVAVRQYPMSKEAREGIRPHIQRFLDLGILVPCQSPWNTPLLPVKKPGTNDYRPVQDLREVNKRVQDIHPTVPNPYNLLSSLPPSHTWYSVLDLKDAFFCLKLHPNSQPLFAFEWRDPEKGNTGQLTWTRLPQGFKNSPTLFNEALHRDLASFRALNPQVVMLQYVDDLLVAAPTYRDCKEGTRRLLQELSKLGYRVSAKKAQLCREEVTYLGYLLKGGKRWLTPARKATVMKIPTPTTPRQVREFLGKAGFCRLFIPGFASLAAPLYPLTRPKVPFTWTEAHQEAFGRIKEALLSAPALALPDLTKPFALYVDEKEGVARGVLTQTLGPWRRPVAYLSKKLDPVASGWPTCLKAIAAVALLLKDADKLTLGQNVLVIAPHNLESIVRQPPDRWMTNARMTHYQSLLLNERVSFAPPAILNPATLLPVESDDTPIHICSEILAEETGTRPDLRDQPLPGVPAWYTDGSSFIMDGRRQAGAAIVDNKRTVWASNLPEGTSAQKAELIALTQALRLAEGKSINIYTDSRYAFATAHVHGAIYKQRGWLTSAGKDIKNKEEILALLEAIHLPKRVAIIHCPGHQRGTDPVATGNRKADEAAKQAAQSTRILTETTKNAGKRTADGSEFEKRTADGSEFESPKKKAKVE

SEQ ID NO: 1796 - protein, 2218 aa, synthetic construct
MPAAKRVKLDGGDKKYSIGLDIGTNSVGWAVITDEYKVPSKKFKVLGNTDRHSIKKNLIGALLFDSGETAEATRLKRTARRRYTRRKNRICYLQEIFSNEMAKVDDSFFHRLEESFLVEEDKKHERHPIFGNIVDEVAYHEKYPTIYHLRKKLVDSTDKADLRLIYLALAHMIKFRGHFLIEGDLNPDNSDVDKLFIQLVQTYNQLFEENPINASGVDAKAILSARLSKSRRLENLIAQLPGEKKNGLFGNLIALSLGLTPNFKSNFDLAEDAKLQLSKDTYDDDLDNLLAQIGDQYADLFLAAKNLSDAILLSDILRVNTEITKAPLSASMIKRYDEHHQDLTLLKALVRQQLPEKYKEIFFDQSKNGYAGYIDGGASQEEFYKFIKPILEKMDGTEELLVKLNREDLLRKQRTFDNGSIPHQIHLGELHAILRRQEDFYPFLKDNREKIEKILTFRIPYYVGPLARGNSRFAWMTRKSEETITPWNFEEVVDKGASAQSFIERMTNFDKNLPNEKVLPKHSLLYEYFTVYNELTKVKYVTEGMRKPAFLSGEQKKAIVDLLFKTNRKVTVKQLKEDYFKKIECFDSVEISGVEDRFNASLGTYHDLLKIIKDKDFLDNEENEDILEDIVLTLTLFEDREMIEERLKTYAHLFDDKVMKQLKRRRYTGWGRLSRKLINGIRDKQSGKTILDFLKSDGFANRNFMQLIHDDSLTFKEDIQKAQVSGQGDSLHEHIANLAGSPAIKKGILQTVKVVDELVKVMGRHKPENIVIEMARENQTTQKGQKNSRERMKRIEEGIKELGSQILKEHPVENTQLQNEKLYLYYLQNGRDMYVDQELDINRLSDYDVDHIVPQSFLKDDSIDNKVLTRSDKARGKSDNVPSEEVVKKMKNYWRQLLNAKLITQRKFDNLTKAERGGLSELDKAGFIKRQLVETRQITKHVAQILDSRMNTKYDENDKLIREVKVITLKSKLVSDFRKDFQFYKVREINNYHHAHDAYLNAVVGTALIKKYPKLESEFVYGDYKVYDVRKMIAKSEQEIGKATAKYFFYSNIMNFFKTEITLANGEIRKRPLIETNGETGEIVWDKGRDFATVRKVLSMPQVNIVKKTEVQTGGFSKESILPKRNSDKLIARKKDWDPKKYGGFDSPTVAYSVLVVAKVEKGKSKKLKSVKELLGITIMERSSFEKNPIDFLEAKGYKEVKKDLIIKLPKYSLFELENGRKRMLASAGELQKGNELALPSKYVNFLYLASHYEKLKGSPEDNEQKQLFVEQHKHYLDEIIEQISEFSKRVILADANLDKVLSAYNKHRDKPIREQAENIIHLFTLTNLGAPAAFKYFDTTIDRKRYTSTKEVLDATLIHQSITGLYETRIDLSQLGGDGGGGGEAAAKGSSGGTLGDQGSRGSDPLPEPRVTLTVEGIPTEFLVNTGAEHSVLTKPMGKMGSKRTVVAGATGSKVYPWTTKRLLKIGQKQVTHSFLVIPECPAPLLGRDLLTKLKAQIQFSTEGPQVTWEDRPAMCLVLNLEEEYRLHEKPVPPSIDPSWLQLFPMVWAEKAGMGLANQVPPVVVELKSDASPVAVRQYPMSKEAREGIRPHIQRFLDLGILVPCQSPWNTPLLPVKKPGTNDYRPVQDLREVNKRVQDIHPTVPNPYNLLSSLPPSHTWYSVLDLKDAFFCLKLHPNSQPLFAFEWRDPEKGNTGQLTWTRLPQGFKNSPTLFNEALHRDLASFRALNPQVVMLQYVDDLLVAAPTYRDCKEGTRRLLQELSKLGYRVSAKKAQLCREEVTYLGYLLKGGKRWLTPARKATVMKIPTPTTPRQVREFLGKAGFCRLFIPGFASLAAPLYPLTRPKVPFTWTEAHQEAFGRIKEALLSAPALALPDLTKPFALYVDEKEGVARGVLTQTLGPWRRPVAYLSKKLDPVASGWPTCLKAIAAVALLLKDADKLTLGQNVLVIAPHNLESIVRQPPDRWMTNARMTHYQSLLLNERVSFAPPAILNPATLLPVESDDTPIHICSEILAEETGTRPDLRDQPLPGVPAWYTDGSSFIMDGRRQAGAAIVDNKRTVWASNLPEGTSAQKAELIALTQALRLAEGKSINIYTDSRYAFATAHVHGAIYKQRGWLTSAGKDIKNKEEILALLEAIHLPKRVAIIHCPGHQRGTDPVATGNRKADEAAKQAAQSTRILTETTKNAGKRTADGSEFEKRTADGSEFESPKKKAKVE

SEQ ID NO: 1797 - protein, 2215 aa, synthetic construct
MPAAKRVKLDGGDKKYSIGLDIGTNSVGWAVITDEYKVPSKKFKVLGNTDRHSIKKNLIGALLFDSGETAEATRLKRTARRRYTRRKNRICYLQEIFSNEMAKVDDSFFHRLEESFLVEEDKKHERHPIFGNIVDEVAYHEKYPTIYHLRKKLVDSTDKADLRLIYLALAHMIKFRGHFLIEGDLNPDNSDVDKLFIQLVQTYNQLFEENPINASGVDAKAILSARLSKSRRLENLIAQLPGEKKNGLFGNLIALSLGLTPNFKSNFDLAEDAKLQLSKDTYDDDLDNLLAQIGDQYADLFLAAKNLSDAILLSDILRVNTEITKAPLSASMIKRYDEHHQDLTLLKALVRQQLPEKYKEIFFDQSKNGYAGYIDGGASQEEFYKFIKPILEKMDGTEELLVKLNREDLLRKQRTFDNGSIPHQIHLGELHAILRRQEDFYPFLKDNREKIEKILTFRIPYYVGPLARGNSRFAWMTRKSEETITPWNFEEVVDKGASAQSFIERMTNFDKNLPNEKVLPKHSLLYEYFTVYNELTKVKYVTEGMRKPAFLSGEQKKAIVDLLFKTNRKVTVKQLKEDYFKKIECFDSVEISGVEDRFNASLGTYHDLLKIIKDKDFLDNEENEDILEDIVLTLTLFEDREMIEERLKTYAHLFDDKVMKQLKRRRYTGWGRLSRKLINGIRDKQSGKTILDFLKSDGFANRNFMQLIHDDSLTFKEDIQKAQVSGQGDSLHEHIANLAGSPAIKKGILQTVKVVDELVKVMGRHKPENIVIEMARENQTTQKGQKNSRERMKRIEEGIKELGSQILKEHPVENTQLQNEKLYLYYLQNGRDMYVDQELDINRLSDYDVDHIVPQSFLKDDSIDNKVLTRSDKARGKSDNVPSEEVVKKMKNYWRQLLNAKLITQRKFDNLTKAERGGLSELDKAGFIKRQLVETRQITKHVAQILDSRMNTKYDENDKLIREVKVITLKSKLVSDFRKDFQFYKVREINNYHHAHDAYLNAVVGTALIKKYPKLESEFVYGDYKVYDVRKMIAKSEQEIGKATAKYFFYSNIMNFFKTEITLANGEIRKRPLIETNGETGEIVWDKGRDFATVRKVLSMPQVNIVKKTEVQTGGFSKESILPKRNSDKLIARKKDWDPKKYGGFDSPTVAYSVLVVAKVEKGKSKKLKSVKELLGITIMERSSFEKNPIDFLEAKGYKEVKKDLIIKLPKYSLFELENGRKRMLASAGELQKGNELALPSKYVNFLYLASHYEKLKGSPEDNEQKQLFVEQHKHYLDEIIEQISEFSKRVILADANLDKVLSAYNKHRDKPIREQAENIIHLFTLTNLGAPAAFKYFDTTIDRKRYTSTKEVLDATLIHQSITGLYETRIDLSQLGGDGGGSSEAAAKGGTLGDQGSRGSDPLPEPRVTLTVEGIPTEFLVNTGAEHSVLTKPMGKMGSKRTVVAGATGSKVYPWTTKRLLKIGQKQVTHSFLVIPECPAPLLGRDLLTKLKAQIQFSTEGPQVTWEDRPAMCLVLNLEEEYRLHEKPVPPSIDPSWLQLFPMVWAEKAGMGLANQVPPVVVELKSDASPVAVRQYPMSKEAREGIRPHIQRFLDLGILVPCQSPWNTPLLPVKKPGTNDYRPVQDLREVNKRVQDIHPTVPNPYNLLSSLPPSHTWYSVLDLKDAFFCLKLHPNSQPLFAFEWRDPEKGNTGQLTWTRLPQGFKNSPTLFNEALHRDLASFRALNPQVVMLQYVDDLLVAAPTYRDCKEGTRRLLQELSKLGYRVSAKKAQLCREEVTYLGYLLKGGKRWLTPARKATVMKIPTPTTPRQVREFLGKAGFCRLFIPGFASLAAPLYPLTRPKVPFTWTEAHQEAFGRIKEALLSAPALALPDLTKPFALYVDEKEGVARGVLTQTLGPWRRPVAYLSKKLDPVASGWPTCLKAIAAVALLLKDADKLTLGQNVLVIAPHNLESIVRQPPDRWMTNARMTHYQSLLLNERVSFAPPAILNPATLLPVESDDTPIHICSEILAEETGTRPDLRDQPLPGVPAWYTDGSSFIMDGRRQAGAAIVDNKRTVWASNLPEGTSAQKAELIALTQALRLAEGKSINIYTDSRYAFATAHVHGAIYKQRGWLTSAGKDIKNKEEILALLEAIHLPKRVAIIHCPGHQRGTDPVATGNRKADEAAKQAAQSTRILTETTKNAGKRTADGSEFEKRTADGSEFESPKKKAKVE

SEQ ID NO: 1798 - protein, 2211 aa, synthetic construct
MPAAKRVKLDGGDKKYSIGLDIGTNSVGWAVITDEYKVPSKKFKVLGNTDRHSIKKNLIGALLFDSGETAEATRLKRTARRRYTRRKNRICYLQEIFSNEMAKVDDSFFHRLEESFLVEEDKKHERHPIFGNIVDEVAYHEKYPTIYHLRKKLVDSTDKADLRLIYLALAHMIKFRGHFLIEGDLNPDNSDVDKLFIQLVQTYNQLFEENPINASGVDAKAILSARLSKSRRLENLIAQLPGEKKNGLFGNLIALSLGLTPNFKSNFDLAEDAKLQLSKDTYDDDLDNLLAQIGDQYADLFLAAKNLSDAILLSDILRVNTEITKAPLSASMIKRYDEHHQDLTLLKALVRQQLPEKYKEIFFDQSKNGYAGYIDGGASQEEFYKFIKPILEKMDGTEELLVKLNREDLLRKQRTFDNGSIPHQIHLGELHAILRRQEDFYPFLKDNREKIEKILTFRIPYYVGPLARGNSRFAWMTRKSEETITPWNFEEVVDKGASAQSFIERMTNFDKNLPNEKVLPKHSLLYEYFTVYNELTKVKYVTEGMRKPAFLSGEQKKAIVDLLFKTNRKVTVKQLKEDYFKKIECFDSVEISGVEDRFNASLGTYHDLLKIIKDKDFLDNEENEDILEDIVLTLTLFEDREMIEERLKTYAHLFDDKVMKQLKRRRYTGWGRLSRKLINGIRDKQSGKTILDFLKSDGFANRNFMQLIHDDSLTFKEDIQKAQVSGQGDSLHEHIANLAGSPAIKKGILQTVKVVDELVKVMGRHKPENIVIEMARENQTTQKGQKNSRERMKRIEEGIKELGSQILKEHPVENTQLQNEKLYLYYLQNGRDMYVDQELDINRLSDYDVDHIVPQSFLKDDSIDNKVLTRSDKARGKSDNVPSEEVVKKMKNYWRQLLNAKLITQRKFDNLTKAERGGLSELDKAGFIKRQLVETRQITKHVAQILDSRMNTKYDENDKLIREVKVITLKSKLVSDFRKDFQFYKVREINNYHHAHDAYLNAVVGTALIKKYPKLESEFVYGDYKVYDVRKMIAKSEQEIGKATAKYFFYSNIMNFFKTEITLANGEIRKRPLIETNGETGEIVWDKGRDFATVRKVLSMPQVNIVKKTEVQTGGFSKESILPKRNSDKLIARKKDWDPKKYGGFDSPTVAYSVLVVAKVEKGKSKKLKSVKELLGITIMERSSFEKNPIDFLEAKGYKEVKKDLIIKLPKYSLFELENGRKRMLASAGELQKGNELALPSKYVNFLYLASHYEKLKGSPEDNEQKQLFVEQHKHYLDEIIEQISEFSKRVILADANLDKVLSAYNKHRDKPIREQAENIIHLFTLTNLGAPAAFKYFDTTIDRKRYTSTKEVLDATLIHQSITGLYETRIDLSQLGGDGGGGGGGGTLGDQGSRGSDPLPEPRVTLTVEGIPTEFLVNTGAEHSVLTKPMGKMGSKRTVVAGATGSKVYPWTTKRLLKIGQKQVTHSFLVIPECPAPLLGRDLLTKLKAQIQFSTEGPQVTWEDRPAMCLVLNLEEEYRLHEKPVPPSIDPSWLQLFPMVWAEKAGMGLANQVPPVVVELKSDASPVAVRQYPMSKEAREGIRPHIQRFLDLGILVPCQSPWNTPLLPVKKPGTNDYRPVQDLREVNKRVQDIHPTVPNPYNLLSSLPPSHTWYSVLDLKDAFFCLKLHPNSQPLFAFEWRDPEKGNTGQLTWTRLPQGFKNSPTLFNEALHRDLASFRALNPQVVMLQYVDDLLVAAPTYRDCKEGTRRLLQELSKLGYRVSAKKAQLCREEVTYLGYLLKGGKRWLTPARKATVMKIPTPTTPRQVREFLGKAGFCRLFIPGFASLAAPLYPLTRPKVPFTWTEAHQEAFGRIKEALLSAPALALPDLTKPFALYVDEKEGVARGVLTQTLGPWRRPVAYLSKKLDPVASGWPTCLKAIAAVALLLKDADKLTLGQNVLVIAPHNLESIVRQPPDRWMTNARMTHYQSLLLNERVSFAPPAILNPATLLPVESDDTPIHICSEILAEETGTRPDLRDQPLPGVPAWYTDGSSFIMDGRRQAGAAIVDNKRTVWASNLPEGTSAQKAELIALTQALRLAEGKSINIYTDSRYAFATAHVHGAIYKQRGWLTSAGKDIKNKEEILALLEAIHLPKRVAIIHCPGHQRGTDPVATGNRKADEAAKQAAQSTRILTETTKNAGKRTADGSEFEKRTADGSEFESPKKKAKVE

SEQ ID NO: 1799 - protein, 2215 aa, synthetic construct
MPAAKRVKLDGGDKKYSIGLDIGTNSVGWAVITDEYKVPSKKFKVLGNTDRHSIKKNLIGALLFDSGETAEATRLKRTARRRYTRRKNRICYLQEIFSNEMAKVDDSFFHRLEESFLVEEDKKHERHPIFGNIVDEVAYHEKYPTIYHLRKKLVDSTDKADLRLIYLALAHMIKFRGHFLIEGDLNPDNSDVDKLFIQLVQTYNQLFEENPINASGVDAKAILSARLSKSRRLENLIAQLPGEKKNGLFGNLIALSLGLTPNFKSNFDLAEDAKLQLSKDTYDDDLDNLLAQIGDQYADLFLAAKNLSDAILLSDILRVNTEITKAPLSASMIKRYDEHHQDLTLLKALVRQQLPEKYKEIFFDQSKNGYAGYIDGGASQEEFYKFIKPILEKMDGTEELLVKLNREDLLRKQRTFDNGSIPHQIHLGELHAILRRQEDFYPFLKDNREKIEKILTFRIPYYVGPLARGNSRFAWMTRKSEETITPWNFEEVVDKGASAQSFIERMTNFDKNLPNEKVLPKHSLLYEYFTVYNELTKVKYVTEGMRKPAFLSGEQKKAIVDLLFKTNRKVTVKQLKEDYFKKIECFDSVEISGVEDRFNASLGTYHDLLKIIKDKDFLDNEENEDILEDIVLTLTLFEDREMIEERLKTYAHLFDDKVMKQLKRRRYTGWGRLSRKLINGIRDKQSGKTILDFLKSDGFANRNFMQLIHDDSLTFKEDIQKAQVSGQGDSLHEHIANLAGSPAIKKGILQTVKVVDELVKVMGRHKPENIVIEMARENQTTQKGQKNSRERMKRIEEGIKELGSQILKEHPVENTQLQNEKLYLYYLQNGRDMYVDQELDINRLSDYDVDHIVPQSFLKDDSIDNKVLTRSDKARGKSDNVPSEEVVKKMKNYWRQLLNAKLITQRKFDNLTKAERGGLSELDKAGFIKRQLVETRQITKHVAQILDSRMNTKYDENDKLIREVKVITLKSKLVSDFRKDFQFYKVREINNYHHAHDAYLNAVVGTALIKKYPKLESEFVYGDYKVYDVRKMIAKSEQEIGKATAKYFFYSNIMNFFKTEITLANGEIRKRPLIETNGETGEIVWDKGRDFATVRKVLSMPQVNIVKKTEVQTGGFSKESILPKRNSDKLIARKKDWDPKKYGGFDSPTVAYSVLVVAKVEKGKSKKLKSVKELLGITIMERSSFEKNPIDFLEAKGYKEVKKDLIIKLPKYSLFELENGRKRMLASAGELQKGNELALPSKYVNFLYLASHYEKLKGSPEDNEQKQLFVEQHKHYLDEIIEQISEFSKRVILADANLDKVLSAYNKHRDKPIREQAENIIHLFTLTNLGAPAAFKYFDTTIDRKRYTSTKEVLDATLIHQSITGLYETRIDLSQLGGDGGGGGGGGGGGGTLGDQGSRGSDPLPEPRVTLTVEGIPTEFLVNTGAEHSVLTKPMGKMGSKRTVVAGATGSKVYPWTTKRLLKIGQKQVTHSFLVIPECPAPLLGRDLLTKLKAQIQFSTEGPQVTWEDRPAMCLVLNLEEEYRLHEKPVPPSIDPSWLQLFPMVWAEKAGMGLANQVPPVVVELKSDASPVAVRQYPMSKEAREGIRPHIQRFLDLGILVPCQSPWNTPLLPVKKPGTNDYRPVQDLREVNKRVQDIHPTVPNPYNLLSSLPPSHTWYSVLDLKDAFFCLKLHPNSQPLFAFEWRDPEKGNTGQLTWTRLPQGFKNSPTLFNEALHRDLASFRALNPQVVMLQYVDDLLVAAPTYRDCKEGTRRLLQELSKLGYRVSAKKAQLCREEVTYLGYLLKGGKRWLTPARKATVMKIPTPTTPRQVREFLGKAGFCRLFIPGFASLAAPLYPLTRPKVPFTWTEAHQEAFGRIKEALLSAPALALPDLTKPFALYVDEKEGVARGVLTQTLGPWRRPVAYLSKKLDPVASGWPTCLKAIAAVALLLKDADKLTLGQNVLVIAPHNLESIVRQPPDRWMTNARMTHYQSLLLNERVSFAPPAILNPATLLPVESDDTPIHICSEILAEETGTRPDLRDQPLPGVPAWYTDGSSFIMDGRRQAGAAIVDNKRTVWASNLPEGTSAQKAELIALTQALRLAEGKSINIYTDSRYAFATAHVHGAIYKQRGWLTSAGKDIKNKEEILALLEAIHLPKRVAIIHCPGHQRGTDPVATGNRKADEAAKQAAQSTRILTETTKNAGKRTADGSEFEKRTADGSEFESPKKKAKVE

SEQ ID NO: 1800 - protein, 2223 aa, synthetic construct
MPAAKRVKLDGGDKKYSIGLDIGTNSVGWAVITDEYKVPSKKFKVLGNTDRHSIKKNLIGALLFDSGETAEATRLKRTARRRYTRRKNRICYLQEIFSNEMAKVDDSFFHRLEESFLVEEDKKHERHPIFGNIVDEVAYHEKYPTIYHLRKKLVDSTDKADLRLIYLALAHMIKFRGHFLIEGDLNPDNSDVDKLFIQLVQTYNQLFEENPINASGVDAKAILSARLSKSRRLENLIAQLPGEKKNGLFGNLIALSLGLTPNFKSNFDLAEDAKLQLSKDTYDDDLDNLLAQIGDQYADLFLAAKNLSDAILLSDILRVNTEITKAPLSASMIKRYDEHHQDLTLLKALVRQQLPEKYKEIFFDQSKNGYAGYIDGGASQEEFYKFIKPILEKMDGTEELLVKLNREDLLRKQRTFDNGSIPHQIHLGELHAILRRQEDFYPFLKDNREKIEKILTFRIPYYVGPLARGNSRFAWMTRKSEETITPWNFEEVVDKGASAQSFIERMTNFDKNLPNEKVLPKHSLLYEYFTVYNELTKVKYVTEGMRKPAFLSGEQKKAIVDLLFKTNRKVTVKQLKEDYFKKIECFDSVEISGVEDRFNASLGTYHDLLKIIKDKDFLDNEENEDILEDIVLTLTLFEDREMIEERLKTYAHLFDDKVMKQLKRRRYTGWGRLSRKLINGIRDKQSGKTILDFLKSDGFANRNFMQLIHDDSLTFKEDIQKAQVSGQGDSLHEHIANLAGSPAIKKGILQTVKVVDELVKVMGRHKPENIVIEMARENQTTQKGQKNSRERMKRIEEGIKELGSQILKEHPVENTQLQNEKLYLYYLQNGRDMYVDQELDINRLSDYDVDHIVPQSFLKDDSIDNKVLTRSDKARGKSDNVPSEEVVKKMKNYWRQLLNAKLITQRKFDNLTKAERGGLSELDKAGFIKRQLVETRQITKHVAQILDSRMNTKYDENDKLIREVKVITLKSKLVSDFRKDFQFYKVREINNYHHAHDAYLNAVVGTALIKKYPKLESEFVYGDYKVYDVRKMIAKSEQEIGKATAKYFFYSNIMNFFKTEITLANGEIRKRPLIETNGETGEIVWDKGRDFATVRKVLSMPQVNIVKKTEVQTGGFSKESILPKRNSDKLIARKKDWDPKKYGGFDSPTVAYSVLVVAKVEKGKSKKLKSVKELLGITIMERSSFEKNPIDFLEAKGYKEVKKDLIIKLPKYSLFELENGRKRMLASAGELQKGNELALPSKYVNFLYLASHYEKLKGSPEDNEQKQLFVEQHKHYLDEIIEQISEFSKRVILADANLDKVLSAYNKHRDKPIREQAENIIHLFTLTNLGAPAAFKYFDTTIDRKRYTSTKEVLDATLIHQSITGLYETRIDLSQLGGDGGSGSETPGTSESATPESGGTLGDQGSRGSDPLPEPRVTLTVEGIPTEFLVNTGAEHSVLTKPMGKMGSKRTVVAGATGSKVYPWTTKRLLKIGQKQVTHSFLVIPECPAPLLGRDLLTKLKAQIQFSTEGPQVTWEDRPAMCLVLNLEEEYRLHEKPVPPSIDPSWLQLFPMVWAEKAGMGLANQVPPVVVELKSDASPVAVRQYPMSKEAREGIRPHIQRFLDLGILVPCQSPWNTPLLPVKKPGTNDYRPVQDLREVNKRVQDIHPTVPNPYNLLSSLPPSHTWYSVLDLKDAFFCLKLHPNSQPLFAFEWRDPEKGNTGQLTWTRLPQGFKNSPTLFNEALHRDLASFRALNPQVVMLQYVDDLLVAAPTYRDCKEGTRRLLQELSKLGYRVSAKKAQLCREEVTYLGYLLKGGKRWLTPARKATVMKIPTPTTPRQVREFLGKAGFCRLFIPGFASLAAPLYPLTRPKVPFTWTEAHQEAFGRIKEALLSAPALALPDLTKPFALYVDEKEGVARGVLTQTLGPWRRPVAYLSKKLDPVASGWPTCLKAIAAVALLLKDADKLTLGQNVLVIAPHNLESIVRQPPDRWMTNARMTHYQSLLLNERVSFAPPAILNPATLLPVESDDTPIHICSEILAEETGTRPDLRDQPLPGVPAWYTDGSSFIMDGRRQAGAAIVDNKRTVWASNLPEGTSAQKAELIALTQALRLAEGKSINIYTDSRYAFATAHVHGAIYKQRGWLTSAGKDIKNKEEILALLEAIHLPKRVAIIHCPGHQRGTDPVATGNRKADEAAKQAAQSTRILTETTKNAGKRTADGSEFEKRTADGSEFESPKKKAKVE

SEQ ID NO: 1801 - protein, 2218 aa, synthetic construct
MPAAKRVKLDGGDKKYSIGLDIGTNSVGWAVITDEYKVPSKKFKVLGNTDRHSIKKNLIGALLFDSGETAEATRLKRTARRRYTRRKNRICYLQEIFSNEMAKVDDSFFHRLEESFLVEEDKKHERHPIFGNIVDEVAYHEKYPTIYHLRKKLVDSTDKADLRLIYLALAHMIKFRGHFLIEGDLNPDNSDVDKLFIQLVQTYNQLFEENPINASGVDAKAILSARLSKSRRLENLIAQLPGEKKNGLFGNLIALSLGLTPNFKSNFDLAEDAKLQLSKDTYDDDLDNLLAQIGDQYADLFLAAKNLSDAILLSDILRVNTEITKAPLSASMIKRYDEHHQDLTLLKALVRQQLPEKYKEIFFDQSKNGYAGYIDGGASQEEFYKFIKPILEKMDGTEELLVKLNREDLLRKQRTFDNGSIPHQIHLGELHAILRRQEDFYPFLKDNREKIEKILTFRIPYYVGPLARGNSRFAWMTRKSEETITPWNFEEVVDKGASAQSFIERMTNFDKNLPNEKVLPKHSLLYEYFTVYNELTKVKYVTEGMRKPAFLSGEQKKAIVDLLFKTNRKVTVKQLKEDYFKKIECFDSVEISGVEDRFNASLGTYHDLLKIIKDKDFLDNEENEDILEDIVLTLTLFEDREMIEERLKTYAHLFDDKVMKQLKRRRYTGWGRLSRKLINGIRDKQSGKTILDFLKSDGFANRNFMQLIHDDSLTFKEDIQKAQVSGQGDSLHEHIANLAGSPAIKKGILQTVKVVDELVKVMGRHKPENIVIEMARENQTTQKGQKNSRERMKRIEEGIKELGSQILKEHPVENTQLQNEKLYLYYLQNGRDMYVDQELDINRLSDYDVDHIVPQSFLKDDSIDNKVLTRSDKARGKSDNVPSEEVVKKMKNYWRQLLNAKLITQRKFDNLTKAERGGLSELDKAGFIKRQLVETRQITKHVAQILDSRMNTKYDENDKLIREVKVITLKSKLVSDFRKDFQFYKVREINNYHHAHDAYLNAVVGTALIKKYPKLESEFVYGDYKVYDVRKMIAKSEQEIGKATAKYFFYSNIMNFFKTEITLANGEIRKRPLIETNGETGEIVWDKGRDFATVRKVLSMPQVNIVKKTEVQTGGFSKESILPKRNSDKLIARKKDWDPKKYGGFDSPTVAYSVLVVAKVEKGKSKKLKSVKELLGITIMERSSFEKNPIDFLEAKGYKEVKKDLIIKLPKYSLFELENGRKRMLASAGELQKGNELALPSKYVNFLYLASHYEKLKGSPEDNEQKQLFVEQHKHYLDEIIEQISEFSKRVILADANLDKVLSAYNKHRDKPIREQAENIIHLFTLTNLGAPAAFKYFDTTIDRKRYTSTKEVLDATLIHQSITGLYETRIDLSQLGGDGGGSSGGSEAAAKGGTLGDQGSRGSDPLPEPRVTLTVEGIPTEFLVNTGAEHSVLTKPMGKMGSKRTVVAGATGSKVYPWTTKRLLKIGQKQVTHSFLVIPECPAPLLGRDLLTKLKAQIQFSTEGPQVTWEDRPAMCLVLNLEEEYRLHEKPVPPSIDPSWLQLFPMVWAEKAGMGLANQVPPVVVELKSDASPVAVRQYPMSKEAREGIRPHIQRFLDLGILVPCQSPWNTPLLPVKKPGTNDYRPVQDLREVNKRVQDIHPTVPNPYNLLSSLPPSHTWYSVLDLKDAFFCLKLHPNSQPLFAFEWRDPEKGNTGQLTWTRLPQGFKNSPTLFNEALHRDLASFRALNPQVVMLQYVDDLLVAAPTYRDCKEGTRRLLQELSKLGYRVSAKKAQLCREEVTYLGYLLKGGKRWLTPARKATVMKIPTPTTPRQVREFLGKAGFCRLFIPGFASLAAPLYPLTRPKVPFTWTEAHQEAFGRIKEALLSAPALALPDLTKPFALYVDEKEGVARGVLTQTLGPWRRPVAYLSKKLDPVASGWPTCLKAIAAVALLLKDADKLTLGQNVLVIAPHNLESIVRQPPDRWMTNARMTHYQSLLLNERVSFAPPAILNPATLLPVESDDTPIHICSEILAEETGTRPDLRDQPLPGVPAWYTDGSSFIMDGRRQAGAAIVDNKRTVWASNLPEGTSAQKAELIALTQALRLAEGKSINIYTDSRYAFATAHVHGAIYKQRGWLTSAGKDIKNKEEILALLEAIHLPKRVAIIHCPGHQRGTDPVATGNRKADEAAKQAAQSTRILTETTKNAGKRTADGSEFEKRTADGSEFESPKKKAKVE

SEQ ID NO: 1802 - protein, 2216 aa, synthetic construct
MPAAKRVKLDGGDKKYSIGLDIGTNSVGWAVITDEYKVPSKKFKVLGNTDRHSIKKNLIGALLFDSGETAEATRLKRTARRRYTRRKNRICYLQEIFSNEMAKVDDSFFHRLEESFLVEEDKKHERHPIFGNIVDEVAYHEKYPTIYHLRKKLVDSTDKADLRLIYLALAHMIKFRGHFLIEGDLNPDNSDVDKLFIQLVQTYNQLFEENPINASGVDAKAILSARLSKSRRLENLIAQLPGEKKNGLFGNLIALSLGLTPNFKSNFDLAEDAKLQLSKDTYDDDLDNLLAQIGDQYADLFLAAKNLSDAILLSDILRVNTEITKAPLSASMIKRYDEHHQDLTLLKALVRQQLPEKYKEIFFDQSKNGYAGYIDGGASQEEFYKFIKPILEKMDGTEELLVKLNREDLLRKQRTFDNGSIPHQIHLGELHAILRRQEDFYPFLKDNREKIEKILTFRIPYYVGPLARGNSRFAWMTRKSEETITPWNFEEVVDKGASAQSFIERMTNFDKNLPNEKVLPKHSLLYEYFTVYNELTKVKYVTEGMRKPAFLSGEQKKAIVDLLFKTNRKVTVKQLKEDYFKKIECFDSVEISGVEDRFNASLGTYHDLLKIIKDKDFLDNEENEDILEDIVLTLTLFEDREMIEERLKTYAHLFDDKVMKQLKRRRYTGWGRLSRKLINGIRDKQSGKTILDFLKSDGFANRNFMQLIHDDSLTFKEDIQKAQVSGQGDSLHEHIANLAGSPAIKKGILQTVKVVDELVKVMGRHKPENIVIEMARENQTTQKGQKNSRERMKRIEEGIKELGSQILKEHPVENTQLQNEKLYLYYLQNGRDMYVDQELDINRLSDYDVDHIVPQSFLKDDSIDNKVLTRSDKARGKSDNVPSEEVVKKMKNYWRQLLNAKLITQRKFDNLTKAERGGLSELDKAGFIKRQLVETRQITKHVAQILDSRMNTKYDENDKLIREVKVITLKSKLVSDFRKDFQFYKVREINNYHHAHDAYLNAVVGTALIKKYPKLESEFVYGDYKVYDVRKMIAKSEQEIGKATAKYFFYSNIMNFFKTEITLANGEIRKRPLIETNGETGEIVWDKGRDFATVRKVLSMPQVNIVKKTEVQTGGFSKESILPKRNSDKLIARKKDWDPKKYGGFDSPTVAYSVLVVAKVEKGKSKKLKSVKELLGITIMERSSFEKNPIDFLEAKGYKEVKKDLIIKLPKYSLFELENGRKRMLASAGELQKGNELALPSKYVNFLYLASHYEKLKGSPEDNEQKQLFVEQHKHYLDEIIEQISEFSKRVILADANLDKVLSAYNKHRDKPIREQAENIIHLFTLTNLGAPAAFKYFDTTIDRKRYTSTKEVLDATLIHQSITGLYETRIDLSQLGGDGGGGSPAPGSSGGTLGDQGSRGSDPLPEPRVTLTVEGIPTEFLVNTGAEHSVLTKPMGKMGSKRTVVAGATGSKVYPWTTKRLLKIGQKQVTHSFLVIPECPAPLLGRDLLTKLKAQIQFSTEGPQVTWEDRPAMCLVLNLEEEYRLHEKPVPPSIDPSWLQLFPMVWAEKAGMGLANQVPPVVVELKSDASPVAVRQYPMSKEAREGIRPHIQRFLDLGILVPCQSPWNTPLLPVKKPGTNDYRPVQDLREVNKRVQDIHPTVPNPYNLLSSLPPSHTWYSVLDLKDAFFCLKLHPNSQPLFAFEWRDPEKGNTGQLTWTRLPQGFKNSPTLFNEALHRDLASFRALNPQVVMLQYVDDLLVAAPTYRDCKEGTRRLLQELSKLGYRVSAKKAQLCREEVTYLGYLLKGGKRWLTPARKATVMKIPTPTTPRQVREFLGKAGFCRLFIPGFASLAAPLYPLTRPKVPFTWTEAHQEAFGRIKEALLSAPALALPDLTKPFALYVDEKEGVARGVLTQTLGPWRRPVAYLSKKLDPVASGWPTCLKAIAAVALLLKDADKLTLGQNVLVIAPHNLESIVRQPPDRWMTNARMTHYQSLLLNERVSFAPPAILNPATLLPVESDDTPIHICSEILAEETGTRPDLRDQPLPGVPAWYTDGSSFIMDGRRQAGAAIVDNKRTVWASNLPEGTSAQKAELIALTQALRLAEGKSINIYTDSRYAFATAHVHGAIYKQRGWLTSAGKDIKNKEEILALLEAIHLPKRVAIIHCPGHQRGTDPVATGNRKADEAAKQAAQSTRILTETTKNAGKRTADGSEFEKRTADGSEFESPKKKAKVE

SEQ ID NO: 1803 - protein, 2237 aa, synthetic construct
MPAAKRVKLDGGDKKYSIGLDIGTNSVGWAVITDEYKVPSKKFKVLGNTDRHSIKKNLIGALLFDSGETAEATRLKRTARRRYTRRKNRICYLQEIFSNEMAKVDDSFFHRLEESFLVEEDKKHERHPIFGNIVDEVAYHEKYPTIYHLRKKLVDSTDKADLRLIYLALAHMIKFRGHFLIEGDLNPDNSDVDKLFIQLVQTYNQLFEENPINASGVDAKAILSARLSKSRRLENLIAQLPGEKKNGLFGNLIALSLGLTPNFKSNFDLAEDAKLQLSKDTYDDDLDNLLAQIGDQYADLFLAAKNLSDAILLSDILRVNTEITKAPLSASMIKRYDEHHQDLTLLKALVRQQLPEKYKEIFFDQSKNGYAGYIDGGASQEEFYKFIKPILEKMDGTEELLVKLNREDLLRKQRTFDNGSIPHQIHLGELHAILRRQEDFYPFLKDNREKIEKILTFRIPYYVGPLARGNSRFAWMTRKSEETITPWNFEEVVDKGASAQSFIERMTNFDKNLPNEKVLPKHSLLYEYFTVYNELTKVKYVTEGMRKPAFLSGEQKKAIVDLLFKTNRKVTVKQLKEDYFKKIECFDSVEISGVEDRFNASLGTYHDLLKIIKDKDFLDNEENEDILEDIVLTLTLFEDREMIEERLKTYAHLFDDKVMKQLKRRRYTGWGRLSRKLINGIRDKQSGKTILDFLKSDGFANRNFMQLIHDDSLTFKEDIQKAQVSGQGDSLHEHIANLAGSPAIKKGILQTVKVVDELVKVMGRHKPENIVIEMARENQTTQKGQKNSRERMKRIEEGIKELGSQILKEHPVENTQLQNEKLYLYYLQNGRDMYVDQELDINRLSDYDVDHIVPQSFLKDDSIDNKVLTRSDKARGKSDNVPSEEVVKKMKNYWRQLLNAKLITQRKFDNLTKAERGGLSELDKAGFIKRQLVETRQITKHVAQILDSRMNTKYDENDKLIREVKVITLKSKLVSDFRKDFQFYKVREINNYHHAHDAYLNAVVGTALIKKYPKLESEFVYGDYKVYDVRKMIAKSEQEIGKATAKYFFYSNIMNFFKTEITLANGEIRKRPLIETNGETGEIVWDKGRDFATVRKVLSMPQVNIVKKTEVQTGGFSKESILPKRNSDKLIARKKDWDPKKYGGFDSPTVAYSVLVVAKVEKGKSKKLKSVKELLGITIMERSSFEKNPIDFLEAKGYKEVKKDLIIKLPKYSLFELENGRKRMLASAGELQKGNELALPSKYVNFLYLASHYEKLKGSPEDNEQKQLFVEQHKHYLDEIIEQISEFSKRVILADANLDKVLSAYNKHRDKPIREQAENIIHLFTLTNLGAPAAFKYFDTTIDRKRYTSTKEVLDATLIHQSITGLYETRIDLSQLGGDGGGGGGSGGGGSGGGGSGGGGSGGGGSGGGGSGGTLGDQGSRGSDPLPEPRVTLTVEGIPTEFLVNTGAEHSVLTKPMGKMGSKRTVVAGATGSKVYPWTTKRLLKIGQKQVTHSFLVIPECPAPLLGRDLLTKLKAQIQFSTEGPQVTWEDRPAMCLVLNLEEEYRLHEKPVPPSIDPSWLQLFPMVWAEKAGMGLANQVPPVVVELKSDASPVAVRQYPMSKEAREGIRPHIQRFLDLGILVPCQSPWNTPLLPVKKPGTNDYRPVQDLREVNKRVQDIHPTVPNPYNLLSSLPPSHTWYSVLDLKDAFFCLKLHPNSQPLFAFEWRDPEKGNTGQLTWTRLPQGFKNSPTLFNEALHRDLASFRALNPQVVMLQYVDDLLVAAPTYRDCKEGTRRLLQELSKLGYRVSAKKAQLCREEVTYLGYLLKGGKRWLTPARKATVMKIPTPTTPRQVREFLGKAGFCRLFIPGFASLAAPLYPLTRPKVPFTWTEAHQEAFGRIKEALLSAPALALPDLTKPFALYVDEKEGVARGVLTQTLGPWRRPVAYLSKKLDPVASGWPTCLKAIAAVALLLKDADKLTLGQNVLVIAPHNLESIVRQPPDRWMTNARMTHYQSLLLNERVSFAPPAILNPATLLPVESDDTPIHICSEILAEETGTRPDLRDQPLPGVPAWYTDGSSFIMDGRRQAGAAIVDNKRTVWASNLPEGTSAQKAELIALTQALRLAEGKSINIYTDSRYAFATAHVHGAIYKQRGWLTSAGKDIKNKEEILALLEAIHLPKRVAIIHCPGHQRGTDPVATGNRKADEAAKQAAQSTRILTETTKNAGKRTADGSEFEKRTADGSEFESPKKKAKVE

SEQ ID NO: 1804 - protein, 2218 aa, synthetic construct
MPAAKRVKLDGGDKKYSIGLDIGTNSVGWAVITDEYKVPSKKFKVLGNTDRHSIKKNLIGALLFDSGETAEATRLKRTARRRYTRRKNRICYLQEIFSNEMAKVDDSFFHRLEESFLVEEDKKHERHPIFGNIVDEVAYHEKYPTIYHLRKKLVDSTDKADLRLIYLALAHMIKFRGHFLIEGDLNPDNSDVDKLFIQLVQTYNQLFEENPINASGVDAKAILSARLSKSRRLENLIAQLPGEKKNGLFGNLIALSLGLTPNFKSNFDLAEDAKLQLSKDTYDDDLDNLLAQIGDQYADLFLAAKNLSDAILLSDILRVNTEITKAPLSASMIKRYDEHHQDLTLLKALVRQQLPEKYKEIFFDQSKNGYAGYIDGGASQEEFYKFIKPILEKMDGTEELLVKLNREDLLRKQRTFDNGSIPHQIHLGELHAILRRQEDFYPFLKDNREKIEKILTFRIPYYVGPLARGNSRFAWMTRKSEETITPWNFEEVVDKGASAQSFIERMTNFDKNLPNEKVLPKHSLLYEYFTVYNELTKVKYVTEGMRKPAFLSGEQKKAIVDLLFKTNRKVTVKQLKEDYFKKIECFDSVEISGVEDRFNASLGTYHDLLKIIKDKDFLDNEENEDILEDIVLTLTLFEDREMIEERLKTYAHLFDDKVMKQLKRRRYTGWGRLSRKLINGIRDKQSGKTILDFLKSDGFANRNFMQLIHDDSLTFKEDIQKAQVSGQGDSLHEHIANLAGSPAIKKGILQTVKVVDELVKVMGRHKPENIVIEMARENQTTQKGQKNSRERMKRIEEGIKELGSQILKEHPVENTQLQNEKLYLYYLQNGRDMYVDQELDINRLSDYDVDHIVPQSFLKDDSIDNKVLTRSDKARGKSDNVPSEEVVKKMKNYWRQLLNAKLITQRKFDNLTKAERGGLSELDKAGFIKRQLVETRQITKHVAQILDSRMNTKYDENDKLIREVKVITLKSKLVSDFRKDFQFYKVREINNYHHAHDAYLNAVVGTALIKKYPKLESEFVYGDYKVYDVRKMIAKSEQEIGKATAKYFFYSNIMNFFKTEITLANGEIRKRPLIETNGETGEIVWDKGRDFATVRKVLSMPQVNIVKKTEVQTGGFSKESILPKRNSDKLIARKKDWDPKKYGGFDSPTVAYSVLVVAKVEKGKSKKLKSVKELLGITIMERSSFEKNPIDFLEAKGYKEVKKDLIIKLPKYSLFELENGRKRMLASAGELQKGNELALPSKYVNFLYLASHYEKLKGSPEDNEQKQLFVEQHKHYLDEIIEQISEFSKRVILADANLDKVLSAYNKHRDKPIREQAENIIHLFTLTNLGAPAAFKYFDTTIDRKRYTSTKEVLDATLIHQSITGLYETRIDLSQLGGDGGEAAAKGSSPAPGGTLGDQGSRGSDPLPEPRVTLTVEGIPTEFLVNTGAEHSVLTKPMGKMGSKRTVVAGATGSKVYPWTTKRLLKIGQKQVTHSFLVIPECPAPLLGRDLLTKLKAQIQFSTEGPQVTWEDRPAMCLVLNLEEEYRLHEKPVPPSIDPSWLQLFPMVWAEKAGMGLANQVPPVVVELKSDASPVAVRQYPMSKEAREGIRPHIQRFLDLGILVPCQSPWNTPLLPVKKPGTNDYRPVQDLREVNKRVQDIHPTVPNPYNLLSSLPPSHTWYSVLDLKDAFFCLKLHPNSQPLFAFEWRDPEKGNTGQLTWTRLPQGFKNSPTLFNEALHRDLASFRALNPQVVMLQYVDDLLVAAPTYRDCKEGTRRLLQELSKLGYRVSAKKAQLCREEVTYLGYLLKGGKRWLTPARKATVMKIPTPTTPRQVREFLGKAGFCRLFIPGFASLAAPLYPLTRPKVPFTWTEAHQEAFGRIKEALLSAPALALPDLTKPFALYVDEKEGVARGVLTQTLGPWRRPVAYLSKKLDPVASGWPTCLKAIAAVALLLKDADKLTLGQNVLVIAPHNLESIVRQPPDRWMTNARMTHYQSLLLNERVSFAPPAILNPATLLPVESDDTPIHICSEILAEETGTRPDLRDQPLPGVPAWYTDGSSFIMDGRRQAGAAIVDNKRTVWASNLPEGTSAQKAELIALTQALRLAEGKSINIYTDSRYAFATAHVHGAIYKQRGWLTSAGKDIKNKEEILALLEAIHLPKRVAIIHCPGHQRGTDPVATGNRKADEAAKQAAQSTRILTETTKNAGKRTADGSEFEKRTADGSEFESPKKKAKVE

SEQ ID NO: 1805 - protein, 2218 aa, synthetic construct
MPAAKRVKLDGGDKKYSIGLDIGTNSVGWAVITDEYKVPSKKFKVLGNTDRHSIKKNLIGALLFDSGETAEATRLKRTARRRYTRRKNRICYLQEIFSNEMAKVDDSFFHRLEESFLVEEDKKHERHPIFGNIVDEVAYHEKYPTIYHLRKKLVDSTDKADLRLIYLALAHMIKFRGHFLIEGDLNPDNSDVDKLFIQLVQTYNQLFEENPINASGVDAKAILSARLSKSRRLENLIAQLPGEKKNGLFGNLIALSLGLTPNFKSNFDLAEDAKLQLSKDTYDDDLDNLLAQIGDQYADLFLAAKNLSDAILLSDILRVNTEITKAPLSASMIKRYDEHHQDLTLLKALVRQQLPEKYKEIFFDQSKNGYAGYIDGGASQEEFYKFIKPILEKMDGTEELLVKLNREDLLRKQRTFDNGSIPHQIHLGELHAILRRQEDFYPFLKDNREKIEKILTFRIPYYVGPLARGNSRFAWMTRKSEETITPWNFEEVVDKGASAQSFIERMTNFDKNLPNEKVLPKHSLLYEYFTVYNELTKVKYVTEGMRKPAFLSGEQKKAIVDLLFKTNRKVTVKQLKEDYFKKIECFDSVEISGVEDRFNASLGTYHDLLKIIKDKDFLDNEENEDILEDIVLTLTLFEDREMIEERLKTYAHLFDDKVMKQLKRRRYTGWGRLSRKLINGIRDKQSGKTILDFLKSDGFANRNFMQLIHDDSLTFKEDIQKAQVSGQGDSLHEHIANLAGSPAIKKGILQTVKVVDELVKVMGRHKPENIVIEMARENQTTQKGQKNSRERMKRIEEGIKELGSQILKEHPVENTQLQNEKLYLYYLQNGRDMYVDQELDINRLSDYDVDHIVPQSFLKDDSIDNKVLTRSDKARGKSDNVPSEEVVKKMKNYWRQLLNAKLITQRKFDNLTKAERGGLSELDKAGFIKRQLVETRQITKHVAQILDSRMNTKYDENDKLIREVKVITLKSKLVSDFRKDFQFYKVREINNYHHAHDAYLNAVVGTALIKKYPKLESEFVYGDYKVYDVRKMIAKSEQEIGKATAKYFFYSNIMNFFKTEITLANGEIRKRPLIETNGETGEIVWDKGRDFATVRKVLSMPQVNIVKKTEVQTGGFSKESILPKRNSDKLIARKKDWDPKKYGGFDSPTVAYSVLVVAKVEKGKSKKLKSVKELLGITIMERSSFEKNPIDFLEAKGYKEVKKDLIIKLPKYSLFELENGRKRMLASAGELQKGNELALPSKYVNFLYLASHYEKLKGSPEDNEQKQLFVEQHKHYLDEIIEQISEFSKRVILADANLDKVLSAYNKHRDKPIREQAENIIHLFTLTNLGAPAAFKYFDTTIDRKRYTSTKEVLDATLIHQSITGLYETRIDLSQLGGDGGGGSGSSEAAAKGGTLGDQGSRGSDPLPEPRVTLTVEGIPTEFLVNTGAEHSVLTKPMGKMGSKRTVVAGATGSKVYPWTTKRLLKIGQKQVTHSFLVIPECPAPLLGRDLLTKLKAQIQFSTEGPQVTWEDRPAMCLVLNLEEEYRLHEKPVPPSIDPSWLQLFPMVWAEKAGMGLANQVPPVVVELKSDASPVAVRQYPMSKEAREGIRPHIQRFLDLGILVPCQSPWNTPLLPVKKPGTNDYRPVQDLREVNKRVQDIHPTVPNPYNLLSSLPPSHTWYSVLDLKDAFFCLKLHPNSQPLFAFEWRDPEKGNTGQLTWTRLPQGFKNSPTLFNEALHRDLASFRALNPQVVMLQYVDDLLVAAPTYRDCKEGTRRLLQELSKLGYRVSAKKAQLCREEVTYLGYLLKGGKRWLTPARKATVMKIPTPTTPRQVREFLGKAGFCRLFIPGFASLAAPLYPLTRPKVPFTWTEAHQEAFGRIKEALLSAPALALPDLTKPFALYVDEKEGVARGVLTQTLGPWRRPVAYLSKKLDPVASGWPTCLKAIAAVALLLKDADKLTLGQNVLVIAPHNLESIVRQPPDRWMTNARMTHYQSLLLNERVSFAPPAILNPATLLPVESDDTPIHICSEILAEETGTRPDLRDQPLPGVPAWYTDGSSFIMDGRRQAGAAIVDNKRTVWASNLPEGTSAQKAELIALTQALRLAEGKSINIYTDSRYAFATAHVHGAIYKQRGWLTSAGKDIKNKEEILALLEAIHLPKRVAIIHCPGHQRGTDPVATGNRKADEAAKQAAQSTRILTETTKNAGKRTADGSEFEKRTADGSEFESPKKKAKVE

SEQ ID NO: 1806 - protein, 2216 aa, synthetic construct
MPAAKRVKLDGGDKKYSIGLDIGTNSVGWAVITDEYKVPSKKFKVLGNTDRHSIKKNLIGALLFDSGETAEATRLKRTARRRYTRRKNRICYLQEIFSNEMAKVDDSFFHRLEESFLVEEDKKHERHPIFGNIVDEVAYHEKYPTIYHLRKKLVDSTDKADLRLIYLALAHMIKFRGHFLIEGDLNPDNSDVDKLFIQLVQTYNQLFEENPINASGVDAKAILSARLSKSRRLENLIAQLPGEKKNGLFGNLIALSLGLTPNFKSNFDLAEDAKLQLSKDTYDDDLDNLLAQIGDQYADLFLAAKNLSDAILLSDILRVNTEITKAPLSASMIKRYDEHHQDLTLLKALVRQQLPEKYKEIFFDQSKNGYAGYIDGGASQEEFYKFIKPILEKMDGTEELLVKLNREDLLRKQRTFDNGSIPHQIHLGELHAILRRQEDFYPFLKDNREKIEKILTFRIPYYVGPLARGNSRFAWMTRKSEETITPWNFEEVVDKGASAQSFIERMTNFDKNLPNEKVLPKHSLLYEYFTVYNELTKVKYVTEGMRKPAFLSGEQKKAIVDLLFKTNRKVTVKQLKEDYFKKIECFDSVEISGVEDRFNASLGTYHDLLKIIKDKDFLDNEENEDILEDIVLTLTLFEDREMIEERLKTYAHLFDDKVMKQLKRRRYTGWGRLSRKLINGIRDKQSGKTILDFLKSDGFANRNFMQLIHDDSLTFKEDIQKAQVSGQGDSLHEHIANLAGSPAIKKGILQTVKVVDELVKVMGRHKPENIVIEMARENQTTQKGQKNSRERMKRIEEGIKELGSQILKEHPVENTQLQNEKLYLYYLQNGRDMYVDQELDINRLSDYDVDHIVPQSFLKDDSIDNKVLTRSDKARGKSDNVPSEEVVKKMKNYWRQLLNAKLITQRKFDNLTKAERGGLSELDKAGFIKRQLVETRQITKHVAQILDSRMNTKYDENDKLIREVKVITLKSKLVSDFRKDFQFYKVREINNYHHAHDAYLNAVVGTALIKKYPKLESEFVYGDYKVYDVRKMIAKSEQEIGKATAKYFFYSNIMNFFKTEITLANGEIRKRPLIETNGETGEIVWDKGRDFATVRKVLSMPQVNIVKKTEVQTGGFSKESILPKRNSDKLIARKKDWDPKKYGGFDSPTVAYSVLVVAKVEKGKSKKLKSVKELLGITIMERSSFEKNPIDFLEAKGYKEVKKDLIIKLPKYSLFELENGRKRMLASAGELQKGNELALPSKYVNFLYLASHYEKLKGSPEDNEQKQLFVEQHKHYLDEIIEQISEFSKRVILADANLDKVLSAYNKHRDKPIREQAENIIHLFTLTNLGAPAAFKYFDTTIDRKRYTSTKEVLDATLIHQSITGLYETRIDLSQLGGDGGPAPGSSGGGGGTLGDQGSRGSDPLPEPRVTLTVEGIPTEFLVNTGAEHSVLTKPMGKMGSKRTVVAGATGSKVYPWTTKRLLKIGQKQVTHSFLVIPECPAPLLGRDLLTKLKAQIQFSTEGPQVTWEDRPAMCLVLNLEEEYRLHEKPVPPSIDPSWLQLFPMVWAEKAGMGLANQVPPVVVELKSDASPVAVRQYPMSKEAREGIRPHIQRFLDLGILVPCQSPWNTPLLPVKKPGTNDYRPVQDLREVNKRVQDIHPTVPNPYNLLSSLPPSHTWYSVLDLKDAFFCLKLHPNSQPLFAFEWRDPEKGNTGQLTWTRLPQGFKNSPTLFNEALHRDLASFRALNPQVVMLQYVDDLLVAAPTYRDCKEGTRRLLQELSKLGYRVSAKKAQLCREEVTYLGYLLKGGKRWLTPARKATVMKIPTPTTPRQVREFLGKAGFCRLFIPGFASLAAPLYPLTRPKVPFTWTEAHQEAFGRIKEALLSAPALALPDLTKPFALYVDEKEGVARGVLTQTLGPWRRPVAYLSKKLDPVASGWPTCLKAIAAVALLLKDADKLTLGQNVLVIAPHNLESIVRQPPDRWMTNARMTHYQSLLLNERVSFAPPAILNPATLLPVESDDTPIHICSEILAEETGTRPDLRDQPLPGVPAWYTDGSSFIMDGRRQAGAAIVDNKRTVWASNLPEGTSAQKAELIALTQALRLAEGKSINIYTDSRYAFATAHVHGAIYKQRGWLTSAGKDIKNKEEILALLEAIHLPKRVAIIHCPGHQRGTDPVATGNRKADEAAKQAAQSTRILTETTKNAGKRTADGSEFEKRTADGSEFESPKKKAKVE

SEQ ID NO: 1807 - protein, 2213 aa, synthetic construct
MPAAKRVKLDGGDKKYSIGLDIGTNSVGWAVITDEYKVPSKKFKVLGNTDRHSIKKNLIGALLFDSGETAEATRLKRTARRRYTRRKNRICYLQEIFSNEMAKVDDSFFHRLEESFLVEEDKKHERHPIFGNIVDEVAYHEKYPTIYHLRKKLVDSTDKADLRLIYLALAHMIKFRGHFLIEGDLNPDNSDVDKLFIQLVQTYNQLFEENPINASGVDAKAILSARLSKSRRLENLIAQLPGEKKNGLFGNLIALSLGLTPNFKSNFDLAEDAKLQLSKDTYDDDLDNLLAQIGDQYADLFLAAKNLSDAILLSDILRVNTEITKAPLSASMIKRYDEHHQDLTLLKALVRQQLPEKYKEIFFDQSKNGYAGYIDGGASQEEFYKFIKPILEKMDGTEELLVKLNREDLLRKQRTFDNGSIPHQIHLGELHAILRRQEDFYPFLKDNREKIEKILTFRIPYYVGPLARGNSRFAWMTRKSEETITPWNFEEVVDKGASAQSFIERMTNFDKNLPNEKVLPKHSLLYEYFTVYNELTKVKYVTEGMRKPAFLSGEQKKAIVDLLFKTNRKVTVKQLKEDYFKKIECFDSVEISGVEDRFNASLGTYHDLLKIIKDKDFLDNEENEDILEDIVLTLTLFEDREMIEERLKTYAHLFDDKVMKQLKRRRYTGWGRLSRKLINGIRDKQSGKTILDFLKSDGFANRNFMQLIHDDSLTFKEDIQKAQVSGQGDSLHEHIANLAGSPAIKKGILQTVKVVDELVKVMGRHKPENIVIEMARENQTTQKGQKNSRERMKRIEEGIKELGSQILKEHPVENTQLQNEKLYLYYLQNGRDMYVDQELDINRLSDYDVDHIVPQSFLKDDSIDNKVLTRSDKARGKSDNVPSEEVVKKMKNYWRQLLNAKLITQRKFDNLTKAERGGLSELDKAGFIKRQLVETRQITKHVAQILDSRMNTKYDENDKLIREVKVITLKSKLVSDFRKDFQFYKVREINNYHHAHDAYLNAVVGTALIKKYPKLESEFVYGDYKVYDVRKMIAKSEQEIGKATAKYFFYSNIMNFFKTEITLANGEIRKRPLIETNGETGEIVWDKGRDFATVRKVLSMPQVNIVKKTEVQTGGFSKESILPKRNSDKLIARKKDWDPKKYGGFDSPTVAYSVLVVAKVEKGKSKKLKSVKELLGITIMERSSFEKNPIDFLEAKGYKEVKKDLIIKLPKYSLFELENGRKRMLASAGELQKGNELALPSKYVNFLYLASHYEKLKGSPEDNEQKQLFVEQHKHYLDEIIEQISEFSKRVILADANLDKVLSAYNKHRDKPIREQAENIIHLFTLTNLGAPAAFKYFDTTIDRKRYTSTKEVLDATLIHQSITGLYETRIDLSQLGGDGGGGGPAPGGTLGDQGSRGSDPLPEPRVTLTVEGIPTEFLVNTGAEHSVLTKPMGKMGSKRTVVAGATGSKVYPWTTKRLLKIGQKQVTHSFLVIPECPAPLLGRDLLTKLKAQIQFSTEGPQVTWEDRPAMCLVLNLEEEYRLHEKPVPPSIDPSWLQLFPMVWAEKAGMGLANQVPPVVVELKSDASPVAVRQYPMSKEAREGIRPHIQRFLDLGILVPCQSPWNTPLLPVKKPGTNDYRPVQDLREVNKRVQDIHPTVPNPYNLLSSLPPSHTWYSVLDLKDAFFCLKLHPNSQPLFAFEWRDPEKGNTGQLTWTRLPQGFKNSPTLFNEALHRDLASFRALNPQVVMLQYVDDLLVAAPTYRDCKEGTRRLLQELSKLGYRVSAKKAQLCREEVTYLGYLLKGGKRWLTPARKATVMKIPTPTTPRQVREFLGKAGFCRLFIPGFASLAAPLYPLTRPKVPFTWTEAHQEAFGRIKEALLSAPALALPDLTKPFALYVDEKEGVARGVLTQTLGPWRRPVAYLSKKLDPVASGWPTCLKAIAAVALLLKDADKLTLGQNVLVIAPHNLESIVRQPPDRWMTNARMTHYQSLLLNERVSFAPPAILNPATLLPVESDDTPIHICSEILAEETGTRPDLRDQPLPGVPAWYTDGSSFIMDGRRQAGAAIVDNKRTVWASNLPEGTSAQKAELIALTQALRLAEGKSINIYTDSRYAFATAHVHGAIYKQRGWLTSAGKDIKNKEEILALLEAIHLPKRVAIIHCPGHQRGTDPVATGNRKADEAAKQAAQSTRILTETTKNAGKRTADGSEFEKRTADGSEFESPKKKAKVE

SEQ ID NO: 1808 - protein, 2213 aa, synthetic construct
MPAAKRVKLDGGDKKYSIGLDIGTNSVGWAVITDEYKVPSKKFKVLGNTDRHSIKKNLIGALLFDSGETAEATRLKRTARRRYTRRKNRICYLQEIFSNEMAKVDDSFFHRLEESFLVEEDKKHERHPIFGNIVDEVAYHEKYPTIYHLRKKLVDSTDKADLRLIYLALAHMIKFRGHFLIEGDLNPDNSDVDKLFIQLVQTYNQLFEENPINASGVDAKAILSARLSKSRRLENLIAQLPGEKKNGLFGNLIALSLGLTPNFKSNFDLAEDAKLQLSKDTYDDDLDNLLAQIGDQYADLFLAAKNLSDAILLSDILRVNTEITKAPLSASMIKRYDEHHQDLTLLKALVRQQLPEKYKEIFFDQSKNGYAGYIDGGASQEEFYKFIKPILEKMDGTEELLVKLNREDLLRKQRTFDNGSIPHQIHLGELHAILRRQEDFYPFLKDNREKIEKILTFRIPYYVGPLARGNSRFAWMTRKSEETITPWNFEEVVDKGASAQSFIERMTNFDKNLPNEKVLPKHSLLYEYFTVYNELTKVKYVTEGMRKPAFLSGEQKKAIVDLLFKTNRKVTVKQLKEDYFKKIECFDSVEISGVEDRFNASLGTYHDLLKIIKDKDFLDNEENEDILEDIVLTLTLFEDREMIEERLKTYAHLFDDKVMKQLKRRRYTGWGRLSRKLINGIRDKQSGKTILDFLKSDGFANRNFMQLIHDDSLTFKEDIQKAQVSGQGDSLHEHIANLAGSPAIKKGILQTVKVVDELVKVMGRHKPENIVIEMARENQTTQKGQKNSRERMKRIEEGIKELGSQILKEHPVENTQLQNEKLYLYYLQNGRDMYVDQELDINRLSDYDVDHIVPQSFLKDDSIDNKVLTRSDKARGKSDNVPSEEVVKKMKNYWRQLLNAKLITQRKFDNLTKAERGGLSELDKAGFIKRQLVETRQITKHVAQILDSRMNTKYDENDKLIREVKVITLKSKLVSDFRKDFQFYKVREINNYHHAHDAYLNAVVGTALIKKYPKLESEFVYGDYKVYDVRKMIAKSEQEIGKATAKYFFYSNIMNFFKTEITLANGEIRKRPLIETNGETGEIVWDKGRDFATVRKVLSMPQVNIVKKTEVQTGGFSKESILPKRNSDKLIARKKDWDPKKYGGFDSPTVAYSVLVVAKVEKGKSKKLKSVKELLGITIMERSSFEKNPIDFLEAKGYKEVKKDLIIKLPKYSLFELENGRKRMLASAGELQKGNELALPSKYVNFLYLASHYEKLKGSPEDNEQKQLFVEQHKHYLDEIIEQISEFSKRVILADANLDKVLSAYNKHRDKPIREQAENIIHLFTLTNLGAPAAFKYFDTTIDRKRYTSTKEVLDATLIHQSITGLYETRIDLSQLGGDGGGGSGSSGGTLGDQGSRGSDPLPEPRVTLTVEGIPTEFLVNTGAEHSVLTKPMGKMGSKRTVVAGATGSKVYPWTTKRLLKIGQKQVTHSFLVIPECPAPLLGRDLLTKLKAQIQFSTEGPQVTWEDRPAMCLVLNLEEEYRLHEKPVPPSIDPSWLQLFPMVWAEKAGMGLANQVPPVVVELKSDASPVAVRQYPMSKEAREGIRPHIQRFLDLGILVPCQSPWNTPLLPVKKPGTNDYRPVQDLREVNKRVQDIHPTVPNPYNLLSSLPPSHTWYSVLDLKDAFFCLKLHPNSQPLFAFEWRDPEKGNTGQLTWTRLPQGFKNSPTLFNEALHRDLASFRALNPQVVMLQYVDDLLVAAPTYRDCKEGTRRLLQELSKLGYRVSAKKAQLCREEVTYLGYLLKGGKRWLTPARKATVMKIPTPTTPRQVREFLGKAGFCRLFIPGFASLAAPLYPLTRPKVPFTWTEAHQEAFGRIKEALLSAPALALPDLTKPFALYVDEKEGVARGVLTQTLGPWRRPVAYLSKKLDPVASGWPTCLKAIAAVALLLKDADKLTLGQNVLVIAPHNLESIVRQPPDRWMTNARMTHYQSLLLNERVSFAPPAILNPATLLPVESDDTPIHICSEILAEETGTRPDLRDQPLPGVPAWYTDGSSFIMDGRRQAGAAIVDNKRTVWASNLPEGTSAQKAELIALTQALRLAEGKSINIYTDSRYAFATAHVHGAIYKQRGWLTSAGKDIKNKEEILALLEAIHLPKRVAIIHCPGHQRGTDPVATGNRKADEAAKQAAQSTRILTETTKNAGKRTADGSEFEKRTADGSEFESPKKKAKVE

SEQ ID NO: 1809 - protein, 2227 aa, synthetic construct
MPAAKRVKLDGGDKKYSIGLDIGTNSVGWAVITDEYKVPSKKFKVLGNTDRHSIKKNLIGALLFDSGETAEATRLKRTARRRYTRRKNRICYLQEIFSNEMAKVDDSFFHRLEESFLVEEDKKHERHPIFGNIVDEVAYHEKYPTIYHLRKKLVDSTDKADLRLIYLALAHMIKFRGHFLIEGDLNPDNSDVDKLFIQLVQTYNQLFEENPINASGVDAKAILSARLSKSRRLENLIAQLPGEKKNGLFGNLIALSLGLTPNFKSNFDLAEDAKLQLSKDTYDDDLDNLLAQIGDQYADLFLAAKNLSDAILLSDILRVNTEITKAPLSASMIKRYDEHHQDLTLLKALVRQQLPEKYKEIFFDQSKNGYAGYIDGGASQEEFYKFIKPILEKMDGTEELLVKLNREDLLRKQRTFDNGSIPHQIHLGELHAILRRQEDFYPFLKDNREKIEKILTFRIPYYVGPLARGNSRFAWMTRKSEETITPWNFEEVVDKGASAQSFIERMTNFDKNLPNEKVLPKHSLLYEYFTVYNELTKVKYVTEGMRKPAFLSGEQKKAIVDLLFKTNRKVTVKQLKEDYFKKIECFDSVEISGVEDRFNASLGTYHDLLKIIKDKDFLDNEENEDILEDIVLTLTLFEDREMIEERLKTYAHLFDDKVMKQLKRRRYTGWGRLSRKLINGIRDKQSGKTILDFLKSDGFANRNFMQLIHDDSLTFKEDIQKAQVSGQGDSLHEHIANLAGSPAIKKGILQTVKVVDELVKVMGRHKPENIVIEMARENQTTQKGQKNSRERMKRIEEGIKELGSQILKEHPVENTQLQNEKLYLYYLQNGRDMYVDQELDINRLSDYDVDHIVPQSFLKDDSIDNKVLTRSDKARGKSDNVPSEEVVKKMKNYWRQLLNAKLITQRKFDNLTKAERGGLSELDKAGFIKRQLVETRQITKHVAQILDSRMNTKYDENDKLIREVKVITLKSKLVSDFRKDFQFYKVREINNYHHAHDAYLNAVVGTALIKKYPKLESEFVYGDYKVYDVRKMIAKSEQEIGKATAKYFFYSNIMNFFKTEITLANGEIRKRPLIETNGETGEIVWDKGRDFATVRKVLSMPQVNIVKKTEVQTGGFSKESILPKRNSDKLIARKKDWDPKKYGGFDSPTVAYSVLVVAKVEKGKSKKLKSVKELLGITIMERSSFEKNPIDFLEAKGYKEVKKDLIIKLPKYSLFELENGRKRMLASAGELQKGNELALPSKYVNFLYLASHYEKLKGSPEDNEQKQLFVEQHKHYLDEIIEQISEFSKRVILADANLDKVLSAYNKHRDKPIREQAENIIHLFTLTNLGAPAAFKYFDTTIDRKRYTSTKEVLDATLIHQSITGLYETRIDLSQLGGDGGEAAAKEAAAKEAAAKEAAAKGGTLGDQGSRGSDPLPEPRVTLTVEGIPTEFLVNTGAEHSVLTKPMGKMGSKRTVVAGATGSKVYPWTTKRLLKIGQKQVTHSFLVIPECPAPLLGRDLLTKLKAQIQFSTEGPQVTWEDRPAMCLVLNLEEEYRLHEKPVPPSIDPSWLQLFPMVWAEKAGMGLANQVPPVVVELKSDASPVAVRQYPMSKEAREGIRPHIQRFLDLGILVPCQSPWNTPLLPVKKPGTNDYRPVQDLREVNKRVQDIHPTVPNPYNLLSSLPPSHTWYSVLDLKDAFFCLKLHPNSQPLFAFEWRDPEKGNTGQLTWTRLPQGFKNSPTLFNEALHRDLASFRALNPQVVMLQYVDDLLVAAPTYRDCKEGTRRLLQELSKLGYRVSAKKAQLCREEVTYLGYLLKGGKRWLTPARKATVMKIPTPTTPRQVREFLGKAGFCRLFIPGFASLAAPLYPLTRPKVPFTWTEAHQEAFGRIKEALLSAPALALPDLTKPFALYVDEKEGVARGVLTQTLGPWRRPVAYLSKKLDPVASGWPTCLKAIAAVALLLKDADKLTLGQNVLVIAPHNLESIVRQPPDRWMTNARMTHYQSLLLNERVSFAPPAILNPATLLPVESDDTPIHICSEILAEETGTRPDLRDQPLPGVPAWYTDGSSFIMDGRRQAGAAIVDNKRTVWASNLPEGTSAQKAELIALTQALRLAEGKSINIYTDSRYAFATAHVHGAIYKQRGWLTSAGKDIKNKEEILALLEAIHLPKRVAIIHCPGHQRGTDPVATGNRKADEAAKQAAQSTRILTETTKNAGKRTADGSEFEKRTADGSEFESPKKKAKVE

SEQ ID NO: 1810 - protein, 2218 aa, synthetic construct
MPAAKRVKLDGGDKKYSIGLDIGTNSVGWAVITDEYKVPSKKFKVLGNTDRHSIKKNLIGALLFDSGETAEATRLKRTARRRYTRRKNRICYLQEIFSNEMAKVDDSFFHRLEESFLVEEDKKHERHPIFGNIVDEVAYHEKYPTIYHLRKKLVDSTDKADLRLIYLALAHMIKFRGHFLIEGDLNPDNSDVDKLFIQLVQTYNQLFEENPINASGVDAKAILSARLSKSRRLENLIAQLPGEKKNGLFGNLIALSLGLTPNFKSNFDLAEDAKLQLSKDTYDDDLDNLLAQIGDQYADLFLAAKNLSDAILLSDILRVNTEITKAPLSASMIKRYDEHHQDLTLLKALVRQQLPEKYKEIFFDQSKNGYAGYIDGGASQEEFYKFIKPILEKMDGTEELLVKLNREDLLRKQRTFDNGSIPHQIHLGELHAILRRQEDFYPFLKDNREKIEKILTFRIPYYVGPLARGNSRFAWMTRKSEETITPWNFEEVVDKGASAQSFIERMTNFDKNLPNEKVLPKHSLLYEYFTVYNELTKVKYVTEGMRKPAFLSGEQKKAIVDLLFKTNRKVTVKQLKEDYFKKIECFDSVEISGVEDRFNASLGTYHDLLKIIKDKDFLDNEENEDILEDIVLTLTLFEDREMIEERLKTYAHLFDDKVMKQLKRRRYTGWGRLSRKLINGIRDKQSGKTILDFLKSDGFANRNFMQLIHDDSLTFKEDIQKAQVSGQGDSLHEHIANLAGSPAIKKGILQTVKVVDELVKVMGRHKPENIVIEMARENQTTQKGQKNSRERMKRIEEGIKELGSQILKEHPVENTQLQNEKLYLYYLQNGRDMYVDQELDINRLSDYDVDHIVPQSFLKDDSIDNKVLTRSDKARGKSDNVPSEEVVKKMKNYWRQLLNAKLITQRKFDNLTKAERGGLSELDKAGFIKRQLVETRQITKHVAQILDSRMNTKYDENDKLIREVKVITLKSKLVSDFRKDFQFYKVREINNYHHAHDAYLNAVVGTALIKKYPKLESEFVYGDYKVYDVRKMIAKSEQEIGKATAKYFFYSNIMNFFKTEITLANGEIRKRPLIETNGETGEIVWDKGRDFATVRKVLSMPQVNIVKKTEVQTGGFSKESILPKRNSDKLIARKKDWDPKKYGGFDSPTVAYSVLVVAKVEKGKSKKLKSVKELLGITIMERSSFEKNPIDFLEAKGYKEVKKDLIIKLPKYSLFELENGRKRMLASAGELQKGNELALPSKYVNFLYLASHYEKLKGSPEDNEQKQLFVEQHKHYLDEIIEQISEFSKRVILADANLDKVLSAYNKHRDKPIREQAENIIHLFTLTNLGAPAAFKYFDTTIDRKRYTSTKEVLDATLIHQSITGLYETRIDLSQLGGDGGPAPGGSEAAAKGGTLGDQGSRGSDPLPEPRVTLTVEGIPTEFLVNTGAEHSVLTKPMGKMGSKRTVVAGATGSKVYPWTTKRLLKIGQKQVTHSFLVIPECPAPLLGRDLLTKLKAQIQFSTEGPQVTWEDRPAMCLVLNLEEEYRLHEKPVPPSIDPSWLQLFPMVWAEKAGMGLANQVPPVVVELKSDASPVAVRQYPMSKEAREGIRPHIQRFLDLGILVPCQSPWNTPLLPVKKPGTNDYRPVQDLREVNKRVQDIHPTVPNPYNLLSSLPPSHTWYSVLDLKDAFFCLKLHPNSQPLFAFEWRDPEKGNTGQLTWTRLPQGFKNSPTLFNEALHRDLASFRALNPQVVMLQYVDDLLVAAPTYRDCKEGTRRLLQELSKLGYRVSAKKAQLCREEVTYLGYLLKGGKRWLTPARKATVMKIPTPTTPRQVREFLGKAGFCRLFIPGFASLAAPLYPLTRPKVPFTWTEAHQEAFGRIKEALLSAPALALPDLTKPFALYVDEKEGVARGVLTQTLGPWRRPVAYLSKKLDPVASGWPTCLKAIAAVALLLKDADKLTLGQNVLVIAPHNLESIVRQPPDRWMTNARMTHYQSLLLNERVSFAPPAILNPATLLPVESDDTPIHICSEILAEETGTRPDLRDQPLPGVPAWYTDGSSFIMDGRRQAGAAIVDNKRTVWASNLPEGTSAQKAELIALTQALRLAEGKSINIYTDSRYAFATAHVHGAIYKQRGWLTSAGKDIKNKEEILALLEAIHLPKRVAIIHCPGHQRGTDPVATGNRKADEAAKQAAQSTRILTETTKNAGKRTADGSEFEKRTADGSEFESPKKKAKVE

SEQ ID NO: 1811 - protein, 2213 aa, synthetic construct
MPAAKRVKLDGGDKKYSIGLDIGTNSVGWAVITDEYKVPSKKFKVLGNTDRHSIKKNLIGALLFDSGETAEATRLKRTARRRYTRRKNRICYLQEIFSNEMAKVDDSFFHRLEESFLVEEDKKHERHPIFGNIVDEVAYHEKYPTIYHLRKKLVDSTDKADLRLIYLALAHMIKFRGHFLIEGDLNPDNSDVDKLFIQLVQTYNQLFEENPINASGVDAKAILSARLSKSRRLENLIAQLPGEKKNGLFGNLIALSLGLTPNFKSNFDLAEDAKLQLSKDTYDDDLDNLLAQIGDQYADLFLAAKNLSDAILLSDILRVNTEITKAPLSASMIKRYDEHHQDLTLLKALVRQQLPEKYKEIFFDQSKNGYAGYIDGGASQEEFYKFIKPILEKMDGTEELLVKLNREDLLRKQRTFDNGSIPHQIHLGELHAILRRQEDFYPFLKDNREKIEKILTFRIPYYVGPLARGNSRFAWMTRKSEETITPWNFEEVVDKGASAQSFIERMTNFDKNLPNEKVLPKHSLLYEYFTVYNELTKVKYVTEGMRKPAFLSGEQKKAIVDLLFKTNRKVTVKQLKEDYFKKIECFDSVEISGVEDRFNASLGTYHDLLKIIKDKDFLDNEENEDILEDIVLTLTLFEDREMIEERLKTYAHLFDDKVMKQLKRRRYTGWGRLSRKLINGIRDKQSGKTILDFLKSDGFANRNFMQLIHDDSLTFKEDIQKAQVSGQGDSLHEHIANLAGSPAIKKGILQTVKVVDELVKVMGRHKPENIVIEMARENQTTQKGQKNSRERMKRIEEGIKELGSQILKEHPVENTQLQNEKLYLYYLQNGRDMYVDQELDINRLSDYDVDHIVPQSFLKDDSIDNKVLTRSDKARGKSDNVPSEEVVKKMKNYWRQLLNAKLITQRKFDNLTKAERGGLSELDKAGFIKRQLVETRQITKHVAQILDSRMNTKYDENDKLIREVKVITLKSKLVSDFRKDFQFYKVREINNYHHAHDAYLNAVVGTALIKKYPKLESEFVYGDYKVYDVRKMIAKSEQEIGKATAKYFFYSNIMNFFKTEITLANGEIRKRPLIETNGETGEIVWDKGRDFATVRKVLSMPQVNIVKKTEVQTGGFSKESILPKRNSDKLIARKKDWDPKKYGGFDSPTVAYSVLVVAKVEKGKSKKLKSVKELLGITIMERSSFEKNPIDFLEAKGYKEVKKDLIIKLPKYSLFELENGRKRMLASAGELQKGNELALPSKYVNFLYLASHYEKLKGSPEDNEQKQLFVEQHKHYLDEIIEQISEFSKRVILADANLDKVLSAYNKHRDKPIREQAENIIHLFTLTNLGAPAAFKYFDTTIDRKRYTSTKEVLDATLIHQSITGLYETRIDLSQLGGDGGPAPGGSGGTLGDQGSRGSDPLPEPRVTLTVEGIPTEFLVNTGAEHSVLTKPMGKMGSKRTVVAGATGSKVYPWTTKRLLKIGQKQVTHSFLVIPECPAPLLGRDLLTKLKAQIQFSTEGPQVTWEDRPAMCLVLNLEEEYRLHEKPVPPSIDPSWLQLFPMVWAEKAGMGLANQVPPVVVELKSDASPVAVRQYPMSKEAREGIRPHIQRFLDLGILVPCQSPWNTPLLPVKKPGTNDYRPVQDLREVNKRVQDIHPTVPNPYNLLSSLPPSHTWYSVLDLKDAFFCLKLHPNSQPLFAFEWRDPEKGNTGQLTWTRLPQGFKNSPTLFNEALHRDLASFRALNPQVVMLQYVDDLLVAAPTYRDCKEGTRRLLQELSKLGYRVSAKKAQLCREEVTYLGYLLKGGKRWLTPARKATVMKIPTPTTPRQVREFLGKAGFCRLFIPGFASLAAPLYPLTRPKVPFTWTEAHQEAFGRIKEALLSAPALALPDLTKPFALYVDEKEGVARGVLTQTLGPWRRPVAYLSKKLDPVASGWPTCLKAIAAVALLLKDADKLTLGQNVLVIAPHNLESIVRQPPDRWMTNARMTHYQSLLLNERVSFAPPAILNPATLLPVESDDTPIHICSEILAEETGTRPDLRDQPLPGVPAWYTDGSSFIMDGRRQAGAAIVDNKRTVWASNLPEGTSAQKAELIALTQALRLAEGKSINIYTDSRYAFATAHVHGAIYKQRGWLTSAGKDIKNKEEILALLEAIHLPKRVAIIHCPGHQRGTDPVATGNRKADEAAKQAAQSTRILTETTKNAGKRTADGSEFEKRTADGSEFESPKKKAKVE

SEQ ID NO: 1812 - protein, 2218 aa, synthetic construct
MPAAKRVKLDGGDKKYSIGLDIGTNSVGWAVITDEYKVPSKKFKVLGNTDRHSIKKNLIGALLFDSGETAEATRLKRTARRRYTRRKNRICYLQEIFSNEMAKVDDSFFHRLEESFLVEEDKKHERHPIFGNIVDEVAYHEKYPTIYHLRKKLVDSTDKADLRLIYLALAHMIKFRGHFLIEGDLNPDNSDVDKLFIQLVQTYNQLFEENPINASGVDAKAILSARLSKSRRLENLIAQLPGEKKNGLFGNLIALSLGLTPNFKSNFDLAEDAKLQLSKDTYDDDLDNLLAQIGDQYADLFLAAKNLSDAILLSDILRVNTEITKAPLSASMIKRYDEHHQDLTLLKALVRQQLPEKYKEIFFDQSKNGYAGYIDGGASQEEFYKFIKPILEKMDGTEELLVKLNREDLLRKQRTFDNGSIPHQIHLGELHAILRRQEDFYPFLKDNREKIEKILTFRIPYYVGPLARGNSRFAWMTRKSEETITPWNFEEVVDKGASAQSFIERMTNFDKNLPNEKVLPKHSLLYEYFTVYNELTKVKYVTEGMRKPAFLSGEQKKAIVDLLFKTNRKVTVKQLKEDYFKKIECFDSVEISGVEDRFNASLGTYHDLLKIIKDKDFLDNEENEDILEDIVLTLTLFEDREMIEERLKTYAHLFDDKVMKQLKRRRYTGWGRLSRKLINGIRDKQSGKTILDFLKSDGFANRNFMQLIHDDSLTFKEDIQKAQVSGQGDSLHEHIANLAGSPAIKKGILQTVKVVDELVKVMGRHKPENIVIEMARENQTTQKGQKNSRERMKRIEEGIKELGSQILKEHPVENTQLQNEKLYLYYLQNGRDMYVDQELDINRLSDYDVDHIVPQSFLKDDSIDNKVLTRSDKARGKSDNVPSEEVVKKMKNYWRQLLNAKLITQRKFDNLTKAERGGLSELDKAGFIKRQLVETRQITKHVAQILDSRMNTKYDENDKLIREVKVITLKSKLVSDFRKDFQFYKVREINNYHHAHDAYLNAVVGTALIKKYPKLESEFVYGDYKVYDVRKMIAKSEQEIGKATAKYFFYSNIMNFFKTEITLANGEIRKRPLIETNGETGEIVWDKGRDFATVRKVLSMPQVNIVKKTEVQTGGFSKESILPKRNSDKLIARKKDWDPKKYGGFDSPTVAYSVLVVAKVEKGKSKKLKSVKELLGITIMERSSFEKNPIDFLEAKGYKEVKKDLIIKLPKYSLFELENGRKRMLASAGELQKGNELALPSKYVNFLYLASHYEKLKGSPEDNEQKQLFVEQHKHYLDEIIEQISEFSKRVILADANLDKVLSAYNKHRDKPIREQAENIIHLFTLTNLGAPAAFKYFDTTIDRKRYTSTKEVLDATLIHQSITGLYETRIDLSQLGGDGGGGGPAPEAAAKGGTLGDQGSRGSDPLPEPRVTLTVEGIPTEFLVNTGAEHSVLTKPMGKMGSKRTVVAGATGSKVYPWTTKRLLKIGQKQVTHSFLVIPECPAPLLGRDLLTKLKAQIQFSTEGPQVTWEDRPAMCLVLNLEEEYRLHEKPVPPSIDPSWLQLFPMVWAEKAGMGLANQVPPVVVELKSDASPVAVRQYPMSKEAREGIRPHIQRFLDLGILVPCQSPWNTPLLPVKKPGTNDYRPVQDLREVNKRVQDIHPTVPNPYNLLSSLPPSHTWYSVLDLKDAFFCLKLHPNSQPLFAFEWRDPEKGNTGQLTWTRLPQGFKNSPTLFNEALHRDLASFRALNPQVVMLQYVDDLLVAAPTYRDCKEGTRRLLQELSKLGYRVSAKKAQLCREEVTYLGYLLKGGKRWLTPARKATVMKIPTPTTPRQVREFLGKAGFCRLFIPGFASLAAPLYPLTRPKVPFTWTEAHQEAFGRIKEALLSAPALALPDLTKPFALYVDEKEGVARGVLTQTLGPWRRPVAYLSKKLDPVASGWPTCLKAIAAVALLLKDADKLTLGQNVLVIAPHNLESIVRQPPDRWMTNARMTHYQSLLLNERVSFAPPAILNPATLLPVESDDTPIHICSEILAEETGTRPDLRDQPLPGVPAWYTDGSSFIMDGRRQAGAAIVDNKRTVWASNLPEGTSAQKAELIALTQALRLAEGKSINIYTDSRYAFATAHVHGAIYKQRGWLTSAGKDIKNKEEILALLEAIHLPKRVAIIHCPGHQRGTDPVATGNRKADEAAKQAAQSTRILTETTKNAGKRTADGSEFEKRTADGSEFESPKKKAKVE

SEQ ID NO: 1813 - protein, 2222 aa, synthetic construct
MPAAKRVKLDGGDKKYSIGLDIGTNSVGWAVITDEYKVPSKKFKVLGNTDRHSIKKNLIGALLFDSGETAEATRLKRTARRRYTRRKNRICYLQEIFSNEMAKVDDSFFHRLEESFLVEEDKKHERHPIFGNIVDEVAYHEKYPTIYHLRKKLVDSTDKADLRLIYLALAHMIKFRGHFLIEGDLNPDNSDVDKLFIQLVQTYNQLFEENPINASGVDAKAILSARLSKSRRLENLIAQLPGEKKNGLFGNLIALSLGLTPNFKSNFDLAEDAKLQLSKDTYDDDLDNLLAQIGDQYADLFLAAKNLSDAILLSDILRVNTEITKAPLSASMIKRYDEHHQDLTLLKALVRQQLPEKYKEIFFDQSKNGYAGYIDGGASQEEFYKFIKPILEKMDGTEELLVKLNREDLLRKQRTFDNGSIPHQIHLGELHAILRRQEDFYPFLKDNREKIEKILTFRIPYYVGPLARGNSRFAWMTRKSEETITPWNFEEVVDKGASAQSFIERMTNFDKNLPNEKVLPKHSLLYEYFTVYNELTKVKYVTEGMRKPAFLSGEQKKAIVDLLFKTNRKVTVKQLKEDYFKKIECFDSVEISGVEDRFNASLGTYHDLLKIIKDKDFLDNEENEDILEDIVLTLTLFEDREMIEERLKTYAHLFDDKVMKQLKRRRYTGWGRLSRKLINGIRDKQSGKTILDFLKSDGFANRNFMQLIHDDSLTFKEDIQKAQVSGQGDSLHEHIANLAGSPAIKKGILQTVKVVDELVKVMGRHKPENIVIEMARENQTTQKGQKNSRERMKRIEEGIKELGSQILKEHPVENTQLQNEKLYLYYLQNGRDMYVDQELDINRLSDYDVDHIVPQSFLKDDSIDNKVLTRSDKARGKSDNVPSEEVVKKMKNYWRQLLNAKLITQRKFDNLTKAERGGLSELDKAGFIKRQLVETRQITKHVAQILDSRMNTKYDENDKLIREVKVITLKSKLVSDFRKDFQFYKVREINNYHHAHDAYLNAVVGTALIKKYPKLESEFVYGDYKVYDVRKMIAKSEQEIGKATAKYFFYSNIMNFFKTEITLANGEIRKRPLIETNGETGEIVWDKGRDFATVRKVLSMPQVNIVKKTEVQTGGFSKESILPKRNSDKLIARKKDWDPKKYGGFDSPTVAYSVLVVAKVEKGKSKKLKSVKELLGITIMERSSFEKNPIDFLEAKGYKEVKKDLIIKLPKYSLFELENGRKRMLASAGELQKGNELALPSKYVNFLYLASHYEKLKGSPEDNEQKQLFVEQHKHYLDEIIEQISEFSKRVILADANLDKVLSAYNKHRDKPIREQAENIIHLFTLTNLGAPAAFKYFDTTIDRKRYTSTKEVLDATLIHQSITGLYETRIDLSQLGGDGGGSSGSSGSSGSSGSSGGTLGDQGSRGSDPLPEPRVTLTVEGIPTEFLVNTGAEHSVLTKPMGKMGSKRTVVAGATGSKVYPWTTKRLLKIGQKQVTHSFLVIPECPAPLLGRDLLTKLKAQIQFSTEGPQVTWEDRPAMCLVLNLEEEYRLHEKPVPPSIDPSWLQLFPMVWAEKAGMGLANQVPPVVVELKSDASPVAVRQYPMSKEAREGIRPHIQRFLDLGILVPCQSPWNTPLLPVKKPGTNDYRPVQDLREVNKRVQDIHPTVPNPYNLLSSLPPSHTWYSVLDLKDAFFCLKLHPNSQPLFAFEWRDPEKGNTGQLTWTRLPQGFKNSPTLFNEALHRDLASFRALNPQVVMLQYVDDLLVAAPTYRDCKEGTRRLLQELSKLGYRVSAKKAQLCREEVTYLGYLLKGGKRWLTPARKATVMKIPTPTTPRQVREFLGKAGFCRLFIPGFASLAAPLYPLTRPKVPFTWTEAHQEAFGRIKEALLSAPALALPDLTKPFALYVDEKEGVARGVLTQTLGPWRRPVAYLSKKLDPVASGWPTCLKAIAAVALLLKDADKLTLGQNVLVIAPHNLESIVRQPPDRWMTNARMTHYQSLLLNERVSFAPPAILNPATLLPVESDDTPIHICSEILAEETGTRPDLRDQPLPGVPAWYTDGSSFIMDGRRQAGAAIVDNKRTVWASNLPEGTSAQKAELIALTQALRLAEGKSINIYTDSRYAFATAHVHGAIYKQRGWLTSAGKDIKNKEEILALLEAIHLPKRVAIIHCPGHQRGTDPVATGNRKADEAAKQAAQSTRILTETTKNAGKRTADGSEFEKRTADGSEFESPKKKAKVE

SEQ ID NO: 1814 - protein, 2216 aa, synthetic construct
MPAAKRVKLDGGDKKYSIGLDIGTNSVGWAVITDEYKVPSKKFKVLGNTDRHSIKKNLIGALLFDSGETAEATRLKRTARRRYTRRKNRICYLQEIFSNEMAKVDDSFFHRLEESFLVEEDKKHERHPIFGNIVDEVAYHEKYPTIYHLRKKLVDSTDKADLRLIYLALAHMIKFRGHFLIEGDLNPDNSDVDKLFIQLVQTYNQLFEENPINASGVDAKAILSARLSKSRRLENLIAQLPGEKKNGLFGNLIALSLGLTPNFKSNFDLAEDAKLQLSKDTYDDDLDNLLAQIGDQYADLFLAAKNLSDAILLSDILRVNTEITKAPLSASMIKRYDEHHQDLTLLKALVRQQLPEKYKEIFFDQSKNGYAGYIDGGASQEEFYKFIKPILEKMDGTEELLVKLNREDLLRKQRTFDNGSIPHQIHLGELHAILRRQEDFYPFLKDNREKIEKILTFRIPYYVGPLARGNSRFAWMTRKSEETITPWNFEEVVDKGASAQSFIERMTNFDKNLPNEKVLPKHSLLYEYFTVYNELTKVKYVTEGMRKPAFLSGEQKKAIVDLLFKTNRKVTVKQLKEDYFKKIECFDSVEISGVEDRFNASLGTYHDLLKIIKDKDFLDNEENEDILEDIVLTLTLFEDREMIEERLKTYAHLFDDKVMKQLKRRRYTGWGRLSRKLINGIRDKQSGKTILDFLKSDGFANRNFMQLIHDDSLTFKEDIQKAQVSGQGDSLHEHIANLAGSPAIKKGILQTVKVVDELVKVMGRHKPENIVIEMARENQTTQKGQKNSRERMKRIEEGIKELGSQILKEHPVENTQLQNEKLYLYYLQNGRDMYVDQELDINRLSDYDVDHIVPQSFLKDDSIDNKVLTRSDKARGKSDNVPSEEVVKKMKNYWRQLLNAKLITQRKFDNLTKAERGGLSELDKAGFIKRQLVETRQITKHVAQILDSRMNTKYDENDKLIREVKVITLKSKLVSDFRKDFQFYKVREINNYHHAHDAYLNAVVGTALIKKYPKLESEFVYGDYKVYDVRKMIAKSEQEIGKATAKYFFYSNIMNFFKTEITLANGEIRKRPLIETNGETGEIVWDKGRDFATVRKVLSMPQVNIVKKTEVQTGGFSKESILPKRNSDKLIARKKDWDPKKYGGFDSPTVAYSVLVVAKVEKGKSKKLKSVKELLGITIMERSSFEKNPIDFLEAKGYKEVKKDLIIKLPKYSLFELENGRKRMLASAGELQKGNELALPSKYVNFLYLASHYEKLKGSPEDNEQKQLFVEQHKHYLDEIIEQISEFSKRVILADANLDKVLSAYNKHRDKPIREQAENIIHLFTLTNLGAPAAFKYFDTTIDRKRYTSTKEVLDATLIHQSITGLYETRIDLSQLGGDGGGSSGSSGSSGGTLGDQGSRGSDPLPEPRVTLTVEGIPTEFLVNTGAEHSVLTKPMGKMGSKRTVVAGATGSKVYPWTTKRLLKIGQKQVTHSFLVIPECPAPLLGRDLLTKLKAQIQFSTEGPQVTWEDRPAMCLVLNLEEEYRLHEKPVPPSIDPSWLQLFPMVWAEKAGMGLANQVPPVVVELKSDASPVAVRQYPMSKEAREGIRPHIQRFLDLGILVPCQSPWNTPLLPVKKPGTNDYRPVQDLREVNKRVQDIHPTVPNPYNLLSSLPPSHTWYSVLDLKDAFFCLKLHPNSQPLFAFEWRDPEKGNTGQLTWTRLPQGFKNSPTLFNEALHRDLASFRALNPQVVMLQYVDDLLVAAPTYRDCKEGTRRLLQELSKLGYRVSAKKAQLCREEVTYLGYLLKGGKRWLTPARKATVMKIPTPTTPRQVREFLGKAGFCRLFIPGFASLAAPLYPLTRPKVPFTWTEAHQEAFGRIKEALLSAPALALPDLTKPFALYVDEKEGVARGVLTQTLGPWRRPVAYLSKKLDPVASGWPTCLKAIAAVALLLKDADKLTLGQNVLVIAPHNLESIVRQPPDRWMTNARMTHYQSLLLNERVSFAPPAILNPATLLPVESDDTPIHICSEILAEETGTRPDLRDQPLPGVPAWYTDGSSFIMDGRRQAGAAIVDNKRTVWASNLPEGTSAQKAELIALTQALRLAEGKSINIYTDSRYAFATAHVHGAIYKQRGWLTSAGKDIKNKEEILALLEAIHLPKRVAIIHCPGHQRGTDPVATGNRKADEAAKQAAQSTRILTETTKNAGKRTADGSEFEKRTADGSEFESPKKKAKVE

SEQ ID NO: 1815 - protein, 2213 aa, synthetic construct
MPAAKRVKLDGGDKKYSIGLDIGTNSVGWAVITDEYKVPSKKFKVLGNTDRHSIKKNLIGALLFDSGETAEATRLKRTARRRYTRRKNRICYLQEIFSNEMAKVDDSFFHRLEESFLVEEDKKHERHPIFGNIVDEVAYHEKYPTIYHLRKKLVDSTDKADLRLIYLALAHMIKFRGHFLIEGDLNPDNSDVDKLFIQLVQTYNQLFEENPINASGVDAKAILSARLSKSRRLENLIAQLPGEKKNGLFGNLIALSLGLTPNFKSNFDLAEDAKLQLSKDTYDDDLDNLLAQIGDQYADLFLAAKNLSDAILLSDILRVNTEITKAPLSASMIKRYDEHHQDLTLLKALVRQQLPEKYKEIFFDQSKNGYAGYIDGGASQEEFYKFIKPILEKMDGTEELLVKLNREDLLRKQRTFDNGSIPHQIHLGELHAILRRQEDFYPFLKDNREKIEKILTFRIPYYVGPLARGNSRFAWMTRKSEETITPWNFEEVVDKGASAQSFIERMTNFDKNLPNEKVLPKHSLLYEYFTVYNELTKVKYVTEGMRKPAFLSGEQKKAIVDLLFKTNRKVTVKQLKEDYFKKIECFDSVEISGVEDRFNASLGTYHDLLKIIKDKDFLDNEENEDILEDIVLTLTLFEDREMIEERLKTYAHLFDDKVMKQLKRRRYTGWGRLSRKLINGIRDKQSGKTILDFLKSDGFANRNFMQLIHDDSLTFKEDIQKAQVSGQGDSLHEHIANLAGSPAIKKGILQTVKVVDELVKVMGRHKPENIVIEMARENQTTQKGQKNSRERMKRIEEGIKELGSQILKEHPVENTQLQNEKLYLYYLQNGRDMYVDQELDINRLSDYDVDHIVPQSFLKDDSIDNKVLTRSDKARGKSDNVPSEEVVKKMKNYWRQLLNAKLITQRKFDNLTKAERGGLSELDKAGFIKRQLVETRQITKHVAQILDSRMNTKYDENDKLIREVKVITLKSKLVSDFRKDFQFYKVREINNYHHAHDAYLNAVVGTALIKKYPKLESEFVYGDYKVYDVRKMIAKSEQEIGKATAKYFFYSNIMNFFKTEITLANGEIRKRPLIETNGETGEIVWDKGRDFATVRKVLSMPQVNIVKKTEVQTGGFSKESILPKRNSDKLIARKKDWDPKKYGGFDSPTVAYSVLVVAKVEKGKSKKLKSVKELLGITIMERSSFEKNPIDFLEAKGYKEVKKDLIIKLPKYSLFELENGRKRMLASAGELQKGNELALPSKYVNFLYLASHYEKLKGSPEDNEQKQLFVEQHKHYLDEIIEQISEFSKRVILADANLDKVLSAYNKHRDKPIREQAENIIHLFTLTNLGAPAAFKYFDTTIDRKRYTSTKEVLDATLIHQSITGLYETRIDLSQLGGDGGGSSPAPGGTLGDQGSRGSDPLPEPRVTLTVEGIPTEFLVNTGAEHSVLTKPMGKMGSKRTVVAGATGSKVYPWTTKRLLKIGQKQVTHSFLVIPECPAPLLGRDLLTKLKAQIQFSTEGPQVTWEDRPAMCLVLNLEEEYRLHEKPVPPSIDPSWLQLFPMVWAEKAGMGLANQVPPVVVELKSDASPVAVRQYPMSKEAREGIRPHIQRFLDLGILVPCQSPWNTPLLPVKKPGTNDYRPVQDLREVNKRVQDIHPTVPNPYNLLSSLPPSHTWYSVLDLKDAFFCLKLHPNSQPLFAFEWRDPEKGNTGQLTWTRLPQGFKNSPTLFNEALHRDLASFRALNPQVVMLQYVDDLLVAAPTYRDCKEGTRRLLQELSKLGYRVSAKKAQLCREEVTYLGYLLKGGKRWLTPARKATVMKIPTPTTPRQVREFLGKAGFCRLFIPGFASLAAPLYPLTRPKVPFTWTEAHQEAFGRIKEALLSAPALALPDLTKPFALYVDEKEGVARGVLTQTLGPWRRPVAYLSKKLDPVASGWPTCLKAIAAVALLLKDADKLTLGQNVLVIAPHNLESIVRQPPDRWMTNARMTHYQSLLLNERVSFAPPAILNPATLLPVESDDTPIHICSEILAEETGTRPDLRDQPLPGVPAWYTDGSSFIMDGRRQAGAAIVDNKRTVWASNLPEGTSAQKAELIALTQALRLAEGKSINIYTDSRYAFATAHVHGAIYKQRGWLTSAGKDIKNKEEILALLEAIHLPKRVAIIHCPGHQRGTDPVATGNRKADEAAKQAAQSTRILTETTKNAGKRTADGSEFEKRTADGSEFESPKKKAKVE

SEQ ID NO: 1816 - protein, 2218 aa, synthetic construct
MPAAKRVKLDGGDKKYSIGLDIGTNSVGWAVITDEYKVPSKKFKVLGNTDRHSIKKNLIGALLFDSGETAEATRLKRTARRRYTRRKNRICYLQEIFSNEMAKVDDSFFHRLEESFLVEEDKKHERHPIFGNIVDEVAYHEKYPTIYHLRKKLVDSTDKADLRLIYLALAHMIKFRGHFLIEGDLNPDNSDVDKLFIQLVQTYNQLFEENPINASGVDAKAILSARLSKSRRLENLIAQLPGEKKNGLFGNLIALSLGLTPNFKSNFDLAEDAKLQLSKDTYDDDLDNLLAQIGDQYADLFLAAKNLSDAILLSDILRVNTEITKAPLSASMIKRYDEHHQDLTLLKALVRQQLPEKYKEIFFDQSKNGYAGYIDGGASQEEFYKFIKPILEKMDGTEELLVKLNREDLLRKQRTFDNGSIPHQIHLGELHAILRRQEDFYPFLKDNREKIEKILTFRIPYYVGPLARGNSRFAWMTRKSEETITPWNFEEVVDKGASAQSFIERMTNFDKNLPNEKVLPKHSLLYEYFTVYNELTKVKYVTEGMRKPAFLSGEQKKAIVDLLFKTNRKVTVKQLKEDYFKKIECFDSVEISGVEDRFNASLGTYHDLLKIIKDKDFLDNEENEDILEDIVLTLTLFEDREMIEERLKTYAHLFDDKVMKQLKRRRYTGWGRLSRKLINGIRDKQSGKTILDFLKSDGFANRNFMQLIHDDSLTFKEDIQKAQVSGQGDSLHEHIANLAGSPAIKKGILQTVKVVDELVKVMGRHKPENIVIEMARENQTTQKGQKNSRERMKRIEEGIKELGSQILKEHPVENTQLQNEKLYLYYLQNGRDMYVDQELDINRLSDYDVDHIVPQSFLKDDSIDNKVLTRSDKARGKSDNVPSEEVVKKMKNYWRQLLNAKLITQRKFDNLTKAERGGLSELDKAGFIKRQLVETRQITKHVAQILDSRMNTKYDENDKLIREVKVITLKSKLVSDFRKDFQFYKVREINNYHHAHDAYLNAVVGTALIKKYPKLESEFVYGDYKVYDVRKMIAKSEQEIGKATAKYFFYSNIMNFFKTEITLANGEIRKRPLIETNGETGEIVWDKGRDFATVRKVLSMPQVNIVKKTEVQTGGFSKESILPKRNSDKLIARKKDWDPKKYGGFDSPTVAYSVLVVAKVEKGKSKKLKSVKELLGITIMERSSFEKNPIDFLEAKGYKEVKKDLIIKLPKYSLFELENGRKRMLASAGELQKGNELALPSKYVNFLYLASHYEKLKGSPEDNEQKQLFVEQHKHYLDEIIEQISEFSKRVILADANLDKVLSAYNKHRDKPIREQAENIIHLFTLTNLGAPAAFKYFDTTIDRKRYTSTKEVLDATLIHQSITGLYETRIDLSQLGGDGGPAPEAAAKGSSGGTLGDQGSRGSDPLPEPRVTLTVEGIPTEFLVNTGAEHSVLTKPMGKMGSKRTVVAGATGSKVYPWTTKRLLKIGQKQVTHSFLVIPECPAPLLGRDLLTKLKAQIQFSTEGPQVTWEDRPAMCLVLNLEEEYRLHEKPVPPSIDPSWLQLFPMVWAEKAGMGLANQVPPVVVELKSDASPVAVRQYPMSKEAREGIRPHIQRFLDLGILVPCQSPWNTPLLPVKKPGTNDYRPVQDLREVNKRVQDIHPTVPNPYNLLSSLPPSHTWYSVLDLKDAFFCLKLHPNSQPLFAFEWRDPEKGNTGQLTWTRLPQGFKNSPTLFNEALHRDLASFRALNPQVVMLQYVDDLLVAAPTYRDCKEGTRRLLQELSKLGYRVSAKKAQLCREEVTYLGYLLKGGKRWLTPARKATVMKIPTPTTPRQVREFLGKAGFCRLFIPGFASLAAPLYPLTRPKVPFTWTEAHQEAFGRIKEALLSAPALALPDLTKPFALYVDEKEGVARGVLTQTLGPWRRPVAYLSKKLDPVASGWPTCLKAIAAVALLLKDADKLTLGQNVLVIAPHNLESIVRQPPDRWMTNARMTHYQSLLLNERVSFAPPAILNPATLLPVESDDTPIHICSEILAEETGTRPDLRDQPLPGVPAWYTDGSSFIMDGRRQAGAAIVDNKRTVWASNLPEGTSAQKAELIALTQALRLAEGKSINIYTDSRYAFATAHVHGAIYKQRGWLTSAGKDIKNKEEILALLEAIHLPKRVAIIHCPGHQRGTDPVATGNRKADEAAKQAAQSTRILTETTKNAGKRTADGSEFEKRTADGSEFESPKKKAKVE

SEQ ID NO: 1817 - protein, 2218 aa, synthetic construct
MPAAKRVKLDGGDKKYSIGLDIGTNSVGWAVITDEYKVPSKKFKVLGNTDRHSIKKNLIGALLFDSGETAEATRLKRTARRRYTRRKNRICYLQEIFSNEMAKVDDSFFHRLEESFLVEEDKKHERHPIFGNIVDEVAYHEKYPTIYHLRKKLVDSTDKADLRLIYLALAHMIKFRGHFLIEGDLNPDNSDVDKLFIQLVQTYNQLFEENPINASGVDAKAILSARLSKSRRLENLIAQLPGEKKNGLFGNLIALSLGLTPNFKSNFDLAEDAKLQLSKDTYDDDLDNLLAQIGDQYADLFLAAKNLSDAILLSDILRVNTEITKAPLSASMIKRYDEHHQDLTLLKALVRQQLPEKYKEIFFDQSKNGYAGYIDGGASQEEFYKFIKPILEKMDGTEELLVKLNREDLLRKQRTFDNGSIPHQIHLGELHAILRRQEDFYPFLKDNREKIEKILTFRIPYYVGPLARGNSRFAWMTRKSEETITPWNFEEVVDKGASAQSFIERMTNFDKNLPNEKVLPKHSLLYEYFTVYNELTKVKYVTEGMRKPAFLSGEQKKAIVDLLFKTNRKVTVKQLKEDYFKKIECFDSVEISGVEDRFNASLGTYHDLLKIIKDKDFLDNEENEDILEDIVLTLTLFEDREMIEERLKTYAHLFDDKVMKQLKRRRYTGWGRLSRKLINGIRDKQSGKTILDFLKSDGFANRNFMQLIHDDSLTFKEDIQKAQVSGQGDSLHEHIANLAGSPAIKKGILQTVKVVDELVKVMGRHKPENIVIEMARENQTTQKGQKNSRERMKRIEEGIKELGSQILKEHPVENTQLQNEKLYLYYLQNGRDMYVDQELDINRLSDYDVDHIVPQSFLKDDSIDNKVLTRSDKARGKSDNVPSEEVVKKMKNYWRQLLNAKLITQRKFDNLTKAERGGLSELDKAGFIKRQLVETRQITKHVAQILDSRMNTKYDENDKLIREVKVITLKSKLVSDFRKDFQFYKVREINNYHHAHDAYLNAVVGTALIKKYPKLESEFVYGDYKVYDVRKMIAKSEQEIGKATAKYFFYSNIMNFFKTEITLANGEIRKRPLIETNGETGEIVWDKGRDFATVRKVLSMPQVNIVKKTEVQTGGFSKESILPKRNSDKLIARKKDWDPKKYGGFDSPTVAYSVLVVAKVEKGKSKKLKSVKELLGITIMERSSFEKNPIDFLEAKGYKEVKKDLIIKLPKYSLFELENGRKRMLASAGELQKGNELALPSKYVNFLYLASHYEKLKGSPEDNEQKQLFVEQHKHYLDEIIEQISEFSKRVILADANLDKVLSAYNKHRDKPIREQAENIIHLFTLTNLGAPAAFKYFDTTIDRKRYTSTKEVLDATLIHQSITGLYETRIDLSQLGGDGGGSSGGGEAAAKGGTLGDQGSRGSDPLPEPRVTLTVEGIPTEFLVNTGAEHSVLTKPMGKMGSKRTVVAGATGSKVYPWTTKRLLKIGQKQVTHSFLVIPECPAPLLGRDLLTKLKAQIQFSTEGPQVTWEDRPAMCLVLNLEEEYRLHEKPVPPSIDPSWLQLFPMVWAEKAGMGLANQVPPVVVELKSDASPVAVRQYPMSKEAREGIRPHIQRFLDLGILVPCQSPWNTPLLPVKKPGTNDYRPVQDLREVNKRVQDIHPTVPNPYNLLSSLPPSHTWYSVLDLKDAFFCLKLHPNSQPLFAFEWRDPEKGNTGQLTWTRLPQGFKNSPTLFNEALHRDLASFRALNPQVVMLQYVDDLLVAAPTYRDCKEGTRRLLQELSKLGYRVSAKKAQLCREEVTYLGYLLKGGKRWLTPARKATVMKIPTPTTPRQVREFLGKAGFCRLFIPGFASLAAPLYPLTRPKVPFTWTEAHQEAFGRIKEALLSAPALALPDLTKPFALYVDEKEGVARGVLTQTLGPWRRPVAYLSKKLDPVASGWPTCLKAIAAVALLLKDADKLTLGQNVLVIAPHNLESIVRQPPDRWMTNARMTHYQSLLLNERVSFAPPAILNPATLLPVESDDTPIHICSEILAEETGTRPDLRDQPLPGVPAWYTDGSSFIMDGRRQAGAAIVDNKRTVWASNLPEGTSAQKAELIALTQALRLAEGKSINIYTDSRYAFATAHVHGAIYKQRGWLTSAGKDIKNKEEILALLEAIHLPKRVAIIHCPGHQRGTDPVATGNRKADEAAKQAAQSTRILTETTKNAGKRTADGSEFEKRTADGSEFESPKKKAKVE

SEQ ID NO: 1818 - protein, 2216 aa, synthetic construct
MPAAKRVKLDGGDKKYSIGLDIGTNSVGWAVITDEYKVPSKKFKVLGNTDRHSIKKNLIGALLFDSGETAEATRLKRTARRRYTRRKNRICYLQEIFSNEMAKVDDSFFHRLEESFLVEEDKKHERHPIFGNIVDEVAYHEKYPTIYHLRKKLVDSTDKADLRLIYLALAHMIKFRGHFLIEGDLNPDNSDVDKLFIQLVQTYNQLFEENPINASGVDAKAILSARLSKSRRLENLIAQLPGEKKNGLFGNLIALSLGLTPNFKSNFDLAEDAKLQLSKDTYDDDLDNLLAQIGDQYADLFLAAKNLSDAILLSDILRVNTEITKAPLSASMIKRYDEHHQDLTLLKALVRQQLPEKYKEIFFDQSKNGYAGYIDGGASQEEFYKFIKPILEKMDGTEELLVKLNREDLLRKQRTFDNGSIPHQIHLGELHAILRRQEDFYPFLKDNREKIEKILTFRIPYYVGPLARGNSRFAWMTRKSEETITPWNFEEVVDKGASAQSFIERMTNFDKNLPNEKVLPKHSLLYEYFTVYNELTKVKYVTEGMRKPAFLSGEQKKAIVDLLFKTNRKVTVKQLKEDYFKKIECFDSVEISGVEDRFNASLGTYHDLLKIIKDKDFLDNEENEDILEDIVLTLTLFEDREMIEERLKTYAHLFDDKVMKQLKRRRYTGWGRLSRKLINGIRDKQSGKTILDFLKSDGFANRNFMQLIHDDSLTFKEDIQKAQVSGQGDSLHEHIANLAGSPAIKKGILQTVKVVDELVKVMGRHKPENIVIEMARENQTTQKGQKNSRERMKRIEEGIKELGSQILKEHPVENTQLQNEKLYLYYLQNGRDMYVDQELDINRLSDYDVDHIVPQSFLKDDSIDNKVLTRSDKARGKSDNVPSEEVVKKMKNYWRQLLNAKLITQRKFDNLTKAERGGLSELDKAGFIKRQLVETRQITKHVAQILDSRMNTKYDENDKLIREVKVITLKSKLVSDFRKDFQFYKVREINNYHHAHDAYLNAVVGTALIKKYPKLESEFVYGDYKVYDVRKMIAKSEQEIGKATAKYFFYSNIMNFFKTEITLANGEIRKRPLIETNGETGEIVWDKGRDFATVRKVLSMPQVNIVKKTEVQTGGFSKESILPKRNSDKLIARKKDWDPKKYGGFDSPTVAYSVLVVAKVEKGKSKKLKSVKELLGITIMERSSFEKNPIDFLEAKGYKEVKKDLIIKLPKYSLFELENGRKRMLASAGELQKGNELALPSKYVNFLYLASHYEKLKGSPEDNEQKQLFVEQHKHYLDEIIEQISEFSKRVILADANLDKVLSAYNKHRDKPIREQAENIIHLFTLTNLGAPAAFKYFDTTIDRKRYTSTKEVLDATLIHQSITGLYETRIDLSQLGGDGGGGGGSSPAPGGTLGDQGSRGSDPLPEPRVTLTVEGIPTEFLVNTGAEHSVLTKPMGKMGSKRTVVAGATGSKVYPWTTKRLLKIGQKQVTHSFLVIPECPAPLLGRDLLTKLKAQIQFSTEGPQVTWEDRPAMCLVLNLEEEYRLHEKPVPPSIDPSWLQLFPMVWAEKAGMGLANQVPPVVVELKSDASPVAVRQYPMSKEAREGIRPHIQRFLDLGILVPCQSPWNTPLLPVKKPGTNDYRPVQDLREVNKRVQDIHPTVPNPYNLLSSLPPSHTWYSVLDLKDAFFCLKLHPNSQPLFAFEWRDPEKGNTGQLTWTRLPQGFKNSPTLFNEALHRDLASFRALNPQVVMLQYVDDLLVAAPTYRDCKEGTRRLLQELSKLGYRVSAKKAQLCREEVTYLGYLLKGGKRWLTPARKATVMKIPTPTTPRQVREFLGKAGFCRLFIPGFASLAAPLYPLTRPKVPFTWTEAHQEAFGRIKEALLSAPALALPDLTKPFALYVDEKEGVARGVLTQTLGPWRRPVAYLSKKLDPVASGWPTCLKAIAAVALLLKDADKLTLGQNVLVIAPHNLESIVRQPPDRWMTNARMTHYQSLLLNERVSFAPPAILNPATLLPVESDDTPIHICSEILAEETGTRPDLRDQPLPGVPAWYTDGSSFIMDGRRQAGAAIVDNKRTVWASNLPEGTSAQKAELIALTQALRLAEGKSINIYTDSRYAFATAHVHGAIYKQRGWLTSAGKDIKNKEEILALLEAIHLPKRVAIIHCPGHQRGTDPVATGNRKADEAAKQAAQSTRILTETTKNAGKRTADGSEFEKRTADGSEFESPKKKAKVE

SEQ ID NO: 1819 - protein, 2216 aa, synthetic construct
MPAAKRVKLDGGDKKYSIGLDIGTNSVGWAVITDEYKVPSKKFKVLGNTDRHSIKKNLIGALLFDSGETAEATRLKRTARRRYTRRKNRICYLQEIFSNEMAKVDDSFFHRLEESFLVEEDKKHERHPIFGNIVDEVAYHEKYPTIYHLRKKLVDSTDKADLRLIYLALAHMIKFRGHFLIEGDLNPDNSDVDKLFIQLVQTYNQLFEENPINASGVDAKAILSARLSKSRRLENLIAQLPGEKKNGLFGNLIALSLGLTPNFKSNFDLAEDAKLQLSKDTYDDDLDNLLAQIGDQYADLFLAAKNLSDAILLSDILRVNTEITKAPLSASMIKRYDEHHQDLTLLKALVRQQLPEKYKEIFFDQSKNGYAGYIDGGASQEEFYKFIKPILEKMDGTEELLVKLNREDLLRKQRTFDNGSIPHQIHLGELHAILRRQEDFYPFLKDNREKIEKILTFRIPYYVGPLARGNSRFAWMTRKSEETITPWNFEEVVDKGASAQSFIERMTNFDKNLPNEKVLPKHSLLYEYFTVYNELTKVKYVTEGMRKPAFLSGEQKKAIVDLLFKTNRKVTVKQLKEDYFKKIECFDSVEISGVEDRFNASLGTYHDLLKIIKDKDFLDNEENEDILEDIVLTLTLFEDREMIEERLKTYAHLFDDKVMKQLKRRRYTGWGRLSRKLINGIRDKQSGKTILDFLKSDGFANRNFMQLIHDDSLTFKEDIQKAQVSGQGDSLHEHIANLAGSPAIKKGILQTVKVVDELVKVMGRHKPENIVIEMARENQTTQKGQKNSRERMKRIEEGIKELGSQILKEHPVENTQLQNEKLYLYYLQNGRDMYVDQELDINRLSDYDVDHIVPQSFLKDDSIDNKVLTRSDKARGKSDNVPSEEVVKKMKNYWRQLLNAKLITQRKFDNLTKAERGGLSELDKAGFIKRQLVETRQITKHVAQILDSRMNTKYDENDKLIREVKVITLKSKLVSDFRKDFQFYKVREINNYHHAHDAYLNAVVGTALIKKYPKLESEFVYGDYKVYDVRKMIAKSEQEIGKATAKYFFYSNIMNFFKTEITLANGEIRKRPLIETNGETGEIVWDKGRDFATVRKVLSMPQVNIVKKTEVQTGGFSKESILPKRNSDKLIARKKDWDPKKYGGFDSPTVAYSVLVVAKVEKGKSKKLKSVKELLGITIMERSSFEKNPIDFLEAKGYKEVKKDLIIKLPKYSLFELENGRKRMLASAGELQKGNELALPSKYVNFLYLASHYEKLKGSPEDNEQKQLFVEQHKHYLDEIIEQISEFSKRVILADANLDKVLSAYNKHRDKPIREQAENIIHLFTLTNLGAPAAFKYFDTTIDRKRYTSTKEVLDATLIHQSITGLYETRIDLSQLGGDGGGGSGGGGSSGGTLGDQGSRGSDPLPEPRVTLTVEGIPTEFLVNTGAEHSVLTKPMGKMGSKRTVVAGATGSKVYPWTTKRLLKIGQKQVTHSFLVIPECPAPLLGRDLLTKLKAQIQFSTEGPQVTWEDRPAMCLVLNLEEEYRLHEKPVPPSIDPSWLQLFPMVWAEKAGMGLANQVPPVVVELKSDASPVAVRQYPMSKEAREGIRPHIQRFLDLGILVPCQSPWNTPLLPVKKPGTNDYRPVQDLREVNKRVQDIHPTVPNPYNLLSSLPPSHTWYSVLDLKDAFFCLKLHPNSQPLFAFEWRDPEKGNTGQLTWTRLPQGFKNSPTLFNEALHRDLASFRALNPQVVMLQYVDDLLVAAPTYRDCKEGTRRLLQELSKLGYRVSAKKAQLCREEVTYLGYLLKGGKRWLTPARKATVMKIPTPTTPRQVREFLGKAGFCRLFIPGFASLAAPLYPLTRPKVPFTWTEAHQEAFGRIKEALLSAPALALPDLTKPFALYVDEKEGVARGVLTQTLGPWRRPVAYLSKKLDPVASGWPTCLKAIAAVALLLKDADKLTLGQNVLVIAPHNLESIVRQPPDRWMTNARMTHYQSLLLNERVSFAPPAILNPATLLPVESDDTPIHICSEILAEETGTRPDLRDQPLPGVPAWYTDGSSFIMDGRRQAGAAIVDNKRTVWASNLPEGTSAQKAELIALTQALRLAEGKSINIYTDSRYAFATAHVHGAIYKQRGWLTSAGKDIKNKEEILALLEAIHLPKRVAIIHCPGHQRGTDPVATGNRKADEAAKQAAQSTRILTETTKNAGKRTADGSEFEKRTADGSEFESPKKKAKVE

SEQ ID NO: 1820 - protein, 2215 aa, synthetic construct
MPAAKRVKLDGGDKKYSIGLDIGTNSVGWAVITDEYKVPSKKFKVLGNTDRHSIKKNLIGALLFDSGETAEATRLKRTARRRYTRRKNRICYLQEIFSNEMAKVDDSFFHRLEESFLVEEDKKHERHPIFGNIVDEVAYHEKYPTIYHLRKKLVDSTDKADLRLIYLALAHMIKFRGHFLIEGDLNPDNSDVDKLFIQLVQTYNQLFEENPINASGVDAKAILSARLSKSRRLENLIAQLPGEKKNGLFGNLIALSLGLTPNFKSNFDLAEDAKLQLSKDTYDDDLDNLLAQIGDQYADLFLAAKNLSDAILLSDILRVNTEITKAPLSASMIKRYDEHHQDLTLLKALVRQQLPEKYKEIFFDQSKNGYAGYIDGGASQEEFYKFIKPILEKMDGTEELLVKLNREDLLRKQRTFDNGSIPHQIHLGELHAILRRQEDFYPFLKDNREKIEKILTFRIPYYVGPLARGNSRFAWMTRKSEETITPWNFEEVVDKGASAQSFIERMTNFDKNLPNEKVLPKHSLLYEYFTVYNELTKVKYVTEGMRKPAFLSGEQKKAIVDLLFKTNRKVTVKQLKEDYFKKIECFDSVEISGVEDRFNASLGTYHDLLKIIKDKDFLDNEENEDILEDIVLTLTLFEDREMIEERLKTYAHLFDDKVMKQLKRRRYTGWGRLSRKLINGIRDKQSGKTILDFLKSDGFANRNFMQLIHDDSLTFKEDIQKAQVSGQGDSLHEHIANLAGSPAIKKGILQTVKVVDELVKVMGRHKPENIVIEMARENQTTQKGQKNSRERMKRIEEGIKELGSQILKEHPVENTQLQNEKLYLYYLQNGRDMYVDQELDINRLSDYDVDHIVPQSFLKDDSIDNKVLTRSDKARGKSDNVPSEEVVKKMKNYWRQLLNAKLITQRKFDNLTKAERGGLSELDKAGFIKRQLVETRQITKHVAQILDSRMNTKYDENDKLIREVKVITLKSKLVSDFRKDFQFYKVREINNYHHAHDAYLNAVVGTALIKKYPKLESEFVYGDYKVYDVRKMIAKSEQEIGKATAKYFFYSNIMNFFKTEITLANGEIRKRPLIETNGETGEIVWDKGRDFATVRKVLSMPQVNIVKKTEVQTGGFSKESILPKRNSDKLIARKKDWDPKKYGGFDSPTVAYSVLVVAKVEKGKSKKLKSVKELLGITIMERSSFEKNPIDFLEAKGYKEVKKDLIIKLPKYSLFELENGRKRMLASAGELQKGNELALPSKYVNFLYLASHYEKLKGSPEDNEQKQLFVEQHKHYLDEIIEQISEFSKRVILADANLDKVLSAYNKHRDKPIREQAENIIHLFTLTNLGAPAAFKYFDTTIDRKRYTSTKEVLDATLIHQSITGLYETRIDLSQLGGDGGEAAAKGGGGGTLGDQGSRGSDPLPEPRVTLTVEGIPTEFLVNTGAEHSVLTKPMGKMGSKRTVVAGATGSKVYPWTTKRLLKIGQKQVTHSFLVIPECPAPLLGRDLLTKLKAQIQFSTEGPQVTWEDRPAMCLVLNLEEEYRLHEKPVPPSIDPSWLQLFPMVWAEKAGMGLANQVPPVVVELKSDASPVAVRQYPMSKEAREGIRPHIQRFLDLGILVPCQSPWNTPLLPVKKPGTNDYRPVQDLREVNKRVQDIHPTVPNPYNLLSSLPPSHTWYSVLDLKDAFFCLKLHPNSQPLFAFEWRDPEKGNTGQLTWTRLPQGFKNSPTLFNEALHRDLASFRALNPQVVMLQYVDDLLVAAPTYRDCKEGTRRLLQELSKLGYRVSAKKAQLCREEVTYLGYLLKGGKRWLTPARKATVMKIPTPTTPRQVREFLGKAGFCRLFIPGFASLAAPLYPLTRPKVPFTWTEAHQEAFGRIKEALLSAPALALPDLTKPFALYVDEKEGVARGVLTQTLGPWRRPVAYLSKKLDPVASGWPTCLKAIAAVALLLKDADKLTLGQNVLVIAPHNLESIVRQPPDRWMTNARMTHYQSLLLNERVSFAPPAILNPATLLPVESDDTPIHICSEILAEETGTRPDLRDQPLPGVPAWYTDGSSFIMDGRRQAGAAIVDNKRTVWASNLPEGTSAQKAELIALTQALRLAEGKSINIYTDSRYAFATAHVHGAIYKQRGWLTSAGKDIKNKEEILALLEAIHLPKRVAIIHCPGHQRGTDPVATGNRKADEAAKQAAQSTRILTETTKNAGKRTADGSEFEKRTADGSEFESPKKKAKVE

SEQ ID NO: 1821 - protein, 2215 aa, synthetic construct
MPAAKRVKLDGGDKKYSIGLDIGTNSVGWAVITDEYKVPSKKFKVLGNTDRHSIKKNLIGALLFDSGETAEATRLKRTARRRYTRRKNRICYLQEIFSNEMAKVDDSFFHRLEESFLVEEDKKHERHPIFGNIVDEVAYHEKYPTIYHLRKKLVDSTDKADLRLIYLALAHMIKFRGHFLIEGDLNPDNSDVDKLFIQLVQTYNQLFEENPINASGVDAKAILSARLSKSRRLENLIAQLPGEKKNGLFGNLIALSLGLTPNFKSNFDLAEDAKLQLSKDTYDDDLDNLLAQIGDQYADLFLAAKNLSDAILLSDILRVNTEITKAPLSASMIKRYDEHHQDLTLLKALVRQQLPEKYKEIFFDQSKNGYAGYIDGGASQEEFYKFIKPILEKMDGTEELLVKLNREDLLRKQRTFDNGSIPHQIHLGELHAILRRQEDFYPFLKDNREKIEKILTFRIPYYVGPLARGNSRFAWMTRKSEETITPWNFEEVVDKGASAQSFIERMTNFDKNLPNEKVLPKHSLLYEYFTVYNELTKVKYVTEGMRKPAFLSGEQKKAIVDLLFKTNRKVTVKQLKEDYFKKIECFDSVEISGVEDRFNASLGTYHDLLKIIKDKDFLDNEENEDILEDIVLTLTLFEDREMIEERLKTYAHLFDDKVMKQLKRRRYTGWGRLSRKLINGIRDKQSGKTILDFLKSDGFANRNFMQLIHDDSLTFKEDIQKAQVSGQGDSLHEHIANLAGSPAIKKGILQTVKVVDELVKVMGRHKPENIVIEMARENQTTQKGQKNSRERMKRIEEGIKELGSQILKEHPVENTQLQNEKLYLYYLQNGRDMYVDQELDINRLSDYDVDHIVPQSFLKDDSIDNKVLTRSDKARGKSDNVPSEEVVKKMKNYWRQLLNAKLITQRKFDNLTKAERGGLSELDKAGFIKRQLVETRQITKHVAQILDSRMNTKYDENDKLIREVKVITLKSKLVSDFRKDFQFYKVREINNYHHAHDAYLNAVVGTALIKKYPKLESEFVYGDYKVYDVRKMIAKSEQEIGKATAKYFFYSNIMNFFKTEITLANGEIRKRPLIETNGETGEIVWDKGRDFATVRKVLSMPQVNIVKKTEVQTGGFSKESILPKRNSDKLIARKKDWDPKKYGGFDSPTVAYSVLVVAKVEKGKSKKLKSVKELLGITIMERSSFEKNPIDFLEAKGYKEVKKDLIIKLPKYSLFELENGRKRMLASAGELQKGNELALPSKYVNFLYLASHYEKLKGSPEDNEQKQLFVEQHKHYLDEIIEQISEFSKRVILADANLDKVLSAYNKHRDKPIREQAENIIHLFTLTNLGAPAAFKYFDTTIDRKRYTSTKEVLDATLIHQSITGLYETRIDLSQLGGDGGEAAAKGGSGGTLGDQGSRGSDPLPEPRVTLTVEGIPTEFLVNTGAEHSVLTKPMGKMGSKRTVVAGATGSKVYPWTTKRLLKIGQKQVTHSFLVIPECPAPLLGRDLLTKLKAQIQFSTEGPQVTWEDRPAMCLVLNLEEEYRLHEKPVPPSIDPSWLQLFPMVWAEKAGMGLANQVPPVVVELKSDASPVAVRQYPMSKEAREGIRPHIQRFLDLGILVPCQSPWNTPLLPVKKPGTNDYRPVQDLREVNKRVQDIHPTVPNPYNLLSSLPPSHTWYSVLDLKDAFFCLKLHPNSQPLFAFEWRDPEKGNTGQLTWTRLPQGFKNSPTLFNEALHRDLASFRALNPQVVMLQYVDDLLVAAPTYRDCKEGTRRLLQELSKLGYRVSAKKAQLCREEVTYLGYLLKGGKRWLTPARKATVMKIPTPTTPRQVREFLGKAGFCRLFIPGFASLAAPLYPLTRPKVPFTWTEAHQEAFGRIKEALLSAPALALPDLTKPFALYVDEKEGVARGVLTQTLGPWRRPVAYLSKKLDPVASGWPTCLKAIAAVALLLKDADKLTLGQNVLVIAPHNLESIVRQPPDRWMTNARMTHYQSLLLNERVSFAPPAILNPATLLPVESDDTPIHICSEILAEETGTRPDLRDQPLPGVPAWYTDGSSFIMDGRRQAGAAIVDNKRTVWASNLPEGTSAQKAELIALTQALRLAEGKSINIYTDSRYAFATAHVHGAIYKQRGWLTSAGKDIKNKEEILALLEAIHLPKRVAIIHCPGHQRGTDPVATGNRKADEAAKQAAQSTRILTETTKNAGKRTADGSEFEKRTADGSEFESPKKKAKVE

SEQ ID NO: 1822 - protein, 2218 aa, synthetic construct
MPAAKRVKLDGGDKKYSIGLDIGTNSVGWAVITDEYKVPSKKFKVLGNTDRHSIKKNLIGALLFDSGETAEATRLKRTARRRYTRRKNRICYLQEIFSNEMAKVDDSFFHRLEESFLVEEDKKHERHPIFGNIVDEVAYHEKYPTIYHLRKKLVDSTDKADLRLIYLALAHMIKFRGHFLIEGDLNPDNSDVDKLFIQLVQTYNQLFEENPINASGVDAKAILSARLSKSRRLENLIAQLPGEKKNGLFGNLIALSLGLTPNFKSNFDLAEDAKLQLSKDTYDDDLDNLLAQIGDQYADLFLAAKNLSDAILLSDILRVNTEITKAPLSASMIKRYDEHHQDLTLLKALVRQQLPEKYKEIFFDQSKNGYAGYIDGGASQEEFYKFIKPILEKMDGTEELLVKLNREDLLRKQRTFDNGSIPHQIHLGELHAILRRQEDFYPFLKDNREKIEKILTFRIPYYVGPLARGNSRFAWMTRKSEETITPWNFEEVVDKGASAQSFIERMTNFDKNLPNEKVLPKHSLLYEYFTVYNELTKVKYVTEGMRKPAFLSGEQKKAIVDLLFKTNRKVTVKQLKEDYFKKIECFDSVEISGVEDRFNASLGTYHDLLKIIKDKDFLDNEENEDILEDIVLTLTLFEDREMIEERLKTYAHLFDDKVMKQLKRRRYTGWGRLSRKLINGIRDKQSGKTILDFLKSDGFANRNFMQLIHDDSLTFKEDIQKAQVSGQGDSLHEHIANLAGSPAIKKGILQTVKVVDELVKVMGRHKPENIVIEMARENQTTQKGQKNSRERMKRIEEGIKELGSQILKEHPVENTQLQNEKLYLYYLQNGRDMYVDQELDINRLSDYDVDHIVPQSFLKDDSIDNKVLTRSDKARGKSDNVPSEEVVKKMKNYWRQLLNAKLITQRKFDNLTKAERGGLSELDKAGFIKRQLVETRQITKHVAQILDSRMNTKYDENDKLIREVKVITLKSKLVSDFRKDFQFYKVREINNYHHAHDAYLNAVVGTALIKKYPKLESEFVYGDYKVYDVRKMIAKSEQEIGKATAKYFFYSNIMNFFKTEITLANGEIRKRPLIETNGETGEIVWDKGRDFATVRKVLSMPQVNIVKKTEVQTGGFSKESILPKRNSDKLIARKKDWDPKKYGGFDSPTVAYSVLVVAKVEKGKSKKLKSVKELLGITIMERSSFEKNPIDFLEAKGYKEVKKDLIIKLPKYSLFELENGRKRMLASAGELQKGNELALPSKYVNFLYLASHYEKLKGSPEDNEQKQLFVEQHKHYLDEIIEQISEFSKRVILADANLDKVLSAYNKHRDKPIREQAENIIHLFTLTNLGAPAAFKYFDTTIDRKRYTSTKEVLDATLIHQSITGLYETRIDLSQLGGDGGEAAAKPAPGSSGGTLGDQGSRGSDPLPEPRVTLTVEGIPTEFLVNTGAEHSVLTKPMGKMGSKRTVVAGATGSKVYPWTTKRLLKIGQKQVTHSFLVIPECPAPLLGRDLLTKLKAQIQFSTEGPQVTWEDRPAMCLVLNLEEEYRLHEKPVPPSIDPSWLQLFPMVWAEKAGMGLANQVPPVVVELKSDASPVAVRQYPMSKEAREGIRPHIQRFLDLGILVPCQSPWNTPLLPVKKPGTNDYRPVQDLREVNKRVQDIHPTVPNPYNLLSSLPPSHTWYSVLDLKDAFFCLKLHPNSQPLFAFEWRDPEKGNTGQLTWTRLPQGFKNSPTLFNEALHRDLASFRALNPQVVMLQYVDDLLVAAPTYRDCKEGTRRLLQELSKLGYRVSAKKAQLCREEVTYLGYLLKGGKRWLTPARKATVMKIPTPTTPRQVREFLGKAGFCRLFIPGFASLAAPLYPLTRPKVPFTWTEAHQEAFGRIKEALLSAPALALPDLTKPFALYVDEKEGVARGVLTQTLGPWRRPVAYLSKKLDPVASGWPTCLKAIAAVALLLKDADKLTLGQNVLVIAPHNLESIVRQPPDRWMTNARMTHYQSLLLNERVSFAPPAILNPATLLPVESDDTPIHICSEILAEETGTRPDLRDQPLPGVPAWYTDGSSFIMDGRRQAGAAIVDNKRTVWASNLPEGTSAQKAELIALTQALRLAEGKSINIYTDSRYAFATAHVHGAIYKQRGWLTSAGKDIKNKEEILALLEAIHLPKRVAIIHCPGHQRGTDPVATGNRKADEAAKQAAQSTRILTETTKNAGKRTADGSEFEKRTADGSEFESPKKKAKVE

SEQ ID NO: 1823 - protein, 2218 aa, synthetic construct
MPAAKRVKLDGGDKKYSIGLDIGTNSVGWAVITDEYKVPSKKFKVLGNTDRHSIKKNLIGALLFDSGETAEATRLKRTARRRYTRRKNRICYLQEIFSNEMAKVDDSFFHRLEESFLVEEDKKHERHPIFGNIVDEVAYHEKYPTIYHLRKKLVDSTDKADLRLIYLALAHMIKFRGHFLIEGDLNPDNSDVDKLFIQLVQTYNQLFEENPINASGVDAKAILSARLSKSRRLENLIAQLPGEKKNGLFGNLIALSLGLTPNFKSNFDLAEDAKLQLSKDTYDDDLDNLLAQIGDQYADLFLAAKNLSDAILLSDILRVNTEITKAPLSASMIKRYDEHHQDLTLLKALVRQQLPEKYKEIFFDQSKNGYAGYIDGGASQEEFYKFIKPILEKMDGTEELLVKLNREDLLRKQRTFDNGSIPHQIHLGELHAILRRQEDFYPFLKDNREKIEKILTFRIPYYVGPLARGNSRFAWMTRKSEETITPWNFEEVVDKGASAQSFIERMTNFDKNLPNEKVLPKHSLLYEYFTVYNELTKVKYVTEGMRKPAFLSGEQKKAIVDLLFKTNRKVTVKQLKEDYFKKIECFDSVEISGVEDRFNASLGTYHDLLKIIKDKDFLDNEENEDILEDIVLTLTLFEDREMIEERLKTYAHLFDDKVMKQLKRRRYTGWGRLSRKLINGIRDKQSGKTILDFLKSDGFANRNFMQLIHDDSLTFKEDIQKAQVSGQGDSLHEHIANLAGSPAIKKGILQTVKVVDELVKVMGRHKPENIVIEMARENQTTQKGQKNSRERMKRIEEGIKELGSQILKEHPVENTQLQNEKLYLYYLQNGRDMYVDQELDINRLSDYDVDHIVPQSFLKDDSIDNKVLTRSDKARGKSDNVPSEEVVKKMKNYWRQLLNAKLITQRKFDNLTKAERGGLSELDKAGFIKRQLVETRQITKHVAQILDSRMNTKYDENDKLIREVKVITLKSKLVSDFRKDFQFYKVREINNYHHAHDAYLNAVVGTALIKKYPKLESEFVYGDYKVYDVRKMIAKSEQEIGKATAKYFFYSNIMNFFKTEITLANGEIRKRPLIETNGETGEIVWDKGRDFATVRKVLSMPQVNIVKKTEVQTGGFSKESILPKRNSDKLIARKKDWDPKKYGGFDSPTVAYSVLVVAKVEKGKSKKLKSVKELLGITIMERSSFEKNPIDFLEAKGYKEVKKDLIIKLPKYSLFELENGRKRMLASAGELQKGNELALPSKYVNFLYLASHYEKLKGSPEDNEQKQLFVEQHKHYLDEIIEQISEFSKRVILADANLDKVLSAYNKHRDKPIREQAENIIHLFTLTNLGAPAAFKYFDTTIDRKRYTSTKEVLDATLIHQSITGLYETRIDLSQLGGDGGGGGGSSEAAAKGGTLGDQGSRGSDPLPEPRVTLTVEGIPTEFLVNTGAEHSVLTKPMGKMGSKRTVVAGATGSKVYPWTTKRLLKIGQKQVTHSFLVIPECPAPLLGRDLLTKLKAQIQFSTEGPQVTWEDRPAMCLVLNLEEEYRLHEKPVPPSIDPSWLQLFPMVWAEKAGMGLANQVPPVVVELKSDASPVAVRQYPMSKEAREGIRPHIQRFLDLGILVPCQSPWNTPLLPVKKPGTNDYRPVQDLREVNKRVQDIHPTVPNPYNLLSSLPPSHTWYSVLDLKDAFFCLKLHPNSQPLFAFEWRDPEKGNTGQLTWTRLPQGFKNSPTLFNEALHRDLASFRALNPQVVMLQYVDDLLVAAPTYRDCKEGTRRLLQELSKLGYRVSAKKAQLCREEVTYLGYLLKGGKRWLTPARKATVMKIPTPTTPRQVREFLGKAGFCRLFIPGFASLAAPLYPLTRPKVPFTWTEAHQEAFGRIKEALLSAPALALPDLTKPFALYVDEKEGVARGVLTQTLGPWRRPVAYLSKKLDPVASGWPTCLKAIAAVALLLKDADKLTLGQNVLVIAPHNLESIVRQPPDRWMTNARMTHYQSLLLNERVSFAPPAILNPATLLPVESDDTPIHICSEILAEETGTRPDLRDQPLPGVPAWYTDGSSFIMDGRRQAGAAIVDNKRTVWASNLPEGTSAQKAELIALTQALRLAEGKSINIYTDSRYAFATAHVHGAIYKQRGWLTSAGKDIKNKEEILALLEAIHLPKRVAIIHCPGHQRGTDPVATGNRKADEAAKQAAQSTRILTETTKNAGKRTADGSEFEKRTADGSEFESPKKKAKVE

SEQ ID NO: 1824 - protein, 2216 aa, synthetic construct
MPAAKRVKLDGGDKKYSIGLDIGTNSVGWAVITDEYKVPSKKFKVLGNTDRHSIKKNLIGALLFDSGETAEATRLKRTARRRYTRRKNRICYLQEIFSNEMAKVDDSFFHRLEESFLVEEDKKHERHPIFGNIVDEVAYHEKYPTIYHLRKKLVDSTDKADLRLIYLALAHMIKFRGHFLIEGDLNPDNSDVDKLFIQLVQTYNQLFEENPINASGVDAKAILSARLSKSRRLENLIAQLPGEKKNGLFGNLIALSLGLTPNFKSNFDLAEDAKLQLSKDTYDDDLDNLLAQIGDQYADLFLAAKNLSDAILLSDILRVNTEITKAPLSASMIKRYDEHHQDLTLLKALVRQQLPEKYKEIFFDQSKNGYAGYIDGGASQEEFYKFIKPILEKMDGTEELLVKLNREDLLRKQRTFDNGSIPHQIHLGELHAILRRQEDFYPFLKDNREKIEKILTFRIPYYVGPLARGNSRFAWMTRKSEETITPWNFEEVVDKGASAQSFIERMTNFDKNLPNEKVLPKHSLLYEYFTVYNELTKVKYVTEGMRKPAFLSGEQKKAIVDLLFKTNRKVTVKQLKEDYFKKIECFDSVEISGVEDRFNASLGTYHDLLKIIKDKDFLDNEENEDILEDIVLTLTLFEDREMIEERLKTYAHLFDDKVMKQLKRRRYTGWGRLSRKLINGIRDKQSGKTILDFLKSDGFANRNFMQLIHDDSLTFKEDIQKAQVSGQGDSLHEHIANLAGSPAIKKGILQTVKVVDELVKVMGRHKPENIVIEMARENQTTQKGQKNSRERMKRIEEGIKELGSQILKEHPVENTQLQNEKLYLYYLQNGRDMYVDQELDINRLSDYDVDHIVPQSFLKDDSIDNKVLTRSDKARGKSDNVPSEEVVKKMKNYWRQLLNAKLITQRKFDNLTKAERGGLSELDKAGFIKRQLVETRQITKHVAQILDSRMNTKYDENDKLIREVKVITLKSKLVSDFRKDFQFYKVREINNYHHAHDAYLNAVVGTALIKKYPKLESEFVYGDYKVYDVRKMIAKSEQEIGKATAKYFFYSNIMNFFKTEITLANGEIRKRPLIETNGETGEIVWDKGRDFATVRKVLSMPQVNIVKKTEVQTGGFSKESILPKRNSDKLIARKKDWDPKKYGGFDSPTVAYSVLVVAKVEKGKSKKLKSVKELLGITIMERSSFEKNPIDFLEAKGYKEVKKDLIIKLPKYSLFELENGRKRMLASAGELQKGNELALPSKYVNFLYLASHYEKLKGSPEDNEQKQLFVEQHKHYLDEIIEQISEFSKRVILADANLDKVLSAYNKHRDKPIREQAENIIHLFTLTNLGAPAAFKYFDTTIDRKRYTSTKEVLDATLIHQSITGLYETRIDLSQLGGDGGPAPAPAPAPGGTLGDQGSRGSDPLPEPRVTLTVEGIPTEFLVNTGAEHSVLTKPMGKMGSKRTVVAGATGSKVYPWTTKRLLKIGQKQVTHSFLVIPECPAPLLGRDLLTKLKAQIQFSTEGPQVTWEDRPAMCLVLNLEEEYRLHEKPVPPSIDPSWLQLFPMVWAEKAGMGLANQVPPVVVELKSDASPVAVRQYPMSKEAREGIRPHIQRFLDLGILVPCQSPWNTPLLPVKKPGTNDYRPVQDLREVNKRVQDIHPTVPNPYNLLSSLPPSHTWYSVLDLKDAFFCLKLHPNSQPLFAFEWRDPEKGNTGQLTWTRLPQGFKNSPTLFNEALHRDLASFRALNPQVVMLQYVDDLLVAAPTYRDCKEGTRRLLQELSKLGYRVSAKKAQLCREEVTYLGYLLKGGKRWLTPARKATVMKIPTPTTPRQVREFLGKAGFCRLFIPGFASLAAPLYPLTRPKVPFTWTEAHQEAFGRIKEALLSAPALALPDLTKPFALYVDEKEGVARGVLTQTLGPWRRPVAYLSKKLDPVASGWPTCLKAIAAVALLLKDADKLTLGQNVLVIAPHNLESIVRQPPDRWMTNARMTHYQSLLLNERVSFAPPAILNPATLLPVESDDTPIHICSEILAEETGTRPDLRDQPLPGVPAWYTDGSSFIMDGRRQAGAAIVDNKRTVWASNLPEGTSAQKAELIALTQALRLAEGKSINIYTDSRYAFATAHVHGAIYKQRGWLTSAGKDIKNKEEILALLEAIHLPKRVAIIHCPGHQRGTDPVATGNRKADEAAKQAAQSTRILTETTKNAGKRTADGSEFEKRTADGSEFESPKKKAKVE

SEQ ID NO: 1825 - protein, 2215 aa, synthetic construct
MPAAKRVKLDGGDKKYSIGLDIGTNSVGWAVITDEYKVPSKKFKVLGNTDRHSIKKNLIGALLFDSGETAEATRLKRTARRRYTRRKNRICYLQEIFSNEMAKVDDSFFHRLEESFLVEEDKKHERHPIFGNIVDEVAYHEKYPTIYHLRKKLVDSTDKADLRLIYLALAHMIKFRGHFLIEGDLNPDNSDVDKLFIQLVQTYNQLFEENPINASGVDAKAILSARLSKSRRLENLIAQLPGEKKNGLFGNLIALSLGLTPNFKSNFDLAEDAKLQLSKDTYDDDLDNLLAQIGDQYADLFLAAKNLSDAILLSDILRVNTEITKAPLSASMIKRYDEHHQDLTLLKALVRQQLPEKYKEIFFDQSKNGYAGYIDGGASQEEFYKFIKPILEKMDGTEELLVKLNREDLLRKQRTFDNGSIPHQIHLGELHAILRRQEDFYPFLKDNREKIEKILTFRIPYYVGPLARGNSRFAWMTRKSEETITPWNFEEVVDKGASAQSFIERMTNFDKNLPNEKVLPKHSLLYEYFTVYNELTKVKYVTEGMRKPAFLSGEQKKAIVDLLFKTNRKVTVKQLKEDYFKKIECFDSVEISGVEDRFNASLGTYHDLLKIIKDKDFLDNEENEDILEDIVLTLTLFEDREMIEERLKTYAHLFDDKVMKQLKRRRYTGWGRLSRKLINGIRDKQSGKTILDFLKSDGFANRNFMQLIHDDSLTFKEDIQKAQVSGQGDSLHEHIANLAGSPAIKKGILQTVKVVDELVKVMGRHKPENIVIEMARENQTTQKGQKNSRERMKRIEEGIKELGSQILKEHPVENTQLQNEKLYLYYLQNGRDMYVDQELDINRLSDYDVDHIVPQSFLKDDSIDNKVLTRSDKARGKSDNVPSEEVVKKMKNYWRQLLNAKLITQRKFDNLTKAERGGLSELDKAGFIKRQLVETRQITKHVAQILDSRMNTKYDENDKLIREVKVITLKSKLVSDFRKDFQFYKVREINNYHHAHDAYLNAVVGTALIKKYPKLESEFVYGDYKVYDVRKMIAKSEQEIGKATAKYFFYSNIMNFFKTEITLANGEIRKRPLIETNGETGEIVWDKGRDFATVRKVLSMPQVNIVKKTEVQTGGFSKESILPKRNSDKLIARKKDWDPKKYGGFDSPTVAYSVLVVAKVEKGKSKKLKSVKELLGITIMERSSFEKNPIDFLEAKGYKEVKKDLIIKLPKYSLFELENGRKRMLASAGELQKGNELALPSKYVNFLYLASHYEKLKGSPEDNEQKQLFVEQHKHYLDEIIEQISEFSKRVILADANLDKVLSAYNKHRDKPIREQAENIIHLFTLTNLGAPAAFKYFDTTIDRKRYTSTKEVLDATLIHQSITGLYETRIDLSQLGGDGGGGSEAAAKGGTLGDQGSRGSDPLPEPRVTLTVEGIPTEFLVNTGAEHSVLTKPMGKMGSKRTVVAGATGSKVYPWTTKRLLKIGQKQVTHSFLVIPECPAPLLGRDLLTKLKAQIQFSTEGPQVTWEDRPAMCLVLNLEEEYRLHEKPVPPSIDPSWLQLFPMVWAEKAGMGLANQVPPVVVELKSDASPVAVRQYPMSKEAREGIRPHIQRFLDLGILVPCQSPWNTPLLPVKKPGTNDYRPVQDLREVNKRVQDIHPTVPNPYNLLSSLPPSHTWYSVLDLKDAFFCLKLHPNSQPLFAFEWRDPEKGNTGQLTWTRLPQGFKNSPTLFNEALHRDLASFRALNPQVVMLQYVDDLLVAAPTYRDCKEGTRRLLQELSKLGYRVSAKKAQLCREEVTYLGYLLKGGKRWLTPARKATVMKIPTPTTPRQVREFLGKAGFCRLFIPGFASLAAPLYPLTRPKVPFTWTEAHQEAFGRIKEALLSAPALALPDLTKPFALYVDEKEGVARGVLTQTLGPWRRPVAYLSKKLDPVASGWPTCLKAIAAVALLLKDADKLTLGQNVLVIAPHNLESIVRQPPDRWMTNARMTHYQSLLLNERVSFAPPAILNPATLLPVESDDTPIHICSEILAEETGTRPDLRDQPLPGVPAWYTDGSSFIMDGRRQAGAAIVDNKRTVWASNLPEGTSAQKAELIALTQALRLAEGKSINIYTDSRYAFATAHVHGAIYKQRGWLTSAGKDIKNKEEILALLEAIHLPKRVAIIHCPGHQRGTDPVATGNRKADEAAKQAAQSTRILTETTKNAGKRTADGSEFEKRTADGSEFESPKKKAKVE

SEQ ID NO: 1826 - protein, 2216 aa, synthetic construct
MPAAKRVKLDGGDKKYSIGLDIGTNSVGWAVITDEYKVPSKKFKVLGNTDRHSIKKNLIGALLFDSGETAEATRLKRTARRRYTRRKNRICYLQEIFSNEMAKVDDSFFHRLEESFLVEEDKKHERHPIFGNIVDEVAYHEKYPTIYHLRKKLVDSTDKADLRLIYLALAHMIKFRGHFLIEGDLNPDNSDVDKLFIQLVQTYNQLFEENPINASGVDAKAILSARLSKSRRLENLIAQLPGEKKNGLFGNLIALSLGLTPNFKSNFDLAEDAKLQLSKDTYDDDLDNLLAQIGDQYADLFLAAKNLSDAILLSDILRVNTEITKAPLSASMIKRYDEHHQDLTLLKALVRQQLPEKYKEIFFDQSKNGYAGYIDGGASQEEFYKFIKPILEKMDGTEELLVKLNREDLLRKQRTFDNGSIPHQIHLGELHAILRRQEDFYPFLKDNREKIEKILTFRIPYYVGPLARGNSRFAWMTRKSEETITPWNFEEVVDKGASAQSFIERMTNFDKNLPNEKVLPKHSLLYEYFTVYNELTKVKYVTEGMRKPAFLSGEQKKAIVDLLFKTNRKVTVKQLKEDYFKKIECFDSVEISGVEDRFNASLGTYHDLLKIIKDKDFLDNEENEDILEDIVLTLTLFEDREMIEERLKTYAHLFDDKVMKQLKRRRYTGWGRLSRKLINGIRDKQSGKTILDFLKSDGFANRNFMQLIHDDSLTFKEDIQKAQVSGQGDSLHEHIANLAGSPAIKKGILQTVKVVDELVKVMGRHKPENIVIEMARENQTTQKGQKNSRERMKRIEEGIKELGSQILKEHPVENTQLQNEKLYLYYLQNGRDMYVDQELDINRLSDYDVDHIVPQSFLKDDSIDNKVLTRSDKARGKSDNVPSEEVVKKMKNYWRQLLNAKLITQRKFDNLTKAERGGLSELDKAGFIKRQLVETRQITKHVAQILDSRMNTKYDENDKLIREVKVITLKSKLVSDFRKDFQFYKVREINNYHHAHDAYLNAVVGTALIKKYPKLESEFVYGDYKVYDVRKMIAKSEQEIGKATAKYFFYSNIMNFFKTEITLANGEIRKRPLIETNGETGEIVWDKGRDFATVRKVLSMPQVNIVKKTEVQTGGFSKESILPKRNSDKLIARKKDWDPKKYGGFDSPTVAYSVLVVAKVEKGKSKKLKSVKELLGITIMERSSFEKNPIDFLEAKGYKEVKKDLIIKLPKYSLFELENGRKRMLASAGELQKGNELALPSKYVNFLYLASHYEKLKGSPEDNEQKQLFVEQHKHYLDEIIEQISEFSKRVILADANLDKVLSAYNKHRDKPIREQAENIIHLFTLTNLGAPAAFKYFDTTIDRKRYTSTKEVLDATLIHQSITGLYETRIDLSQLGGDGGGGGPAPGGSGGTLGDQGSRGSDPLPEPRVTLTVEGIPTEFLVNTGAEHSVLTKPMGKMGSKRTVVAGATGSKVYPWTTKRLLKIGQKQVTHSFLVIPECPAPLLGRDLLTKLKAQIQFSTEGPQVTWEDRPAMCLVLNLEEEYRLHEKPVPPSIDPSWLQLFPMVWAEKAGMGLANQVPPVVVELKSDASPVAVRQYPMSKEAREGIRPHIQRFLDLGILVPCQSPWNTPLLPVKKPGTNDYRPVQDLREVNKRVQDIHPTVPNPYNLLSSLPPSHTWYSVLDLKDAFFCLKLHPNSQPLFAFEWRDPEKGNTGQLTWTRLPQGFKNSPTLFNEALHRDLASFRALNPQVVMLQYVDDLLVAAPTYRDCKEGTRRLLQELSKLGYRVSAKKAQLCREEVTYLGYLLKGGKRWLTPARKATVMKIPTPTTPRQVREFLGKAGFCRLFIPGFASLAAPLYPLTRPKVPFTWTEAHQEAFGRIKEALLSAPALALPDLTKPFALYVDEKEGVARGVLTQTLGPWRRPVAYLSKKLDPVASGWPTCLKAIAAVALLLKDADKLTLGQNVLVIAPHNLESIVRQPPDRWMTNARMTHYQSLLLNERVSFAPPAILNPATLLPVESDDTPIHICSEILAEETGTRPDLRDQPLPGVPAWYTDGSSFIMDGRRQAGAAIVDNKRTVWASNLPEGTSAQKAELIALTQALRLAEGKSINIYTDSRYAFATAHVHGAIYKQRGWLTSAGKDIKNKEEILALLEAIHLPKRVAIIHCPGHQRGTDPVATGNRKADEAAKQAAQSTRILTETTKNAGKRTADGSEFEKRTADGSEFESPKKKAKVE

SEQ ID NO: 1827 - protein, 2216 aa, synthetic construct
MPAAKRVKLDGGDKKYSIGLDIGTNSVGWAVITDEYKVPSKKFKVLGNTDRHSIKKNLIGALLFDSGETAEATRLKRTARRRYTRRKNRICYLQEIFSNEMAKVDDSFFHRLEESFLVEEDKKHERHPIFGNIVDEVAYHEKYPTIYHLRKKLVDSTDKADLRLIYLALAHMIKFRGHFLIEGDLNPDNSDVDKLFIQLVQTYNQLFEENPINASGVDAKAILSARLSKSRRLENLIAQLPGEKKNGLFGNLIALSLGLTPNFKSNFDLAEDAKLQLSKDTYDDDLDNLLAQIGDQYADLFLAAKNLSDAILLSDILRVNTEITKAPLSASMIKRYDEHHQDLTLLKALVRQQLPEKYKEIFFDQSKNGYAGYIDGGASQEEFYKFIKPILEKMDGTEELLVKLNREDLLRKQRTFDNGSIPHQIHLGELHAILRRQEDFYPFLKDNREKIEKILTFRIPYYVGPLARGNSRFAWMTRKSEETITPWNFEEVVDKGASAQSFIERMTNFDKNLPNEKVLPKHSLLYEYFTVYNELTKVKYVTEGMRKPAFLSGEQKKAIVDLLFKTNRKVTVKQLKEDYFKKIECFDSVEISGVEDRFNASLGTYHDLLKIIKDKDFLDNEENEDILEDIVLTLTLFEDREMIEERLKTYAHLFDDKVMKQLKRRRYTGWGRLSRKLINGIRDKQSGKTILDFLKSDGFANRNFMQLIHDDSLTFKEDIQKAQVSGQGDSLHEHIANLAGSPAIKKGILQTVKVVDELVKVMGRHKPENIVIEMARENQTTQKGQKNSRERMKRIEEGIKELGSQILKEHPVENTQLQNEKLYLYYLQNGRDMYVDQELDINRLSDYDVDHIVPQSFLKDDSIDNKVLTRSDKARGKSDNVPSEEVVKKMKNYWRQLLNAKLITQRKFDNLTKAERGGLSELDKAGFIKRQLVETRQITKHVAQILDSRMNTKYDENDKLIREVKVITLKSKLVSDFRKDFQFYKVREINNYHHAHDAYLNAVVGTALIKKYPKLESEFVYGDYKVYDVRKMIAKSEQEIGKATAKYFFYSNIMNFFKTEITLANGEIRKRPLIETNGETGEIVWDKGRDFATVRKVLSMPQVNIVKKTEVQTGGFSKESILPKRNSDKLIARKKDWDPKKYGGFDSPTVAYSVLVVAKVEKGKSKKLKSVKELLGITIMERSSFEKNPIDFLEAKGYKEVKKDLIIKLPKYSLFELENGRKRMLASAGELQKGNELALPSKYVNFLYLASHYEKLKGSPEDNEQKQLFVEQHKHYLDEIIEQISEFSKRVILADANLDKVLSAYNKHRDKPIREQAENIIHLFTLTNLGAPAAFKYFDTTIDRKRYTSTKEVLDATLIHQSITGLYETRIDLSQLGGDGGPAPGGSGSSGGTLGDQGSRGSDPLPEPRVTLTVEGIPTEFLVNTGAEHSVLTKPMGKMGSKRTVVAGATGSKVYPWTTKRLLKIGQKQVTHSFLVIPECPAPLLGRDLLTKLKAQIQFSTEGPQVTWEDRPAMCLVLNLEEEYRLHEKPVPPSIDPSWLQLFPMVWAEKAGMGLANQVPPVVVELKSDASPVAVRQYPMSKEAREGIRPHIQRFLDLGILVPCQSPWNTPLLPVKKPGTNDYRPVQDLREVNKRVQDIHPTVPNPYNLLSSLPPSHTWYSVLDLKDAFFCLKLHPNSQPLFAFEWRDPEKGNTGQLTWTRLPQGFKNSPTLFNEALHRDLASFRALNPQVVMLQYVDDLLVAAPTYRDCKEGTRRLLQELSKLGYRVSAKKAQLCREEVTYLGYLLKGGKRWLTPARKATVMKIPTPTTPRQVREFLGKAGFCRLFIPGFASLAAPLYPLTRPKVPFTWTEAHQEAFGRIKEALLSAPALALPDLTKPFALYVDEKEGVARGVLTQTLGPWRRPVAYLSKKLDPVASGWPTCLKAIAAVALLLKDADKLTLGQNVLVIAPHNLESIVRQPPDRWMTNARMTHYQSLLLNERVSFAPPAILNPATLLPVESDDTPIHICSEILAEETGTRPDLRDQPLPGVPAWYTDGSSFIMDGRRQAGAAIVDNKRTVWASNLPEGTSAQKAELIALTQALRLAEGKSINIYTDSRYAFATAHVHGAIYKQRGWLTSAGKDIKNKEEILALLEAIHLPKRVAIIHCPGHQRGTDPVATGNRKADEAAKQAAQSTRILTETTKNAGKRTADGSEFEKRTADGSEFESPKKKAKVE

SEQ ID NO: 1828 - protein, 2212 aa, synthetic construct
MPAAKRVKLDGGDKKYSIGLDIGTNSVGWAVITDEYKVPSKKFKVLGNTDRHSIKKNLIGALLFDSGETAEATRLKRTARRRYTRRKNRICYLQEIFSNEMAKVDDSFFHRLEESFLVEEDKKHERHPIFGNIVDEVAYHEKYPTIYHLRKKLVDSTDKADLRLIYLALAHMIKFRGHFLIEGDLNPDNSDVDKLFIQLVQTYNQLFEENPINASGVDAKAILSARLSKSRRLENLIAQLPGEKKNGLFGNLIALSLGLTPNFKSNFDLAEDAKLQLSKDTYDDDLDNLLAQIGDQYADLFLAAKNLSDAILLSDILRVNTEITKAPLSASMIKRYDEHHQDLTLLKALVRQQLPEKYKEIFFDQSKNGYAGYIDGGASQEEFYKFIKPILEKMDGTEELLVKLNREDLLRKQRTFDNGSIPHQIHLGELHAILRRQEDFYPFLKDNREKIEKILTFRIPYYVGPLARGNSRFAWMTRKSEETITPWNFEEVVDKGASAQSFIERMTNFDKNLPNEKVLPKHSLLYEYFTVYNELTKVKYVTEGMRKPAFLSGEQKKAIVDLLFKTNRKVTVKQLKEDYFKKIECFDSVEISGVEDRFNASLGTYHDLLKIIKDKDFLDNEENEDILEDIVLTLTLFEDREMIEERLKTYAHLFDDKVMKQLKRRRYTGWGRLSRKLINGIRDKQSGKTILDFLKSDGFANRNFMQLIHDDSLTFKEDIQKAQVSGQGDSLHEHIANLAGSPAIKKGILQTVKVVDELVKVMGRHKPENIVIEMARENQTTQKGQKNSRERMKRIEEGIKELGSQILKEHPVENTQLQNEKLYLYYLQNGRDMYVDQELDINRLSDYDVDHIVPQSFLKDDSIDNKVLTRSDKARGKSDNVPSEEVVKKMKNYWRQLLNAKLITQRKFDNLTKAERGGLSELDKAGFIKRQLVETRQITKHVAQILDSRMNTKYDENDKLIREVKVITLKSKLVSDFRKDFQFYKVREINNYHHAHDAYLNAVVGTALIKKYPKLESEFVYGDYKVYDVRKMIAKSEQEIGKATAKYFFYSNIMNFFKTEITLANGEIRKRPLIETNGETGEIVWDKGRDFATVRKVLSMPQVNIVKKTEVQTGGFSKESILPKRNSDKLIARKKDWDPKKYGGFDSPTVAYSVLVVAKVEKGKSKKLKSVKELLGITIMERSSFEKNPIDFLEAKGYKEVKKDLIIKLPKYSLFELENGRKRMLASAGELQKGNELALPSKYVNFLYLASHYEKLKGSPEDNEQKQLFVEQHKHYLDEIIEQISEFSKRVILADANLDKVLSAYNKHRDKPIREQAENIIHLFTLTNLGAPAAFKYFDTTIDRKRYTSTKEVLDATLIHQSITGLYETRIDLSQLGGDGGGGGGGGGTLGDQGSRGSDPLPEPRVTLTVEGIPTEFLVNTGAEHSVLTKPMGKMGSKRTVVAGATGSKVYPWTTKRLLKIGQKQVTHSFLVIPECPAPLLGRDLLTKLKAQIQFSTEGPQVTWEDRPAMCLVLNLEEEYRLHEKPVPPSIDPSWLQLFPMVWAEKAGMGLANQVPPVVVELKSDASPVAVRQYPMSKEAREGIRPHIQRFLDLGILVPCQSPWNTPLLPVKKPGTNDYRPVQDLREVNKRVQDIHPTVPNPYNLLSSLPPSHTWYSVLDLKDAFFCLKLHPNSQPLFAFEWRDPEKGNTGQLTWTRLPQGFKNSPTLFNEALHRDLASFRALNPQVVMLQYVDDLLVAAPTYRDCKEGTRRLLQELSKLGYRVSAKKAQLCREEVTYLGYLLKGGKRWLTPARKATVMKIPTPTTPRQVREFLGKAGFCRLFIPGFASLAAPLYPLTRPKVPFTWTEAHQEAFGRIKEALLSAPALALPDLTKPFALYVDEKEGVARGVLTQTLGPWRRPVAYLSKKLDPVASGWPTCLKAIAAVALLLKDADKLTLGQNVLVIAPHNLESIVRQPPDRWMTNARMTHYQSLLLNERVSFAPPAILNPATLLPVESDDTPIHICSEILAEETGTRPDLRDQPLPGVPAWYTDGSSFIMDGRRQAGAAIVDNKRTVWASNLPEGTSAQKAELIALTQALRLAEGKSINIYTDSRYAFATAHVHGAIYKQRGWLTSAGKDIKNKEEILALLEAIHLPKRVAIIHCPGHQRGTDPVATGNRKADEAAKQAAQSTRILTETTKNAGKRTADGSEFEKRTADGSEFESPKKKAKVE

SEQ ID NO: 1829 - protein, 2218 aa, synthetic construct
MPAAKRVKLDGGDKKYSIGLDIGTNSVGWAVITDEYKVPSKKFKVLGNTDRHSIKKNLIGALLFDSGETAEATRLKRTARRRYTRRKNRICYLQEIFSNEMAKVDDSFFHRLEESFLVEEDKKHERHPIFGNIVDEVAYHEKYPTIYHLRKKLVDSTDKADLRLIYLALAHMIKFRGHFLIEGDLNPDNSDVDKLFIQLVQTYNQLFEENPINASGVDAKAILSARLSKSRRLENLIAQLPGEKKNGLFGNLIALSLGLTPNFKSNFDLAEDAKLQLSKDTYDDDLDNLLAQIGDQYADLFLAAKNLSDAILLSDILRVNTEITKAPLSASMIKRYDEHHQDLTLLKALVRQQLPEKYKEIFFDQSKNGYAGYIDGGASQEEFYKFIKPILEKMDGTEELLVKLNREDLLRKQRTFDNGSIPHQIHLGELHAILRRQEDFYPFLKDNREKIEKILTFRIPYYVGPLARGNSRFAWMTRKSEETITPWNFEEVVDKGASAQSFIERMTNFDKNLPNEKVLPKHSLLYEYFTVYNELTKVKYVTEGMRKPAFLSGEQKKAIVDLLFKTNRKVTVKQLKEDYFKKIECFDSVEISGVEDRFNASLGTYHDLLKIIKDKDFLDNEENEDILEDIVLTLTLFEDREMIEERLKTYAHLFDDKVMKQLKRRRYTGWGRLSRKLINGIRDKQSGKTILDFLKSDGFANRNFMQLIHDDSLTFKEDIQKAQVSGQGDSLHEHIANLAGSPAIKKGILQTVKVVDELVKVMGRHKPENIVIEMARENQTTQKGQKNSRERMKRIEEGIKELGSQILKEHPVENTQLQNEKLYLYYLQNGRDMYVDQELDINRLSDYDVDHIVPQSFLKDDSIDNKVLTRSDKARGKSDNVPSEEVVKKMKNYWRQLLNAKLITQRKFDNLTKAERGGLSELDKAGFIKRQLVETRQITKHVAQILDSRMNTKYDENDKLIREVKVITLKSKLVSDFRKDFQFYKVREINNYHHAHDAYLNAVVGTALIKKYPKLESEFVYGDYKVYDVRKMIAKSEQEIGKATAKYFFYSNIMNFFKTEITLANGEIRKRPLIETNGETGEIVWDKGRDFATVRKVLSMPQVNIVKKTEVQTGGFSKESILPKRNSDKLIARKKDWDPKKYGGFDSPTVAYSVLVVAKVEKGKSKKLKSVKELLGITIMERSSFEKNPIDFLEAKGYKEVKKDLIIKLPKYSLFELENGRKRMLASAGELQKGNELALPSKYVNFLYLASHYEKLKGSPEDNEQKQLFVEQHKHYLDEIIEQISEFSKRVILADANLDKVLSAYNKHRDKPIREQAENIIHLFTLTNLGAPAAFKYFDTTIDRKRYTSTKEVLDATLIHQSITGLYETRIDLSQLGGDGGGGSEAAAKGGGGGTLGDQGSRGSDPLPEPRVTLTVEGIPTEFLVNTGAEHSVLTKPMGKMGSKRTVVAGATGSKVYPWTTKRLLKIGQKQVTHSFLVIPECPAPLLGRDLLTKLKAQIQFSTEGPQVTWEDRPAMCLVLNLEEEYRLHEKPVPPSIDPSWLQLFPMVWAEKAGMGLANQVPPVVVELKSDASPVAVRQYPMSKEAREGIRPHIQRFLDLGILVPCQSPWNTPLLPVKKPGTNDYRPVQDLREVNKRVQDIHPTVPNPYNLLSSLPPSHTWYSVLDLKDAFFCLKLHPNSQPLFAFEWRDPEKGNTGQLTWTRLPQGFKNSPTLFNEALHRDLASFRALNPQVVMLQYVDDLLVAAPTYRDCKEGTRRLLQELSKLGYRVSAKKAQLCREEVTYLGYLLKGGKRWLTPARKATVMKIPTPTTPRQVREFLGKAGFCRLFIPGFASLAAPLYPLTRPKVPFTWTEAHQEAFGRIKEALLSAPALALPDLTKPFALYVDEKEGVARGVLTQTLGPWRRPVAYLSKKLDPVASGWPTCLKAIAAVALLLKDADKLTLGQNVLVIAPHNLESIVRQPPDRWMTNARMTHYQSLLLNERVSFAPPAILNPATLLPVESDDTPIHICSEILAEETGTRPDLRDQPLPGVPAWYTDGSSFIMDGRRQAGAAIVDNKRTVWASNLPEGTSAQKAELIALTQALRLAEGKSINIYTDSRYAFATAHVHGAIYKQRGWLTSAGKDIKNKEEILALLEAIHLPKRVAIIHCPGHQRGTDPVATGNRKADEAAKQAAQSTRILTETTKNAGKRTADGSEFEKRTADGSEFESPKKKAKVE

SEQ ID NO: 1830 - protein, 2216 aa, synthetic construct
MPAAKRVKLDGGDKKYSIGLDIGTNSVGWAVITDEYKVPSKKFKVLGNTDRHSIKKNLIGALLFDSGETAEATRLKRTARRRYTRRKNRICYLQEIFSNEMAKVDDSFFHRLEESFLVEEDKKHERHPIFGNIVDEVAYHEKYPTIYHLRKKLVDSTDKADLRLIYLALAHMIKFRGHFLIEGDLNPDNSDVDKLFIQLVQTYNQLFEENPINASGVDAKAILSARLSKSRRLENLIAQLPGEKKNGLFGNLIALSLGLTPNFKSNFDLAEDAKLQLSKDTYDDDLDNLLAQIGDQYADLFLAAKNLSDAILLSDILRVNTEITKAPLSASMIKRYDEHHQDLTLLKALVRQQLPEKYKEIFFDQSKNGYAGYIDGGASQEEFYKFIKPILEKMDGTEELLVKLNREDLLRKQRTFDNGSIPHQIHLGELHAILRRQEDFYPFLKDNREKIEKILTFRIPYYVGPLARGNSRFAWMTRKSEETITPWNFEEVVDKGASAQSFIERMTNFDKNLPNEKVLPKHSLLYEYFTVYNELTKVKYVTEGMRKPAFLSGEQKKAIVDLLFKTNRKVTVKQLKEDYFKKIECFDSVEISGVEDRFNASLGTYHDLLKIIKDKDFLDNEENEDILEDIVLTLTLFEDREMIEERLKTYAHLFDDKVMKQLKRRRYTGWGRLSRKLINGIRDKQSGKTILDFLKSDGFANRNFMQLIHDDSLTFKEDIQKAQVSGQGDSLHEHIANLAGSPAIKKGILQTVKVVDELVKVMGRHKPENIVIEMARENQTTQKGQKNSRERMKRIEEGIKELGSQILKEHPVENTQLQNEKLYLYYLQNGRDMYVDQELDINRLSDYDVDHIVPQSFLKDDSIDNKVLTRSDKARGKSDNVPSEEVVKKMKNYWRQLLNAKLITQRKFDNLTKAERGGLSELDKAGFIKRQLVETRQITKHVAQILDSRMNTKYDENDKLIREVKVITLKSKLVSDFRKDFQFYKVREINNYHHAHDAYLNAVVGTALIKKYPKLESEFVYGDYKVYDVRKMIAKSEQEIGKATAKYFFYSNIMNFFKTEITLANGEIRKRPLIETNGETGEIVWDKGRDFATVRKVLSMPQVNIVKKTEVQTGGFSKESILPKRNSDKLIARKKDWDPKKYGGFDSPTVAYSVLVVAKVEKGKSKKLKSVKELLGITIMERSSFEKNPIDFLEAKGYKEVKKDLIIKLPKYSLFELENGRKRMLASAGELQKGNELALPSKYVNFLYLASHYEKLKGSPEDNEQKQLFVEQHKHYLDEIIEQISEFSKRVILADANLDKVLSAYNKHRDKPIREQAENIIHLFTLTNLGAPAAFKYFDTTIDRKRYTSTKEVLDATLIHQSITGLYETRIDLSQLGGDGGGSSGGSPAPGGTLGDQGSRGSDPLPEPRVTLTVEGIPTEFLVNTGAEHSVLTKPMGKMGSKRTVVAGATGSKVYPWTTKRLLKIGQKQVTHSFLVIPECPAPLLGRDLLTKLKAQIQFSTEGPQVTWEDRPAMCLVLNLEEEYRLHEKPVPPSIDPSWLQLFPMVWAEKAGMGLANQVPPVVVELKSDASPVAVRQYPMSKEAREGIRPHIQRFLDLGILVPCQSPWNTPLLPVKKPGTNDYRPVQDLREVNKRVQDIHPTVPNPYNLLSSLPPSHTWYSVLDLKDAFFCLKLHPNSQPLFAFEWRDPEKGNTGQLTWTRLPQGFKNSPTLFNEALHRDLASFRALNPQVVMLQYVDDLLVAAPTYRDCKEGTRRLLQELSKLGYRVSAKKAQLCREEVTYLGYLLKGGKRWLTPARKATVMKIPTPTTPRQVREFLGKAGFCRLFIPGFASLAAPLYPLTRPKVPFTWTEAHQEAFGRIKEALLSAPALALPDLTKPFALYVDEKEGVARGVLTQTLGPWRRPVAYLSKKLDPVASGWPTCLKAIAAVALLLKDADKLTLGQNVLVIAPHNLESIVRQPPDRWMTNARMTHYQSLLLNERVSFAPPAILNPATLLPVESDDTPIHICSEILAEETGTRPDLRDQPLPGVPAWYTDGSSFIMDGRRQAGAAIVDNKRTVWASNLPEGTSAQKAELIALTQALRLAEGKSINIYTDSRYAFATAHVHGAIYKQRGWLTSAGKDIKNKEEILALLEAIHLPKRVAIIHCPGHQRGTDPVATGNRKADEAAKQAAQSTRILTETTKNAGKRTADGSEFEKRTADGSEFESPKKKAKVE

SEQ ID NO: 1831 - protein, 2213 aa, synthetic construct
MPAAKRVKLDGGDKKYSIGLDIGTNSVGWAVITDEYKVPSKKFKVLGNTDRHSIKKNLIGALLFDSGETAEATRLKRTARRRYTRRKNRICYLQEIFSNEMAKVDDSFFHRLEESFLVEEDKKHERHPIFGNIVDEVAYHEKYPTIYHLRKKLVDSTDKADLRLIYLALAHMIKFRGHFLIEGDLNPDNSDVDKLFIQLVQTYNQLFEENPINASGVDAKAILSARLSKSRRLENLIAQLPGEKKNGLFGNLIALSLGLTPNFKSNFDLAEDAKLQLSKDTYDDDLDNLLAQIGDQYADLFLAAKNLSDAILLSDILRVNTEITKAPLSASMIKRYDEHHQDLTLLKALVRQQLPEKYKEIFFDQSKNGYAGYIDGGASQEEFYKFIKPILEKMDGTEELLVKLNREDLLRKQRTFDNGSIPHQIHLGELHAILRRQEDFYPFLKDNREKIEKILTFRIPYYVGPLARGNSRFAWMTRKSEETITPWNFEEVVDKGASAQSFIERMTNFDKNLPNEKVLPKHSLLYEYFTVYNELTKVKYVTEGMRKPAFLSGEQKKAIVDLLFKTNRKVTVKQLKEDYFKKIECFDSVEISGVEDRFNASLGTYHDLLKIIKDKDFLDNEENEDILEDIVLTLTLFEDREMIEERLKTYAHLFDDKVMKQLKRRRYTGWGRLSRKLINGIRDKQSGKTILDFLKSDGFANRNFMQLIHDDSLTFKEDIQKAQVSGQGDSLHEHIANLAGSPAIKKGILQTVKVVDELVKVMGRHKPENIVIEMARENQTTQKGQKNSRERMKRIEEGIKELGSQILKEHPVENTQLQNEKLYLYYLQNGRDMYVDQELDINRLSDYDVDHIVPQSFLKDDSIDNKVLTRSDKARGKSDNVPSEEVVKKMKNYWRQLLNAKLITQRKFDNLTKAERGGLSELDKAGFIKRQLVETRQITKHVAQILDSRMNTKYDENDKLIREVKVITLKSKLVSDFRKDFQFYKVREINNYHHAHDAYLNAVVGTALIKKYPKLESEFVYGDYKVYDVRKMIAKSEQEIGKATAKYFFYSNIMNFFKTEITLANGEIRKRPLIETNGETGEIVWDKGRDFATVRKVLSMPQVNIVKKTEVQTGGFSKESILPKRNSDKLIARKKDWDPKKYGGFDSPTVAYSVLVVAKVEKGKSKKLKSVKELLGITIMERSSFEKNPIDFLEAKGYKEVKKDLIIKLPKYSLFELENGRKRMLASAGELQKGNELALPSKYVNFLYLASHYEKLKGSPEDNEQKQLFVEQHKHYLDEIIEQISEFSKRVILADANLDKVLSAYNKHRDKPIREQAENIIHLFTLTNLGAPAAFKYFDTTIDRKRYTSTKEVLDATLIHQSITGLYETRIDLSQLGGDGGGSSGSSGGTLGDQGSRGSDPLPEPRVTLTVEGIPTEFLVNTGAEHSVLTKPMGKMGSKRTVVAGATGSKVYPWTTKRLLKIGQKQVTHSFLVIPECPAPLLGRDLLTKLKAQIQFSTEGPQVTWEDRPAMCLVLNLEEEYRLHEKPVPPSIDPSWLQLFPMVWAEKAGMGLANQVPPVVVELKSDASPVAVRQYPMSKEAREGIRPHIQRFLDLGILVPCQSPWNTPLLPVKKPGTNDYRPVQDLREVNKRVQDIHPTVPNPYNLLSSLPPSHTWYSVLDLKDAFFCLKLHPNSQPLFAFEWRDPEKGNTGQLTWTRLPQGFKNSPTLFNEALHRDLASFRALNPQVVMLQYVDDLLVAAPTYRDCKEGTRRLLQELSKLGYRVSAKKAQLCREEVTYLGYLLKGGKRWLTPARKATVMKIPTPTTPRQVREFLGKAGFCRLFIPGFASLAAPLYPLTRPKVPFTWTEAHQEAFGRIKEALLSAPALALPDLTKPFALYVDEKEGVARGVLTQTLGPWRRPVAYLSKKLDPVASGWPTCLKAIAAVALLLKDADKLTLGQNVLVIAPHNLESIVRQPPDRWMTNARMTHYQSLLLNERVSFAPPAILNPATLLPVESDDTPIHICSEILAEETGTRPDLRDQPLPGVPAWYTDGSSFIMDGRRQAGAAIVDNKRTVWASNLPEGTSAQKAELIALTQALRLAEGKSINIYTDSRYAFATAHVHGAIYKQRGWLTSAGKDIKNKEEILALLEAIHLPKRVAIIHCPGHQRGTDPVATGNRKADEAAKQAAQSTRILTETTKNAGKRTADGSEFEKRTADGSEFESPKKKAKVE

SEQ ID NO: 1832 - protein, 2216 aa, synthetic construct
MPAAKRVKLDGGDKKYSIGLDIGTNSVGWAVITDEYKVPSKKFKVLGNTDRHSIKKNLIGALLFDSGETAEATRLKRTARRRYTRRKNRICYLQEIFSNEMAKVDDSFFHRLEESFLVEEDKKHERHPIFGNIVDEVAYHEKYPTIYHLRKKLVDSTDKADLRLIYLALAHMIKFRGHFLIEGDLNPDNSDVDKLFIQLVQTYNQLFEENPINASGVDAKAILSARLSKSRRLENLIAQLPGEKKNGLFGNLIALSLGLTPNFKSNFDLAEDAKLQLSKDTYDDDLDNLLAQIGDQYADLFLAAKNLSDAILLSDILRVNTEITKAPLSASMIKRYDEHHQDLTLLKALVRQQLPEKYKEIFFDQSKNGYAGYIDGGASQEEFYKFIKPILEKMDGTEELLVKLNREDLLRKQRTFDNGSIPHQIHLGELHAILRRQEDFYPFLKDNREKIEKILTFRIPYYVGPLARGNSRFAWMTRKSEETITPWNFEEVVDKGASAQSFIERMTNFDKNLPNEKVLPKHSLLYEYFTVYNELTKVKYVTEGMRKPAFLSGEQKKAIVDLLFKTNRKVTVKQLKEDYFKKIECFDSVEISGVEDRFNASLGTYHDLLKIIKDKDFLDNEENEDILEDIVLTLTLFEDREMIEERLKTYAHLFDDKVMKQLKRRRYTGWGRLSRKLINGIRDKQSGKTILDFLKSDGFANRNFMQLIHDDSLTFKEDIQKAQVSGQGDSLHEHIANLAGSPAIKKGILQTVKVVDELVKVMGRHKPENIVIEMARENQTTQKGQKNSRERMKRIEEGIKELGSQILKEHPVENTQLQNEKLYLYYLQNGRDMYVDQELDINRLSDYDVDHIVPQSFLKDDSIDNKVLTRSDKARGKSDNVPSEEVVKKMKNYWRQLLNAKLITQRKFDNLTKAERGGLSELDKAGFIKRQLVETRQITKHVAQILDSRMNTKYDENDKLIREVKVITLKSKLVSDFRKDFQFYKVREINNYHHAHDAYLNAVVGTALIKKYPKLESEFVYGDYKVYDVRKMIAKSEQEIGKATAKYFFYSNIMNFFKTEITLANGEIRKRPLIETNGETGEIVWDKGRDFATVRKVLSMPQVNIVKKTEVQTGGFSKESILPKRNSDKLIARKKDWDPKKYGGFDSPTVAYSVLVVAKVEKGKSKKLKSVKELLGITIMERSSFEKNPIDFLEAKGYKEVKKDLIIKLPKYSLFELENGRKRMLASAGELQKGNELALPSKYVNFLYLASHYEKLKGSPEDNEQKQLFVEQHKHYLDEIIEQISEFSKRVILADANLDKVLSAYNKHRDKPIREQAENIIHLFTLTNLGAPAAFKYFDTTIDRKRYTSTKEVLDATLIHQSITGLYETRIDLSQLGGDGGGGSGGGPAPGGTLGDQGSRGSDPLPEPRVTLTVEGIPTEFLVNTGAEHSVLTKPMGKMGSKRTVVAGATGSKVYPWTTKRLLKIGQKQVTHSFLVIPECPAPLLGRDLLTKLKAQIQFSTEGPQVTWEDRPAMCLVLNLEEEYRLHEKPVPPSIDPSWLQLFPMVWAEKAGMGLANQVPPVVVELKSDASPVAVRQYPMSKEAREGIRPHIQRFLDLGILVPCQSPWNTPLLPVKKPGTNDYRPVQDLREVNKRVQDIHPTVPNPYNLLSSLPPSHTWYSVLDLKDAFFCLKLHPNSQPLFAFEWRDPEKGNTGQLTWTRLPQGFKNSPTLFNEALHRDLASFRALNPQVVMLQYVDDLLVAAPTYRDCKEGTRRLLQELSKLGYRVSAKKAQLCREEVTYLGYLLKGGKRWLTPARKATVMKIPTPTTPRQVREFLGKAGFCRLFIPGFASLAAPLYPLTRPKVPFTWTEAHQEAFGRIKEALLSAPALALPDLTKPFALYVDEKEGVARGVLTQTLGPWRRPVAYLSKKLDPVASGWPTCLKAIAAVALLLKDADKLTLGQNVLVIAPHNLESIVRQPPDRWMTNARMTHYQSLLLNERVSFAPPAILNPATLLPVESDDTPIHICSEILAEETGTRPDLRDQPLPGVPAWYTDGSSFIMDGRRQAGAAIVDNKRTVWASNLPEGTSAQKAELIALTQALRLAEGKSINIYTDSRYAFATAHVHGAIYKQRGWLTSAGKDIKNKEEILALLEAIHLPKRVAIIHCPGHQRGTDPVATGNRKADEAAKQAAQSTRILTETTKNAGKRTADGSEFEKRTADGSEFESPKKKAKVE

SEQ ID NO: 1833 - protein, 2218 aa, synthetic construct
MPAAKRVKLDGGDKKYSIGLDIGTNSVGWAVITDEYKVPSKKFKVLGNTDRHSIKKNLIGALLFDSGETAEATRLKRTARRRYTRRKNRICYLQEIFSNEMAKVDDSFFHRLEESFLVEEDKKHERHPIFGNIVDEVAYHEKYPTIYHLRKKLVDSTDKADLRLIYLALAHMIKFRGHFLIEGDLNPDNSDVDKLFIQLVQTYNQLFEENPINASGVDAKAILSARLSKSRRLENLIAQLPGEKKNGLFGNLIALSLGLTPNFKSNFDLAEDAKLQLSKDTYDDDLDNLLAQIGDQYADLFLAAKNLSDAILLSDILRVNTEITKAPLSASMIKRYDEHHQDLTLLKALVRQQLPEKYKEIFFDQSKNGYAGYIDGGASQEEFYKFIKPILEKMDGTEELLVKLNREDLLRKQRTFDNGSIPHQIHLGELHAILRRQEDFYPFLKDNREKIEKILTFRIPYYVGPLARGNSRFAWMTRKSEETITPWNFEEVVDKGASAQSFIERMTNFDKNLPNEKVLPKHSLLYEYFTVYNELTKVKYVTEGMRKPAFLSGEQKKAIVDLLFKTNRKVTVKQLKEDYFKKIECFDSVEISGVEDRFNASLGTYHDLLKIIKDKDFLDNEENEDILEDIVLTLTLFEDREMIEERLKTYAHLFDDKVMKQLKRRRYTGWGRLSRKLINGIRDKQSGKTILDFLKSDGFANRNFMQLIHDDSLTFKEDIQKAQVSGQGDSLHEHIANLAGSPAIKKGILQTVKVVDELVKVMGRHKPENIVIEMARENQTTQKGQKNSRERMKRIEEGIKELGSQILKEHPVENTQLQNEKLYLYYLQNGRDMYVDQELDINRLSDYDVDHIVPQSFLKDDSIDNKVLTRSDKARGKSDNVPSEEVVKKMKNYWRQLLNAKLITQRKFDNLTKAERGGLSELDKAGFIKRQLVETRQITKHVAQILDSRMNTKYDENDKLIREVKVITLKSKLVSDFRKDFQFYKVREINNYHHAHDAYLNAVVGTALIKKYPKLESEFVYGDYKVYDVRKMIAKSEQEIGKATAKYFFYSNIMNFFKTEITLANGEIRKRPLIETNGETGEIVWDKGRDFATVRKVLSMPQVNIVKKTEVQTGGFSKESILPKRNSDKLIARKKDWDPKKYGGFDSPTVAYSVLVVAKVEKGKSKKLKSVKELLGITIMERSSFEKNPIDFLEAKGYKEVKKDLIIKLPKYSLFELENGRKRMLASAGELQKGNELALPSKYVNFLYLASHYEKLKGSPEDNEQKQLFVEQHKHYLDEIIEQISEFSKRVILADANLDKVLSAYNKHRDKPIREQAENIIHLFTLTNLGAPAAFKYFDTTIDRKRYTSTKEVLDATLIHQSITGLYETRIDLSQLGGDGGEAAAKGGSPAPGGTLGDQGSRGSDPLPEPRVTLTVEGIPTEFLVNTGAEHSVLTKPMGKMGSKRTVVAGATGSKVYPWTTKRLLKIGQKQVTHSFLVIPECPAPLLGRDLLTKLKAQIQFSTEGPQVTWEDRPAMCLVLNLEEEYRLHEKPVPPSIDPSWLQLFPMVWAEKAGMGLANQVPPVVVELKSDASPVAVRQYPMSKEAREGIRPHIQRFLDLGILVPCQSPWNTPLLPVKKPGTNDYRPVQDLREVNKRVQDIHPTVPNPYNLLSSLPPSHTWYSVLDLKDAFFCLKLHPNSQPLFAFEWRDPEKGNTGQLTWTRLPQGFKNSPTLFNEALHRDLASFRALNPQVVMLQYVDDLLVAAPTYRDCKEGTRRLLQELSKLGYRVSAKKAQLCREEVTYLGYLLKGGKRWLTPARKATVMKIPTPTTPRQVREFLGKAGFCRLFIPGFASLAAPLYPLTRPKVPFTWTEAHQEAFGRIKEALLSAPALALPDLTKPFALYVDEKEGVARGVLTQTLGPWRRPVAYLSKKLDPVASGWPTCLKAIAAVALLLKDADKLTLGQNVLVIAPHNLESIVRQPPDRWMTNARMTHYQSLLLNERVSFAPPAILNPATLLPVESDDTPIHICSEILAEETGTRPDLRDQPLPGVPAWYTDGSSFIMDGRRQAGAAIVDNKRTVWASNLPEGTSAQKAELIALTQALRLAEGKSINIYTDSRYAFATAHVHGAIYKQRGWLTSAGKDIKNKEEILALLEAIHLPKRVAIIHCPGHQRGTDPVATGNRKADEAAKQAAQSTRILTETTKNAGKRTADGSEFEKRTADGSEFESPKKKAKVE

SEQ ID NO: 1834 - protein, 2216 aa, synthetic construct
MPAAKRVKLDGGDKKYSIGLDIGTNSVGWAVITDEYKVPSKKFKVLGNTDRHSIKKNLIGALLFDSGETAEATRLKRTARRRYTRRKNRICYLQEIFSNEMAKVDDSFFHRLEESFLVEEDKKHERHPIFGNIVDEVAYHEKYPTIYHLRKKLVDSTDKADLRLIYLALAHMIKFRGHFLIEGDLNPDNSDVDKLFIQLVQTYNQLFEENPINASGVDAKAILSARLSKSRRLENLIAQLPGEKKNGLFGNLIALSLGLTPNFKSNFDLAEDAKLQLSKDTYDDDLDNLLAQIGDQYADLFLAAKNLSDAILLSDILRVNTEITKAPLSASMIKRYDEHHQDLTLLKALVRQQLPEKYKEIFFDQSKNGYAGYIDGGASQEEFYKFIKPILEKMDGTEELLVKLNREDLLRKQRTFDNGSIPHQIHLGELHAILRRQEDFYPFLKDNREKIEKILTFRIPYYVGPLARGNSRFAWMTRKSEETITPWNFEEVVDKGASAQSFIERMTNFDKNLPNEKVLPKHSLLYEYFTVYNELTKVKYVTEGMRKPAFLSGEQKKAIVDLLFKTNRKVTVKQLKEDYFKKIECFDSVEISGVEDRFNASLGTYHDLLKIIKDKDFLDNEENEDILEDIVLTLTLFEDREMIEERLKTYAHLFDDKVMKQLKRRRYTGWGRLSRKLINGIRDKQSGKTILDFLKSDGFANRNFMQLIHDDSLTFKEDIQKAQVSGQGDSLHEHIANLAGSPAIKKGILQTVKVVDELVKVMGRHKPENIVIEMARENQTTQKGQKNSRERMKRIEEGIKELGSQILKEHPVENTQLQNEKLYLYYLQNGRDMYVDQELDINRLSDYDVDHIVPQSFLKDDSIDNKVLTRSDKARGKSDNVPSEEVVKKMKNYWRQLLNAKLITQRKFDNLTKAERGGLSELDKAGFIKRQLVETRQITKHVAQILDSRMNTKYDENDKLIREVKVITLKSKLVSDFRKDFQFYKVREINNYHHAHDAYLNAVVGTALIKKYPKLESEFVYGDYKVYDVRKMIAKSEQEIGKATAKYFFYSNIMNFFKTEITLANGEIRKRPLIETNGETGEIVWDKGRDFATVRKVLSMPQVNIVKKTEVQTGGFSKESILPKRNSDKLIARKKDWDPKKYGGFDSPTVAYSVLVVAKVEKGKSKKLKSVKELLGITIMERSSFEKNPIDFLEAKGYKEVKKDLIIKLPKYSLFELENGRKRMLASAGELQKGNELALPSKYVNFLYLASHYEKLKGSPEDNEQKQLFVEQHKHYLDEIIEQISEFSKRVILADANLDKVLSAYNKHRDKPIREQAENIIHLFTLTNLGAPAAFKYFDTTIDRKRYTSTKEVLDATLIHQSITGLYETRIDLSQLGGDGGGGGGGSPAPGGTLGDQGSRGSDPLPEPRVTLTVEGIPTEFLVNTGAEHSVLTKPMGKMGSKRTVVAGATGSKVYPWTTKRLLKIGQKQVTHSFLVIPECPAPLLGRDLLTKLKAQIQFSTEGPQVTWEDRPAMCLVLNLEEEYRLHEKPVPPSIDPSWLQLFPMVWAEKAGMGLANQVPPVVVELKSDASPVAVRQYPMSKEAREGIRPHIQRFLDLGILVPCQSPWNTPLLPVKKPGTNDYRPVQDLREVNKRVQDIHPTVPNPYNLLSSLPPSHTWYSVLDLKDAFFCLKLHPNSQPLFAFEWRDPEKGNTGQLTWTRLPQGFKNSPTLFNEALHRDLASFRALNPQVVMLQYVDDLLVAAPTYRDCKEGTRRLLQELSKLGYRVSAKKAQLCREEVTYLGYLLKGGKRWLTPARKATVMKIPTPTTPRQVREFLGKAGFCRLFIPGFASLAAPLYPLTRPKVPFTWTEAHQEAFGRIKEALLSAPALALPDLTKPFALYVDEKEGVARGVLTQTLGPWRRPVAYLSKKLDPVASGWPTCLKAIAAVALLLKDADKLTLGQNVLVIAPHNLESIVRQPPDRWMTNARMTHYQSLLLNERVSFAPPAILNPATLLPVESDDTPIHICSEILAEETGTRPDLRDQPLPGVPAWYTDGSSFIMDGRRQAGAAIVDNKRTVWASNLPEGTSAQKAELIALTQALRLAEGKSINIYTDSRYAFATAHVHGAIYKQRGWLTSAGKDIKNKEEILALLEAIHLPKRVAIIHCPGHQRGTDPVATGNRKADEAAKQAAQSTRILTETTKNAGKRTADGSEFEKRTADGSEFESPKKKAKVE

SEQ ID NO: 1835 - protein, 2216 aa, synthetic construct
MPAAKRVKLDGGDKKYSIGLDIGTNSVGWAVITDEYKVPSKKFKVLGNTDRHSIKKNLIGALLFDSGETAEATRLKRTARRRYTRRKNRICYLQEIFSNEMAKVDDSFFHRLEESFLVEEDKKHERHPIFGNIVDEVAYHEKYPTIYHLRKKLVDSTDKADLRLIYLALAHMIKFRGHFLIEGDLNPDNSDVDKLFIQLVQTYNQLFEENPINASGVDAKAILSARLSKSRRLENLIAQLPGEKKNGLFGNLIALSLGLTPNFKSNFDLAEDAKLQLSKDTYDDDLDNLLAQIGDQYADLFLAAKNLSDAILLSDILRVNTEITKAPLSASMIKRYDEHHQDLTLLKALVRQQLPEKYKEIFFDQSKNGYAGYIDGGASQEEFYKFIKPILEKMDGTEELLVKLNREDLLRKQRTFDNGSIPHQIHLGELHAILRRQEDFYPFLKDNREKIEKILTFRIPYYVGPLARGNSRFAWMTRKSEETITPWNFEEVVDKGASAQSFIERMTNFDKNLPNEKVLPKHSLLYEYFTVYNELTKVKYVTEGMRKPAFLSGEQKKAIVDLLFKTNRKVTVKQLKEDYFKKIECFDSVEISGVEDRFNASLGTYHDLLKIIKDKDFLDNEENEDILEDIVLTLTLFEDREMIEERLKTYAHLFDDKVMKQLKRRRYTGWGRLSRKLINGIRDKQSGKTILDFLKSDGFANRNFMQLIHDDSLTFKEDIQKAQVSGQGDSLHEHIANLAGSPAIKKGILQTVKVVDELVKVMGRHKPENIVIEMARENQTTQKGQKNSRERMKRIEEGIKELGSQILKEHPVENTQLQNEKLYLYYLQNGRDMYVDQELDINRLSDYDVDHIVPQSFLKDDSIDNKVLTRSDKARGKSDNVPSEEVVKKMKNYWRQLLNAKLITQRKFDNLTKAERGGLSELDKAGFIKRQLVETRQITKHVAQILDSRMNTKYDENDKLIREVKVITLKSKLVSDFRKDFQFYKVREINNYHHAHDAYLNAVVGTALIKKYPKLESEFVYGDYKVYDVRKMIAKSEQEIGKATAKYFFYSNIMNFFKTEITLANGEIRKRPLIETNGETGEIVWDKGRDFATVRKVLSMPQVNIVKKTEVQTGGFSKESILPKRNSDKLIARKKDWDPKKYGGFDSPTVAYSVLVVAKVEKGKSKKLKSVKELLGITIMERSSFEKNPIDFLEAKGYKEVKKDLIIKLPKYSLFELENGRKRMLASAGELQKGNELALPSKYVNFLYLASHYEKLKGSPEDNEQKQLFVEQHKHYLDEIIEQISEFSKRVILADANLDKVLSAYNKHRDKPIREQAENIIHLFTLTNLGAPAAFKYFDTTIDRKRYTSTKEVLDATLIHQSITGLYETRIDLSQLGGDGGPAPGGGGGSGGTLGDQGSRGSDPLPEPRVTLTVEGIPTEFLVNTGAEHSVLTKPMGKMGSKRTVVAGATGSKVYPWTTKRLLKIGQKQVTHSFLVIPECPAPLLGRDLLTKLKAQIQFSTEGPQVTWEDRPAMCLVLNLEEEYRLHEKPVPPSIDPSWLQLFPMVWAEKAGMGLANQVPPVVVELKSDASPVAVRQYPMSKEAREGIRPHIQRFLDLGILVPCQSPWNTPLLPVKKPGTNDYRPVQDLREVNKRVQDIHPTVPNPYNLLSSLPPSHTWYSVLDLKDAFFCLKLHPNSQPLFAFEWRDPEKGNTGQLTWTRLPQGFKNSPTLFNEALHRDLASFRALNPQVVMLQYVDDLLVAAPTYRDCKEGTRRLLQELSKLGYRVSAKKAQLCREEVTYLGYLLKGGKRWLTPARKATVMKIPTPTTPRQVREFLGKAGFCRLFIPGFASLAAPLYPLTRPKVPFTWTEAHQEAFGRIKEALLSAPALALPDLTKPFALYVDEKEGVARGVLTQTLGPWRRPVAYLSKKLDPVASGWPTCLKAIAAVALLLKDADKLTLGQNVLVIAPHNLESIVRQPPDRWMTNARMTHYQSLLLNERVSFAPPAILNPATLLPVESDDTPIHICSEILAEETGTRPDLRDQPLPGVPAWYTDGSSFIMDGRRQAGAAIVDNKRTVWASNLPEGTSAQKAELIALTQALRLAEGKSINIYTDSRYAFATAHVHGAIYKQRGWLTSAGKDIKNKEEILALLEAIHLPKRVAIIHCPGHQRGTDPVATGNRKADEAAKQAAQSTRILTETTKNAGKRTADGSEFEKRTADGSEFESPKKKAKVE

SEQ ID NO: 1836 - protein, 2118 aa, synthetic construct
MPAAKRVKLDGGDKKYSIGLDIGTNSVGWAVITDEYKVPSKKFKVLGNTDRHSIKKNLIGALLFDSGETAEATRLKRTARRRYTRRKNRICYLQEIFSNEMAKVDDSFFHRLEESFLVEEDKKHERHPIFGNIVDEVAYHEKYPTIYHLRKKLVDSTDKADLRLIYLALAHMIKFRGHFLIEGDLNPDNSDVDKLFIQLVQTYNQLFEENPINASGVDAKAILSARLSKSRRLENLIAQLPGEKKNGLFGNLIALSLGLTPNFKSNFDLAEDAKLQLSKDTYDDDLDNLLAQIGDQYADLFLAAKNLSDAILLSDILRVNTEITKAPLSASMIKRYDEHHQDLTLLKALVRQQLPEKYKEIFFDQSKNGYAGYIDGGASQEEFYKFIKPILEKMDGTEELLVKLNREDLLRKQRTFDNGSIPHQIHLGELHAILRRQEDFYPFLKDNREKIEKILTFRIPYYVGPLARGNSRFAWMTRKSEETITPWNFEEVVDKGASAQSFIERMTNFDKNLPNEKVLPKHSLLYEYFTVYNELTKVKYVTEGMRKPAFLSGEQKKAIVDLLFKTNRKVTVKQLKEDYFKKIECFDSVEISGVEDRFNASLGTYHDLLKIIKDKDFLDNEENEDILEDIVLTLTLFEDREMIEERLKTYAHLFDDKVMKQLKRRRYTGWGRLSRKLINGIRDKQSGKTILDFLKSDGFANRNFMQLIHDDSLTFKEDIQKAQVSGQGDSLHEHIANLAGSPAIKKGILQTVKVVDELVKVMGRHKPENIVIEMARENQTTQKGQKNSRERMKRIEEGIKELGSQILKEHPVENTQLQNEKLYLYYLQNGRDMYVDQELDINRLSDYDVDHIVPQSFLKDDSIDNKVLTRSDKARGKSDNVPSEEVVKKMKNYWRQLLNAKLITQRKFDNLTKAERGGLSELDKAGFIKRQLVETRQITKHVAQILDSRMNTKYDENDKLIREVKVITLKSKLVSDFRKDFQFYKVREINNYHHAHDAYLNAVVGTALIKKYPKLESEFVYGDYKVYDVRKMIAKSEQEIGKATAKYFFYSNIMNFFKTEITLANGEIRKRPLIETNGETGEIVWDKGRDFATVRKVLSMPQVNIVKKTEVQTGGFSKESILPKRNSDKLIARKKDWDPKKYGGFDSPTVAYSVLVVAKVEKGKSKKLKSVKELLGITIMERSSFEKNPIDFLEAKGYKEVKKDLIIKLPKYSLFELENGRKRMLASAGELQKGNELALPSKYVNFLYLASHYEKLKGSPEDNEQKQLFVEQHKHYLDEIIEQISEFSKRVILADANLDKVLSAYNKHRDKPIREQAENIIHLFTLTNLGAPAAFKYFDTTIDRKRYTSTKEVLDATLIHQSITGLYETRIDLSQLGGDGGSGGSSGGSSGSETPGTSESATPESSGGSSGGSSGGTLNLEDEYRLYETSAEPEVSPGSTWLSDFPQAWAETGGMGLAVRQAPLIIPLKATSTPVSIKQYPMSQEAKLGIKPHIQRLLDQGILVPCQSPWNTPLLPVKKPGTNDYRPVQDLREVNKRVEDIHPTVPNPYNLLSGLPPSHRWYTVLDLKDAFFCLRLHPTSQPLFAFEWRDPGMGISGQLTWTRLPQGFKNSPTLFDEALHRDLADFRIQHPDLILLQYVDDILLAATSELDCQQGTRALLLTLGNLGYRASAKKAQLCQKQVKYLGYLLKEGQRWLTEARKETVMGQPTPKTPRQLREFLGTAGFCRLWIPGFAEMAAPLYPLTKTGTLFNWGPDQQKAYQEIKQALLTAPALGLPDLTKPFELFVDEKQGYAKGVLTQKLGPWRRPVAYLSKKLDPVAAGWPPCLRMVAAIAVLRKDAGKLTMGQPLVILAPHAVEALVKQPPDRWLSNARMTHYQAMLLDTDRVQFGPVVALNPATLLPLPEEGAPHDCLEILAETHGTRPDLTDQPIPDADHTWYTDGSSFLQEGQRKAGAAVTTETEVIWARALPAGTSAQRAELIALTQALKMAEGKRLNVYTDSRYAFATAHIHGEIYRRRGLLTSEGREIKNKSEILALLKALFLPKRLSIIHCLGHQKGDSAEARGNRLADQAAREAAIKTPPDTSTLLAGKRTADGSEFEKRTADGSEFESPKKKAKVE

SEQ ID NO: 1837 - protein, 2105 aa, synthetic construct
MPAAKRVKLDGGDKKYSIGLDIGTNSVGWAVITDEYKVPSKKFKVLGNTDRHSIKKNLIGALLFDSGETAEATRLKRTARRRYTRRKNRICYLQEIFSNEMAKVDDSFFHRLEESFLVEEDKKHERHPIFGNIVDEVAYHEKYPTIYHLRKKLVDSTDKADLRLIYLALAHMIKFRGHFLIEGDLNPDNSDVDKLFIQLVQTYNQLFEENPINASGVDAKAILSARLSKSRRLENLIAQLPGEKKNGLFGNLIALSLGLTPNFKSNFDLAEDAKLQLSKDTYDDDLDNLLAQIGDQYADLFLAAKNLSDAILLSDILRVNTEITKAPLSASMIKRYDEHHQDLTLLKALVRQQLPEKYKEIFFDQSKNGYAGYIDGGASQEEFYKFIKPILEKMDGTEELLVKLNREDLLRKQRTFDNGSIPHQIHLGELHAILRRQEDFYPFLKDNREKIEKILTFRIPYYVGPLARGNSRFAWMTRKSEETITPWNFEEVVDKGASAQSFIERMTNFDKNLPNEKVLPKHSLLYEYFTVYNELTKVKYVTEGMRKPAFLSGEQKKAIVDLLFKTNRKVTVKQLKEDYFKKIECFDSVEISGVEDRFNASLGTYHDLLKIIKDKDFLDNEENEDILEDIVLTLTLFEDREMIEERLKTYAHLFDDKVMKQLKRRRYTGWGRLSRKLINGIRDKQSGKTILDFLKSDGFANRNFMQLIHDDSLTFKEDIQKAQVSGQGDSLHEHIANLAGSPAIKKGILQTVKVVDELVKVMGRHKPENIVIEMARENQTTQKGQKNSRERMKRIEEGIKELGSQILKEHPVENTQLQNEKLYLYYLQNGRDMYVDQELDINRLSDYDVDHIVPQSFLKDDSIDNKVLTRSDKARGKSDNVPSEEVVKKMKNYWRQLLNAKLITQRKFDNLTKAERGGLSELDKAGFIKRQLVETRQITKHVAQILDSRMNTKYDENDKLIREVKVITLKSKLVSDFRKDFQFYKVREINNYHHAHDAYLNAVVGTALIKKYPKLESEFVYGDYKVYDVRKMIAKSEQEIGKATAKYFFYSNIMNFFKTEITLANGEIRKRPLIETNGETGEIVWDKGRDFATVRKVLSMPQVNIVKKTEVQTGGFSKESILPKRNSDKLIARKKDWDPKKYGGFDSPTVAYSVLVVAKVEKGKSKKLKSVKELLGITIMERSSFEKNPIDFLEAKGYKEVKKDLIIKLPKYSLFELENGRKRMLASAGELQKGNELALPSKYVNFLYLASHYEKLKGSPEDNEQKQLFVEQHKHYLDEIIEQISEFSKRVILADANLDKVLSAYNKHRDKPIREQAENIIHLFTLTNLGAPAAFKYFDTTIDRKRYTSTKEVLDATLIHQSITGLYETRIDLSQLGGDGGEAAAKEAAAKEAAAKEAAAKGGTLNLEDEYRLYETSAEPEVSPGSTWLSDFPQAWAETGGMGLAVRQAPLIIPLKATSTPVSIKQYPMSQEAKLGIKPHIQRLLDQGILVPCQSPWNTPLLPVKKPGTNDYRPVQDLREVNKRVEDIHPTVPNPYNLLSGLPPSHRWYTVLDLKDAFFCLRLHPTSQPLFAFEWRDPGMGISGQLTWTRLPQGFKNSPTLFDEALHRDLADFRIQHPDLILLQYVDDILLAATSELDCQQGTRALLLTLGNLGYRASAKKAQLCQKQVKYLGYLLKEGQRWLTEARKETVMGQPTPKTPRQLREFLGTAGFCRLWIPGFAEMAAPLYPLTKTGTLFNWGPDQQKAYQEIKQALLTAPALGLPDLTKPFELFVDEKQGYAKGVLTQKLGPWRRPVAYLSKKLDPVAAGWPPCLRMVAAIAVLRKDAGKLTMGQPLVILAPHAVEALVKQPPDRWLSNARMTHYQAMLLDTDRVQFGPVVALNPATLLPLPEEGAPHDCLEILAETHGTRPDLTDQPIPDADHTWYTDGSSFLQEGQRKAGAAVTTETEVIWARALPAGTSAQRAELIALTQALKMAEGKRLNVYTDSRYAFATAHIHGEIYRRRGLLTSEGREIKNKSEILALLKALFLPKRLSIIHCLGHQKGDSAEARGNRLADQAAREAAIKTPPDTSTLLAGKRTADGSEFEKRTADGSEFESPKKKAKVE

SEQ ID NO: 1838 - protein, 2094 aa, synthetic construct
MPAAKRVKLDGGDKKYSIGLDIGTNSVGWAVITDEYKVPSKKFKVLGNTDRHSIKKNLIGALLFDSGETAEATRLKRTARRRYTRRKNRICYLQEIFSNEMAKVDDSFFHRLEESFLVEEDKKHERHPIFGNIVDEVAYHEKYPTIYHLRKKLVDSTDKADLRLIYLALAHMIKFRGHFLIEGDLNPDNSDVDKLFIQLVQTYNQLFEENPINASGVDAKAILSARLSKSRRLENLIAQLPGEKKNGLFGNLIALSLGLTPNFKSNFDLAEDAKLQLSKDTYDDDLDNLLAQIGDQYADLFLAAKNLSDAILLSDILRVNTEITKAPLSASMIKRYDEHHQDLTLLKALVRQQLPEKYKEIFFDQSKNGYAGYIDGGASQEEFYKFIKPILEKMDGTEELLVKLNREDLLRKQRTFDNGSIPHQIHLGELHAILRRQEDFYPFLKDNREKIEKILTFRIPYYVGPLARGNSRFAWMTRKSEETITPWNFEEVVDKGASAQSFIERMTNFDKNLPNEKVLPKHSLLYEYFTVYNELTKVKYVTEGMRKPAFLSGEQKKAIVDLLFKTNRKVTVKQLKEDYFKKIECFDSVEISGVEDRFNASLGTYHDLLKIIKDKDFLDNEENEDILEDIVLTLTLFEDREMIEERLKTYAHLFDDKVMKQLKRRRYTGWGRLSRKLINGIRDKQSGKTILDFLKSDGFANRNFMQLIHDDSLTFKEDIQKAQVSGQGDSLHEHIANLAGSPAIKKGILQTVKVVDELVKVMGRHKPENIVIEMARENQTTQKGQKNSRERMKRIEEGIKELGSQILKEHPVENTQLQNEKLYLYYLQNGRDMYVDQELDINRLSDYDVDHIVPQSFLKDDSIDNKVLTRSDKARGKSDNVPSEEVVKKMKNYWRQLLNAKLITQRKFDNLTKAERGGLSELDKAGFIKRQLVETRQITKHVAQILDSRMNTKYDENDKLIREVKVITLKSKLVSDFRKDFQFYKVREINNYHHAHDAYLNAVVGTALIKKYPKLESEFVYGDYKVYDVRKMIAKSEQEIGKATAKYFFYSNIMNFFKTEITLANGEIRKRPLIETNGETGEIVWDKGRDFATVRKVLSMPQVNIVKKTEVQTGGFSKESILPKRNSDKLIARKKDWDPKKYGGFDSPTVAYSVLVVAKVEKGKSKKLKSVKELLGITIMERSSFEKNPIDFLEAKGYKEVKKDLIIKLPKYSLFELENGRKRMLASAGELQKGNELALPSKYVNFLYLASHYEKLKGSPEDNEQKQLFVEQHKHYLDEIIEQISEFSKRVILADANLDKVLSAYNKHRDKPIREQAENIIHLFTLTNLGAPAAFKYFDTTIDRKRYTSTKEVLDATLIHQSITGLYETRIDLSQLGGDGGGSSGGGPAPGGTLNLEDEYRLYETSAEPEVSPGSTWLSDFPQAWAETGGMGLAVRQAPLIIPLKATSTPVSIKQYPMSQEAKLGIKPHIQRLLDQGILVPCQSPWNTPLLPVKKPGTNDYRPVQDLREVNKRVEDIHPTVPNPYNLLSGLPPSHRWYTVLDLKDAFFCLRLHPTSQPLFAFEWRDPGMGISGQLTWTRLPQGFKNSPTLFDEALHRDLADFRIQHPDLILLQYVDDILLAATSELDCQQGTRALLLTLGNLGYRASAKKAQLCQKQVKYLGYLLKEGQRWLTEARKETVMGQPTPKTPRQLREFLGTAGFCRLWIPGFAEMAAPLYPLTKTGTLFNWGPDQQKAYQEIKQALLTAPALGLPDLTKPFELFVDEKQGYAKGVLTQKLGPWRRPVAYLSKKLDPVAAGWPPCLRMVAAIAVLRKDAGKLTMGQPLVILAPHAVEALVKQPPDRWLSNARMTHYQAMLLDTDRVQFGPVVALNPATLLPLPEEGAPHDCLEILAETHGTRPDLTDQPIPDADHTWYTDGSSFLQEGQRKAGAAVTTETEVIWARALPAGTSAQRAELIALTQALKMAEGKRLNVYTDSRYAFATAHIHGEIYRRRGLLTSEGREIKNKSEILALLKALFLPKRLSIIHCLGHQKGDSAEARGNRLADQAAREAAIKTPPDTSTLLAGKRTADGSEFEKRTADGSEFESPKKKAKVE

SEQ ID NO: 1839 - protein, 2096 aa, synthetic construct
MPAAKRVKLDGGDKKYSIGLDIGTNSVGWAVITDEYKVPSKKFKVLGNTDRHSIKKNLIGALLFDSGETAEATRLKRTARRRYTRRKNRICYLQEIFSNEMAKVDDSFFHRLEESFLVEEDKKHERHPIFGNIVDEVAYHEKYPTIYHLRKKLVDSTDKADLRLIYLALAHMIKFRGHFLIEGDLNPDNSDVDKLFIQLVQTYNQLFEENPINASGVDAKAILSARLSKSRRLENLIAQLPGEKKNGLFGNLIALSLGLTPNFKSNFDLAEDAKLQLSKDTYDDDLDNLLAQIGDQYADLFLAAKNLSDAILLSDILRVNTEITKAPLSASMIKRYDEHHQDLTLLKALVRQQLPEKYKEIFFDQSKNGYAGYIDGGASQEEFYKFIKPILEKMDGTEELLVKLNREDLLRKQRTFDNGSIPHQIHLGELHAILRRQEDFYPFLKDNREKIEKILTFRIPYYVGPLARGNSRFAWMTRKSEETITPWNFEEVVDKGASAQSFIERMTNFDKNLPNEKVLPKHSLLYEYFTVYNELTKVKYVTEGMRKPAFLSGEQKKAIVDLLFKTNRKVTVKQLKEDYFKKIECFDSVEISGVEDRFNASLGTYHDLLKIIKDKDFLDNEENEDILEDIVLTLTLFEDREMIEERLKTYAHLFDDKVMKQLKRRRYTGWGRLSRKLINGIRDKQSGKTILDFLKSDGFANRNFMQLIHDDSLTFKEDIQKAQVSGQGDSLHEHIANLAGSPAIKKGILQTVKVVDELVKVMGRHKPENIVIEMARENQTTQKGQKNSRERMKRIEEGIKELGSQILKEHPVENTQLQNEKLYLYYLQNGRDMYVDQELDINRLSDYDVDHIVPQSFLKDDSIDNKVLTRSDKARGKSDNVPSEEVVKKMKNYWRQLLNAKLITQRKFDNLTKAERGGLSELDKAGFIKRQLVETRQITKHVAQILDSRMNTKYDENDKLIREVKVITLKSKLVSDFRKDFQFYKVREINNYHHAHDAYLNAVVGTALIKKYPKLESEFVYGDYKVYDVRKMIAKSEQEIGKATAKYFFYSNIMNFFKTEITLANGEIRKRPLIETNGETGEIVWDKGRDFATVRKVLSMPQVNIVKKTEVQTGGFSKESILPKRNSDKLIARKKDWDPKKYGGFDSPTVAYSVLVVAKVEKGKSKKLKSVKELLGITIMERSSFEKNPIDFLEAKGYKEVKKDLIIKLPKYSLFELENGRKRMLASAGELQKGNELALPSKYVNFLYLASHYEKLKGSPEDNEQKQLFVEQHKHYLDEIIEQISEFSKRVILADANLDKVLSAYNKHRDKPIREQAENIIHLFTLTNLGAPAAFKYFDTTIDRKRYTSTKEVLDATLIHQSITGLYETRIDLSQLGGDGGEAAAKGGGPAPGGTLNLEDEYRLYETSAEPEVSPGSTWLSDFPQAWAETGGMGLAVRQAPLIIPLKATSTPVSIKQYPMSQEAKLGIKPHIQRLLDQGILVPCQSPWNTPLLPVKKPGTNDYRPVQDLREVNKRVEDIHPTVPNPYNLLSGLPPSHRWYTVLDLKDAFFCLRLHPTSQPLFAFEWRDPGMGISGQLTWTRLPQGFKNSPTLFDEALHRDLADFRIQHPDLILLQYVDDILLAATSELDCQQGTRALLLTLGNLGYRASAKKAQLCQKQVKYLGYLLKEGQRWLTEARKETVMGQPTPKTPRQLREFLGTAGFCRLWIPGFAEMAAPLYPLTKTGTLFNWGPDQQKAYQEIKQALLTAPALGLPDLTKPFELFVDEKQGYAKGVLTQKLGPWRRPVAYLSKKLDPVAAGWPPCLRMVAAIAVLRKDAGKLTMGQPLVILAPHAVEALVKQPPDRWLSNARMTHYQAMLLDTDRVQFGPVVALNPATLLPLPEEGAPHDCLEILAETHGTRPDLTDQPIPDADHTWYTDGSSFLQEGQRKAGAAVTTETEVIWARALPAGTSAQRAELIALTQALKMAEGKRLNVYTDSRYAFATAHIHGEIYRRRGLLTSEGREIKNKSEILALLKALFLPKRLSIIHCLGHQKGDSAEARGNRLADQAAREAAIKTPPDTSTLLAGKRTADGSEFEKRTADGSEFESPKKKAKVE

SEQ ID NO: 1840 - protein, 2096 aa, synthetic construct
MPAAKRVKLDGGDKKYSIGLDIGTNSVGWAVITDEYKVPSKKFKVLGNTDRHSIKKNLIGALLFDSGETAEATRLKRTARRRYTRRKNRICYLQEIFSNEMAKVDDSFFHRLEESFLVEEDKKHERHPIFGNIVDEVAYHEKYPTIYHLRKKLVDSTDKADLRLIYLALAHMIKFRGHFLIEGDLNPDNSDVDKLFIQLVQTYNQLFEENPINASGVDAKAILSARLSKSRRLENLIAQLPGEKKNGLFGNLIALSLGLTPNFKSNFDLAEDAKLQLSKDTYDDDLDNLLAQIGDQYADLFLAAKNLSDAILLSDILRVNTEITKAPLSASMIKRYDEHHQDLTLLKALVRQQLPEKYKEIFFDQSKNGYAGYIDGGASQEEFYKFIKPILEKMDGTEELLVKLNREDLLRKQRTFDNGSIPHQIHLGELHAILRRQEDFYPFLKDNREKIEKILTFRIPYYVGPLARGNSRFAWMTRKSEETITPWNFEEVVDKGASAQSFIERMTNFDKNLPNEKVLPKHSLLYEYFTVYNELTKVKYVTEGMRKPAFLSGEQKKAIVDLLFKTNRKVTVKQLKEDYFKKIECFDSVEISGVEDRFNASLGTYHDLLKIIKDKDFLDNEENEDILEDIVLTLTLFEDREMIEERLKTYAHLFDDKVMKQLKRRRYTGWGRLSRKLINGIRDKQSGKTILDFLKSDGFANRNFMQLIHDDSLTFKEDIQKAQVSGQGDSLHEHIANLAGSPAIKKGILQTVKVVDELVKVMGRHKPENIVIEMARENQTTQKGQKNSRERMKRIEEGIKELGSQILKEHPVENTQLQNEKLYLYYLQNGRDMYVDQELDINRLSDYDVDHIVPQSFLKDDSIDNKVLTRSDKARGKSDNVPSEEVVKKMKNYWRQLLNAKLITQRKFDNLTKAERGGLSELDKAGFIKRQLVETRQITKHVAQILDSRMNTKYDENDKLIREVKVITLKSKLVSDFRKDFQFYKVREINNYHHAHDAYLNAVVGTALIKKYPKLESEFVYGDYKVYDVRKMIAKSEQEIGKATAKYFFYSNIMNFFKTEITLANGEIRKRPLIETNGETGEIVWDKGRDFATVRKVLSMPQVNIVKKTEVQTGGFSKESILPKRNSDKLIARKKDWDPKKYGGFDSPTVAYSVLVVAKVEKGKSKKLKSVKELLGITIMERSSFEKNPIDFLEAKGYKEVKKDLIIKLPKYSLFELENGRKRMLASAGELQKGNELALPSKYVNFLYLASHYEKLKGSPEDNEQKQLFVEQHKHYLDEIIEQISEFSKRVILADANLDKVLSAYNKHRDKPIREQAENIIHLFTLTNLGAPAAFKYFDTTIDRKRYTSTKEVLDATLIHQSITGLYETRIDLSQLGGDGGGGGPAPEAAAKGGTLNLEDEYRLYETSAEPEVSPGSTWLSDFPQAWAETGGMGLAVRQAPLIIPLKATSTPVSIKQYPMSQEAKLGIKPHIQRLLDQGILVPCQSPWNTPLLPVKKPGTNDYRPVQDLREVNKRVEDIHPTVPNPYNLLSGLPPSHRWYTVLDLKDAFFCLRLHPTSQPLFAFEWRDPGMGISGQLTWTRLPQGFKNSPTLFDEALHRDLADFRIQHPDLILLQYVDDILLAATSELDCQQGTRALLLTLGNLGYRASAKKAQLCQKQVKYLGYLLKEGQRWLTEARKETVMGQPTPKTPRQLREFLGTAGFCRLWIPGFAEMAAPLYPLTKTGTLFNWGPDQQKAYQEIKQALLTAPALGLPDLTKPFELFVDEKQGYAKGVLTQKLGPWRRPVAYLSKKLDPVAAGWPPCLRMVAAIAVLRKDAGKLTMGQPLVILAPHAVEALVKQPPDRWLSNARMTHYQAMLLDTDRVQFGPVVALNPATLLPLPEEGAPHDCLEILAETHGTRPDLTDQPIPDADHTWYTDGSSFLQEGQRKAGAAVTTETEVIWARALPAGTSAQRAELIALTQALKMAEGKRLNVYTDSRYAFATAHIHGEIYRRRGLLTSEGREIKNKSEILALLKALFLPKRLSIIHCLGHQKGDSAEARGNRLADQAAREAAIKTPPDTSTLLAGKRTADGSEFEKRTADGSEFESPKKKAKVE

SEQ ID NO: 1841 - protein, 2096 aa, synthetic construct
MPAAKRVKLDGGDKKYSIGLDIGTNSVGWAVITDEYKVPSKKFKVLGNTDRHSIKKNLIGALLFDSGETAEATRLKRTARRRYTRRKNRICYLQEIFSNEMAKVDDSFFHRLEESFLVEEDKKHERHPIFGNIVDEVAYHEKYPTIYHLRKKLVDSTDKADLRLIYLALAHMIKFRGHFLIEGDLNPDNSDVDKLFIQLVQTYNQLFEENPINASGVDAKAILSARLSKSRRLENLIAQLPGEKKNGLFGNLIALSLGLTPNFKSNFDLAEDAKLQLSKDTYDDDLDNLLAQIGDQYADLFLAAKNLSDAILLSDILRVNTEITKAPLSASMIKRYDEHHQDLTLLKALVRQQLPEKYKEIFFDQSKNGYAGYIDGGASQEEFYKFIKPILEKMDGTEELLVKLNREDLLRKQRTFDNGSIPHQIHLGELHAILRRQEDFYPFLKDNREKIEKILTFRIPYYVGPLARGNSRFAWMTRKSEETITPWNFEEVVDKGASAQSFIERMTNFDKNLPNEKVLPKHSLLYEYFTVYNELTKVKYVTEGMRKPAFLSGEQKKAIVDLLFKTNRKVTVKQLKEDYFKKIECFDSVEISGVEDRFNASLGTYHDLLKIIKDKDFLDNEENEDILEDIVLTLTLFEDREMIEERLKTYAHLFDDKVMKQLKRRRYTGWGRLSRKLINGIRDKQSGKTILDFLKSDGFANRNFMQLIHDDSLTFKEDIQKAQVSGQGDSLHEHIANLAGSPAIKKGILQTVKVVDELVKVMGRHKPENIVIEMARENQTTQKGQKNSRERMKRIEEGIKELGSQILKEHPVENTQLQNEKLYLYYLQNGRDMYVDQELDINRLSDYDVDHIVPQSFLKDDSIDNKVLTRSDKARGKSDNVPSEEVVKKMKNYWRQLLNAKLITQRKFDNLTKAERGGLSELDKAGFIKRQLVETRQITKHVAQILDSRMNTKYDENDKLIREVKVITLKSKLVSDFRKDFQFYKVREINNYHHAHDAYLNAVVGTALIKKYPKLESEFVYGDYKVYDVRKMIAKSEQEIGKATAKYFFYSNIMNFFKTEITLANGEIRKRPLIETNGETGEIVWDKGRDFATVRKVLSMPQVNIVKKTEVQTGGFSKESILPKRNSDKLIARKKDWDPKKYGGFDSPTVAYSVLVVAKVEKGKSKKLKSVKELLGITIMERSSFEKNPIDFLEAKGYKEVKKDLIIKLPKYSLFELENGRKRMLASAGELQKGNELALPSKYVNFLYLASHYEKLKGSPEDNEQKQLFVEQHKHYLDEIIEQISEFSKRVILADANLDKVLSAYNKHRDKPIREQAENIIHLFTLTNLGAPAAFKYFDTTIDRKRYTSTKEVLDATLIHQSITGLYETRIDLSQLGGDGGEAAAKGGGGGSGGTLNLEDEYRLYETSAEPEVSPGSTWLSDFPQAWAETGGMGLAVRQAPLIIPLKATSTPVSIKQYPMSQEAKLGIKPHIQRLLDQGILVPCQSPWNTPLLPVKKPGTNDYRPVQDLREVNKRVEDIHPTVPNPYNLLSGLPPSHRWYTVLDLKDAFFCLRLHPTSQPLFAFEWRDPGMGISGQLTWTRLPQGFKNSPTLFDEALHRDLADFRIQHPDLILLQYVDDILLAATSELDCQQGTRALLLTLGNLGYRASAKKAQLCQKQVKYLGYLLKEGQRWLTEARKETVMGQPTPKTPRQLREFLGTAGFCRLWIPGFAEMAAPLYPLTKTGTLFNWGPDQQKAYQEIKQALLTAPALGLPDLTKPFELFVDEKQGYAKGVLTQKLGPWRRPVAYLSKKLDPVAAGWPPCLRMVAAIAVLRKDAGKLTMGQPLVILAPHAVEALVKQPPDRWLSNARMTHYQAMLLDTDRVQFGPVVALNPATLLPLPEEGAPHDCLEILAETHGTRPDLTDQPIPDADHTWYTDGSSFLQEGQRKAGAAVTTETEVIWARALPAGTSAQRAELIALTQALKMAEGKRLNVYTDSRYAFATAHIHGEIYRRRGLLTSEGREIKNKSEILALLKALFLPKRLSIIHCLGHQKGDSAEARGNRLADQAAREAAIKTPPDTSTLLAGKRTADGSEFEKRTADGSEFESPKKKAKVE

SEQ ID NO: 1842 - protein, 2096 aa, synthetic construct
MPAAKRVKLDGGDKKYSIGLDIGTNSVGWAVITDEYKVPSKKFKVLGNTDRHSIKKNLIGALLFDSGETAEATRLKRTARRRYTRRKNRICYLQEIFSNEMAKVDDSFFHRLEESFLVEEDKKHERHPIFGNIVDEVAYHEKYPTIYHLRKKLVDSTDKADLRLIYLALAHMIKFRGHFLIEGDLNPDNSDVDKLFIQLVQTYNQLFEENPINASGVDAKAILSARLSKSRRLENLIAQLPGEKKNGLFGNLIALSLGLTPNFKSNFDLAEDAKLQLSKDTYDDDLDNLLAQIGDQYADLFLAAKNLSDAILLSDILRVNTEITKAPLSASMIKRYDEHHQDLTLLKALVRQQLPEKYKEIFFDQSKNGYAGYIDGGASQEEFYKFIKPILEKMDGTEELLVKLNREDLLRKQRTFDNGSIPHQIHLGELHAILRRQEDFYPFLKDNREKIEKILTFRIPYYVGPLARGNSRFAWMTRKSEETITPWNFEEVVDKGASAQSFIERMTNFDKNLPNEKVLPKHSLLYEYFTVYNELTKVKYVTEGMRKPAFLSGEQKKAIVDLLFKTNRKVTVKQLKEDYFKKIECFDSVEISGVEDRFNASLGTYHDLLKIIKDKDFLDNEENEDILEDIVLTLTLFEDREMIEERLKTYAHLFDDKVMKQLKRRRYTGWGRLSRKLINGIRDKQSGKTILDFLKSDGFANRNFMQLIHDDSLTFKEDIQKAQVSGQGDSLHEHIANLAGSPAIKKGILQTVKVVDELVKVMGRHKPENIVIEMARENQTTQKGQKNSRERMKRIEEGIKELGSQILKEHPVENTQLQNEKLYLYYLQNGRDMYVDQELDINRLSDYDVDHIVPQSFLKDDSIDNKVLTRSDKARGKSDNVPSEEVVKKMKNYWRQLLNAKLITQRKFDNLTKAERGGLSELDKAGFIKRQLVETRQITKHVAQILDSRMNTKYDENDKLIREVKVITLKSKLVSDFRKDFQFYKVREINNYHHAHDAYLNAVVGTALIKKYPKLESEFVYGDYKVYDVRKMIAKSEQEIGKATAKYFFYSNIMNFFKTEITLANGEIRKRPLIETNGETGEIVWDKGRDFATVRKVLSMPQVNIVKKTEVQTGGFSKESILPKRNSDKLIARKKDWDPKKYGGFDSPTVAYSVLVVAKVEKGKSKKLKSVKELLGITIMERSSFEKNPIDFLEAKGYKEVKKDLIIKLPKYSLFELENGRKRMLASAGELQKGNELALPSKYVNFLYLASHYEKLKGSPEDNEQKQLFVEQHKHYLDEIIEQISEFSKRVILADANLDKVLSAYNKHRDKPIREQAENIIHLFTLTNLGAPAAFKYFDTTIDRKRYTSTKEVLDATLIHQSITGLYETRIDLSQLGGDGGPAPEAAAKGSSGGTLNLEDEYRLYETSAEPEVSPGSTWLSDFPQAWAETGGMGLAVRQAPLIIPLKATSTPVSIKQYPMSQEAKLGIKPHIQRLLDQGILVPCQSPWNTPLLPVKKPGTNDYRPVQDLREVNKRVEDIHPTVPNPYNLLSGLPPSHRWYTVLDLKDAFFCLRLHPTSQPLFAFEWRDPGMGISGQLTWTRLPQGFKNSPTLFNEALHRDLADFRIQHPDLILLQYVDDILLAATSELDCQQGTRALLLTLGNLGYRASAKKAQLCQKQVKYLGYLLKEGQRWLTEARKETVMGQPTPKTPRQLREFLGTAGFCRLWIPGFAEMAAPLYPLTKPGTLFNWGPDQQKAYQEIKQALLTAPALGLPDLTKPFELFVDEKQGYAKGVLTQKLGPWRRPVAYLSKKLDPVAAGWPPCLRMVAAIAVLRKDAGKLTMGQPLVILAPHAVEALVKQPPDRWLSNARMTHYQAMLLDTDRVQFGPVVALNPATLLPLPEEGAPHDCLEILAETHGTRPDLTDQPIPDADHTWYTDGSSFLQEGQRKAGAAVTTETEVIWARALPAGTSAQRAELIALTQALKMAEGKRLNVYTDSRYAFATAHIHGEIYRRRGWLTSEGREIKNKSEILALLKALFLPKRLSIIHCLGHQKGDSAEARGNRLADQAAREAAIKTPPDTSTLLAGKRTADGSEFEKRTADGSEFESPKKKAKVE

SEQ ID NO: 1843 - protein, 2093 aa, synthetic construct
MPAAKRVKLDGGDKKYSIGLDIGTNSVGWAVITDEYKVPSKKFKVLGNTDRHSIKKNLIGALLFDSGETAEATRLKRTARRRYTRRKNRICYLQEIFSNEMAKVDDSFFHRLEESFLVEEDKKHERHPIFGNIVDEVAYHEKYPTIYHLRKKLVDSTDKADLRLIYLALAHMIKFRGHFLIEGDLNPDNSDVDKLFIQLVQTYNQLFEENPINASGVDAKAILSARLSKSRRLENLIAQLPGEKKNGLFGNLIALSLGLTPNFKSNFDLAEDAKLQLSKDTYDDDLDNLLAQIGDQYADLFLAAKNLSDAILLSDILRVNTEITKAPLSASMIKRYDEHHQDLTLLKALVRQQLPEKYKEIFFDQSKNGYAGYIDGGASQEEFYKFIKPILEKMDGTEELLVKLNREDLLRKQRTFDNGSIPHQIHLGELHAILRRQEDFYPFLKDNREKIEKILTFRIPYYVGPLARGNSRFAWMTRKSEETITPWNFEEVVDKGASAQSFIERMTNFDKNLPNEKVLPKHSLLYEYFTVYNELTKVKYVTEGMRKPAFLSGEQKKAIVDLLFKTNRKVTVKQLKEDYFKKIECFDSVEISGVEDRFNASLGTYHDLLKIIKDKDFLDNEENEDILEDIVLTLTLFEDREMIEERLKTYAHLFDDKVMKQLKRRRYTGWGRLSRKLINGIRDKQSGKTILDFLKSDGFANRNFMQLIHDDSLTFKEDIQKAQVSGQGDSLHEHIANLAGSPAIKKGILQTVKVVDELVKVMGRHKPENIVIEMARENQTTQKGQKNSRERMKRIEEGIKELGSQILKEHPVENTQLQNEKLYLYYLQNGRDMYVDQELDINRLSDYDVDHIVPQSFLKDDSIDNKVLTRSDKARGKSDNVPSEEVVKKMKNYWRQLLNAKLITQRKFDNLTKAERGGLSELDKAGFIKRQLVETRQITKHVAQILDSRMNTKYDENDKLIREVKVITLKSKLVSDFRKDFQFYKVREINNYHHAHDAYLNAVVGTALIKKYPKLESEFVYGDYKVYDVRKMIAKSEQEIGKATAKYFFYSNIMNFFKTEITLANGEIRKRPLIETNGETGEIVWDKGRDFATVRKVLSMPQVNIVKKTEVQTGGFSKESILPKRNSDKLIARKKDWDPKKYGGFDSPTVAYSVLVVAKVEKGKSKKLKSVKELLGITIMERSSFEKNPIDFLEAKGYKEVKKDLIIKLPKYSLFELENGRKRMLASAGELQKGNELALPSKYVNFLYLASHYEKLKGSPEDNEQKQLFVEQHKHYLDEIIEQISEFSKRVILADANLDKVLSAYNKHRDKPIREQAENIIHLFTLTNLGAPAAFKYFDTTIDRKRYTSTKEVLDATLIHQSITGLYETRIDLSQLGGDGGPAPEAAAKGGTLNLEDEYRLYETSAEPEVSPGSTWLSDFPQAWAETGGMGLAVRQAPLIIPLKATSTPVSIKQYPMSQEAKLGIKPHIQRLLDQGILVPCQSPWNTPLLPVKKPGTNDYRPVQDLREVNKRVEDIHPTVPNPYNLLSGLPPSHRWYTVLDLKDAFFCLRLHPTSQPLFAFEWRDPGMGISGQLTWTRLPQGFKNSPTLFNEALHRDLADFRIQHPDLILLQYVDDILLAATSELDCQQGTRALLLTLGNLGYRASAKKAQLCQKQVKYLGYLLKEGQRWLTEARKETVMGQPTPKTPRQLREFLGTAGFCRLWIPGFAEMAAPLYPLTKPGTLFNWGPDQQKAYQEIKQALLTAPALGLPDLTKPFELFVDEKQGYAKGVLTQKLGPWRRPVAYLSKKLDPVAAGWPPCLRMVAAIAVLRKDAGKLTMGQPLVILAPHAVEALVKQPPDRWLSNARMTHYQAMLLDTDRVQFGPVVALNPATLLPLPEEGAPHDCLEILAETHGTRPDLTDQPIPDADHTWYTDGSSFLQEGQRKAGAAVTTETEVIWARALPAGTSAQRAELIALTQALKMAEGKRLNVYTDSRYAFATAHIHGEIYRRRGWLTSEGREIKNKSEILALLKALFLPKRLSIIHCLGHQKGDSAEARGNRLADQAAREAAIKTPPDTSTLLAGKRTADGSEFEKRTADGSEFESPKKKAKVE

SEQ ID NO: 1844 - protein, 2098 aa, synthetic construct
MPAAKRVKLDGGDKKYSIGLDIGTNSVGWAVITDEYKVPSKKFKVLGNTDRHSIKKNLIGALLFDSGETAEATRLKRTARRRYTRRKNRICYLQEIFSNEMAKVDDSFFHRLEESFLVEEDKKHERHPIFGNIVDEVAYHEKYPTIYHLRKKLVDSTDKADLRLIYLALAHMIKFRGHFLIEGDLNPDNSDVDKLFIQLVQTYNQLFEENPINASGVDAKAILSARLSKSRRLENLIAQLPGEKKNGLFGNLIALSLGLTPNFKSNFDLAEDAKLQLSKDTYDDDLDNLLAQIGDQYADLFLAAKNLSDAILLSDILRVNTEITKAPLSASMIKRYDEHHQDLTLLKALVRQQLPEKYKEIFFDQSKNGYAGYIDGGASQEEFYKFIKPILEKMDGTEELLVKLNREDLLRKQRTFDNGSIPHQIHLGELHAILRRQEDFYPFLKDNREKIEKILTFRIPYYVGPLARGNSRFAWMTRKSEETITPWNFEEVVDKGASAQSFIERMTNFDKNLPNEKVLPKHSLLYEYFTVYNELTKVKYVTEGMRKPAFLSGEQKKAIVDLLFKTNRKVTVKQLKEDYFKKIECFDSVEISGVEDRFNASLGTYHDLLKIIKDKDFLDNEENEDILEDIVLTLTLFEDREMIEERLKTYAHLFDDKVMKQLKRRRYTGWGRLSRKLINGIRDKQSGKTILDFLKSDGFANRNFMQLIHDDSLTFKEDIQKAQVSGQGDSLHEHIANLAGSPAIKKGILQTVKVVDELVKVMGRHKPENIVIEMARENQTTQKGQKNSRERMKRIEEGIKELGSQILKEHPVENTQLQNEKLYLYYLQNGRDMYVDQELDINRLSDYDVDHIVPQSFLKDDSIDNKVLTRSDKARGKSDNVPSEEVVKKMKNYWRQLLNAKLITQRKFDNLTKAERGGLSELDKAGFIKRQLVETRQITKHVAQILDSRMNTKYDENDKLIREVKVITLKSKLVSDFRKDFQFYKVREINNYHHAHDAYLNAVVGTALIKKYPKLESEFVYGDYKVYDVRKMIAKSEQEIGKATAKYFFYSNIMNFFKTEITLANGEIRKRPLIETNGETGEIVWDKGRDFATVRKVLSMPQVNIVKKTEVQTGGFSKESILPKRNSDKLIARKKDWDPKKYGGFDSPTVAYSVLVVAKVEKGKSKKLKSVKELLGITIMERSSFEKNPIDFLEAKGYKEVKKDLIIKLPKYSLFELENGRKRMLASAGELQKGNELALPSKYVNFLYLASHYEKLKGSPEDNEQKQLFVEQHKHYLDEIIEQISEFSKRVILADANLDKVLSAYNKHRDKPIREQAENIIHLFTLTNLGAPAAFKYFDTTIDRKRYTSTKEVLDATLIHQSITGLYETRIDLSQLGGDGGPAPAPAPAPAPAPGGTLNLEDEYRLYETSAEPEVSPGSTWLSDFPQAWAETGGMGLAVRQAPLIIPLKATSTPVSIKQYPMSQEAKLGIKPHIQRLLDQGILVPCQSPWNTPLLPVKKPGTNDYRPVQDLREVNKRVEDIHPTVPNPYNLLSGLPPSHRWYTVLDLKDAFFCLRLHPTSQPLFAFEWRDPGMGISGQLTWTRLPQGFKNSPTLFNEALHRDLADFRIQHPDLILLQYVDDILLAATSELDCQQGTRALLLTLGNLGYRASAKKAQLCQKQVKYLGYLLKEGQRWLTEARKETVMGQPTPKTPRQLREFLGTAGFCRLWIPGFAEMAAPLYPLTKPGTLFNWGPDQQKAYQEIKQALLTAPALGLPDLTKPFELFVDEKQGYAKGVLTQKLGPWRRPVAYLSKKLDPVAAGWPPCLRMVAAIAVLRKDAGKLTMGQPLVILAPHAVEALVKQPPDRWLSNARMTHYQAMLLDTDRVQFGPVVALNPATLLPLPEEGAPHDCLEILAETHGTRPDLTDQPIPDADHTWYTDGSSFLQEGQRKAGAAVTTETEVIWARALPAGTSAQRAELIALTQALKMAEGKRLNVYTDSRYAFATAHIHGEIYRRRGWLTSEGREIKNKSEILALLKALFLPKRLSIIHCLGHQKGDSAEARGNRLADQAAREAAIKTPPDTSTLLAGKRTADGSEFEKRTADGSEFESPKKKAKVE

SEQ ID NO: 1845 - protein, 2096 aa, synthetic construct
MPAAKRVKLDGGDKKYSIGLDIGTNSVGWAVITDEYKVPSKKFKVLGNTDRHSIKKNLIGALLFDSGETAEATRLKRTARRRYTRRKNRICYLQEIFSNEMAKVDDSFFHRLEESFLVEEDKKHERHPIFGNIVDEVAYHEKYPTIYHLRKKLVDSTDKADLRLIYLALAHMIKFRGHFLIEGDLNPDNSDVDKLFIQLVQTYNQLFEENPINASGVDAKAILSARLSKSRRLENLIAQLPGEKKNGLFGNLIALSLGLTPNFKSNFDLAEDAKLQLSKDTYDDDLDNLLAQIGDQYADLFLAAKNLSDAILLSDILRVNTEITKAPLSASMIKRYDEHHQDLTLLKALVRQQLPEKYKEIFFDQSKNGYAGYIDGGASQEEFYKFIKPILEKMDGTEELLVKLNREDLLRKQRTFDNGSIPHQIHLGELHAILRRQEDFYPFLKDNREKIEKILTFRIPYYVGPLARGNSRFAWMTRKSEETITPWNFEEVVDKGASAQSFIERMTNFDKNLPNEKVLPKHSLLYEYFTVYNELTKVKYVTEGMRKPAFLSGEQKKAIVDLLFKTNRKVTVKQLKEDYFKKIECFDSVEISGVEDRFNASLGTYHDLLKIIKDKDFLDNEENEDILEDIVLTLTLFEDREMIEERLKTYAHLFDDKVMKQLKRRRYTGWGRLSRKLINGIRDKQSGKTILDFLKSDGFANRNFMQLIHDDSLTFKEDIQKAQVSGQGDSLHEHIANLAGSPAIKKGILQTVKVVDELVKVMGRHKPENIVIEMARENQTTQKGQKNSRERMKRIEEGIKELGSQILKEHPVENTQLQNEKLYLYYLQNGRDMYVDQELDINRLSDYDVDHIVPQSFLKDDSIDNKVLTRSDKARGKSDNVPSEEVVKKMKNYWRQLLNAKLITQRKFDNLTKAERGGLSELDKAGFIKRQLVETRQITKHVAQILDSRMNTKYDENDKLIREVKVITLKSKLVSDFRKDFQFYKVREINNYHHAHDAYLNAVVGTALIKKYPKLESEFVYGDYKVYDVRKMIAKSEQEIGKATAKYFFYSNIMNFFKTEITLANGEIRKRPLIETNGETGEIVWDKGRDFATVRKVLSMPQVNIVKKTEVQTGGFSKESILPKRNSDKLIARKKDWDPKKYGGFDSPTVAYSVLVVAKVEKGKSKKLKSVKELLGITIMERSSFEKNPIDFLEAKGYKEVKKDLIIKLPKYSLFELENGRKRMLASAGELQKGNELALPSKYVNFLYLASHYEKLKGSPEDNEQKQLFVEQHKHYLDEIIEQISEFSKRVILADANLDKVLSAYNKHRDKPIREQAENIIHLFTLTNLGAPAAFKYFDTTIDRKRYTSTKEVLDATLIHQSITGLYETRIDLSQLGGDGGGSSGGGEAAAKGGTLNLEDEYRLYETSAEPEVSPGSTWLSDFPQAWAETGGMGLAVRQAPLIIPLKATSTPVSIKQYPMSQEAKLGIKPHIQRLLDQGILVPCQSPWNTPLLPVKKPGTNDYRPVQDLREVNKRVEDIHPTVPNPYNLLSGLPPSHRWYTVLDLKDAFFCLRLHPTSQPLFAFEWRDPGMGISGQLTWTRLPQGFKNSPTLFNEALHRDLADFRIQHPDLILLQYVDDILLAATSELDCQQGTRALLLTLGNLGYRASAKKAQLCQKQVKYLGYLLKEGQRWLTEARKETVMGQPTPKTPRQLREFLGTAGFCRLWIPGFAEMAAPLYPLTKPGTLFNWGPDQQKAYQEIKQALLTAPALGLPDLTKPFELFVDEKQGYAKGVLTQKLGPWRRPVAYLSKKLDPVAAGWPPCLRMVAAIAVLRKDAGKLTMGQPLVILAPHAVEALVKQPPDRWLSNARMTHYQAMLLDTDRVQFGPVVALNPATLLPLPEEGAPHDCLEILAETHGTRPDLTDQPIPDADHTWYTDGSSFLQEGQRKAGAAVTTETEVIWARALPAGTSAQRAELIALTQALKMAEGKRLNVYTDSRYAFATAHIHGEIYRRRGWLTSEGREIKNKSEILALLKALFLPKRLSIIHCLGHQKGDSAEARGNRLADQAAREAAIKTPPDTSTLLAGKRTADGSEFEKRTADGSEFESPKKKAKVE

SEQ ID NO: 1846 - protein, 2096 aa, synthetic construct
MPAAKRVKLDGGDKKYSIGLDIGTNSVGWAVITDEYKVPSKKFKVLGNTDRHSIKKNLIGALLFDSGETAEATRLKRTARRRYTRRKNRICYLQEIFSNEMAKVDDSFFHRLEESFLVEEDKKHERHPIFGNIVDEVAYHEKYPTIYHLRKKLVDSTDKADLRLIYLALAHMIKFRGHFLIEGDLNPDNSDVDKLFIQLVQTYNQLFEENPINASGVDAKAILSARLSKSRRLENLIAQLPGEKKNGLFGNLIALSLGLTPNFKSNFDLAEDAKLQLSKDTYDDDLDNLLAQIGDQYADLFLAAKNLSDAILLSDILRVNTEITKAPLSASMIKRYDEHHQDLTLLKALVRQQLPEKYKEIFFDQSKNGYAGYIDGGASQEEFYKFIKPILEKMDGTEELLVKLNREDLLRKQRTFDNGSIPHQIHLGELHAILRRQEDFYPFLKDNREKIEKILTFRIPYYVGPLARGNSRFAWMTRKSEETITPWNFEEVVDKGASAQSFIERMTNFDKNLPNEKVLPKHSLLYEYFTVYNELTKVKYVTEGMRKPAFLSGEQKKAIVDLLFKTNRKVTVKQLKEDYFKKIECFDSVEISGVEDRFNASLGTYHDLLKIIKDKDFLDNEENEDILEDIVLTLTLFEDREMIEERLKTYAHLFDDKVMKQLKRRRYTGWGRLSRKLINGIRDKQSGKTILDFLKSDGFANRNFMQLIHDDSLTFKEDIQKAQVSGQGDSLHEHIANLAGSPAIKKGILQTVKVVDELVKVMGRHKPENIVIEMARENQTTQKGQKNSRERMKRIEEGIKELGSQILKEHPVENTQLQNEKLYLYYLQNGRDMYVDQELDINRLSDYDVDHIVPQSFLKDDSIDNKVLTRSDKARGKSDNVPSEEVVKKMKNYWRQLLNAKLITQRKFDNLTKAERGGLSELDKAGFIKRQLVETRQITKHVAQILDSRMNTKYDENDKLIREVKVITLKSKLVSDFRKDFQFYKVREINNYHHAHDAYLNAVVGTALIKKYPKLESEFVYGDYKVYDVRKMIAKSEQEIGKATAKYFFYSNIMNFFKTEITLANGEIRKRPLIETNGETGEIVWDKGRDFATVRKVLSMPQVNIVKKTEVQTGGFSKESILPKRNSDKLIARKKDWDPKKYGGFDSPTVAYSVLVVAKVEKGKSKKLKSVKELLGITIMERSSFEKNPIDFLEAKGYKEVKKDLIIKLPKYSLFELENGRKRMLASAGELQKGNELALPSKYVNFLYLASHYEKLKGSPEDNEQKQLFVEQHKHYLDEIIEQISEFSKRVILADANLDKVLSAYNKHRDKPIREQAENIIHLFTLTNLGAPAAFKYFDTTIDRKRYTSTKEVLDATLIHQSITGLYETRIDLSQLGGDGGEAAAKGGGGSSGGTLNLEDEYRLYETSAEPEVSPGSTWLSDFPQAWAETGGMGLAVRQAPLIIPLKATSTPVSIKQYPMSQEAKLGIKPHIQRLLDQGILVPCQSPWNTPLLPVKKPGTNDYRPVQDLREVNKRVEDIHPTVPNPYNLLSGLPPSHRWYTVLDLKDAFFCLRLHPTSQPLFAFEWRDPGMGISGQLTWTRLPQGFKNSPTLFNEALHRDLADFRIQHPDLILLQYVDDILLAATSELDCQQGTRALLLTLGNLGYRASAKKAQLCQKQVKYLGYLLKEGQRWLTEARKETVMGQPTPKTPRQLREFLGTAGFCRLWIPGFAEMAAPLYPLTKPGTLFNWGPDQQKAYQEIKQALLTAPALGLPDLTKPFELFVDEKQGYAKGVLTQKLGPWRRPVAYLSKKLDPVAAGWPPCLRMVAAIAVLRKDAGKLTMGQPLVILAPHAVEALVKQPPDRWLSNARMTHYQAMLLDTDRVQFGPVVALNPATLLPLPEEGAPHDCLEILAETHGTRPDLTDQPIPDADHTWYTDGSSFLQEGQRKAGAAVTTETEVIWARALPAGTSAQRAELIALTQALKMAEGKRLNVYTDSRYAFATAHIHGEIYRRRGWLTSEGREIKNKSEILALLKALFLPKRLSIIHCLGHQKGDSAEARGNRLADQAAREAAIKTPPDTSTLLAGKRTADGSEFEKRTADGSEFESPKKKAKVE

SEQ ID NO: 1847 - protein, 2095 aa, synthetic construct
MPAAKRVKLDGGDKKYSIGLDIGTNSVGWAVITDEYKVPSKKFKVLGNTDRHSIKKNLIGALLFDSGETAEATRLKRTARRRYTRRKNRICYLQEIFSNEMAKVDDSFFHRLEESFLVEEDKKHERHPIFGNIVDEVAYHEKYPTIYHLRKKLVDSTDKADLRLIYLALAHMIKFRGHFLIEGDLNPDNSDVDKLFIQLVQTYNQLFEENPINASGVDAKAILSARLSKSRRLENLIAQLPGEKKNGLFGNLIALSLGLTPNFKSNFDLAEDAKLQLSKDTYDDDLDNLLAQIGDQYADLFLAAKNLSDAILLSDILRVNTEITKAPLSASMIKRYDEHHQDLTLLKALVRQQLPEKYKEIFFDQSKNGYAGYIDGGASQEEFYKFIKPILEKMDGTEELLVKLNREDLLRKQRTFDNGSIPHQIHLGELHAILRRQEDFYPFLKDNREKIEKILTFRIPYYVGPLARGNSRFAWMTRKSEETITPWNFEEVVDKGASAQSFIERMTNFDKNLPNEKVLPKHSLLYEYFTVYNELTKVKYVTEGMRKPAFLSGEQKKAIVDLLFKTNRKVTVKQLKEDYFKKIECFDSVEISGVEDRFNASLGTYHDLLKIIKDKDFLDNEENEDILEDIVLTLTLFEDREMIEERLKTYAHLFDDKVMKQLKRRRYTGWGRLSRKLINGIRDKQSGKTILDFLKSDGFANRNFMQLIHDDSLTFKEDIQKAQVSGQGDSLHEHIANLAGSPAIKKGILQTVKVVDELVKVMGRHKPENIVIEMARENQTTQKGQKNSRERMKRIEEGIKELGSQILKEHPVENTQLQNEKLYLYYLQNGRDMYVDQELDINRLSDYDVDHIVPQSFLKDDSIDNKVLTRSDKARGKSDNVPSEEVVKKMKNYWRQLLNAKLITQRKFDNLTKAERGGLSELDKAGFIKRQLVETRQITKHVAQILDSRMNTKYDENDKLIREVKVITLKSKLVSDFRKDFQFYKVREINNYHHAHDAYLNAVVGTALIKKYPKLESEFVYGDYKVYDVRKMIAKSEQEIGKATAKYFFYSNIMNFFKTEITLANGEIRKRPLIETNGETGEIVWDKGRDFATVRKVLSMPQVNIVKKTEVQTGGFSKESILPKRNSDKLIARKKDWDPKKYGGFDSPTVAYSVLVVAKVEKGKSKKLKSVKELLGITIMERSSFEKNPIDFLEAKGYKEVKKDLIIKLPKYSLFELENGRKRMLASAGELQKGNELALPSKYVNFLYLASHYEKLKGSPEDNEQKQLFVEQHKHYLDEIIEQISEFSKRVILADANLDKVLSAYNKHRDKPIREQAENIIHLFTLTNLGAPAAFKYFDTTIDRKRYTSTKEVLDATLIHQSITGLYETRIDLSQLGGDGGEAAAKEAAAKGGTLNLEDEYRLYETSAEPEVSPGSTWLSDFPQAWAETGGMGLAVRQAPLIIPLKATSTPVSIKQYPMSQEAKLGIKPHIQRLLDQGILVPCQSPWNTPLLPVKKPGTNDYRPVQDLREVNKRVEDIHPTVPNPYNLLSGLPPSHRWYTVLDLKDAFFCLRLHPTSQPLFAFEWRDPGMGISGQLTWTRLPQGFKNSPTLFNEALHRDLADFRIQHPDLILLQYVDDILLAATSELDCQQGTRALLLTLGNLGYRASAKKAQLCQKQVKYLGYLLKEGQRWLTEARKETVMGQPTPKTPRQLREFLGTAGFCRLWIPGFAEMAAPLYPLTKPGTLFNWGPDQQKAYQEIKQALLTAPALGLPDLTKPFELFVDEKQGYAKGVLTQKLGPWRRPVAYLSKKLDPVAAGWPPCLRMVAAIAVLRKDAGKLTMGQPLVILAPHAVEALVKQPPDRWLSNARMTHYQAMLLDTDRVQFGPVVALNPATLLPLPEEGAPHDCLEILAETHGTRPDLTDQPIPDADHTWYTDGSSFLQEGQRKAGAAVTTETEVIWARALPAGTSAQRAELIALTQALKMAEGKRLNVYTDSRYAFATAHIHGEIYRRRGWLTSEGREIKNKSEILALLKALFLPKRLSIIHCLGHQKGDSAEARGNRLADQAAREAAIKTPPDTSTLLAGKRTADGSEFEKRTADGSEFESPKKKAKVE

SEQ ID NO: 1848 - protein, 2091 aa, synthetic construct
MPAAKRVKLDGGDKKYSIGLDIGTNSVGWAVITDEYKVPSKKFKVLGNTDRHSIKKNLIGALLFDSGETAEATRLKRTARRRYTRRKNRICYLQEIFSNEMAKVDDSFFHRLEESFLVEEDKKHERHPIFGNIVDEVAYHEKYPTIYHLRKKLVDSTDKADLRLIYLALAHMIKFRGHFLIEGDLNPDNSDVDKLFIQLVQTYNQLFEENPINASGVDAKAILSARLSKSRRLENLIAQLPGEKKNGLFGNLIALSLGLTPNFKSNFDLAEDAKLQLSKDTYDDDLDNLLAQIGDQYADLFLAAKNLSDAILLSDILRVNTEITKAPLSASMIKRYDEHHQDLTLLKALVRQQLPEKYKEIFFDQSKNGYAGYIDGGASQEEFYKFIKPILEKMDGTEELLVKLNREDLLRKQRTFDNGSIPHQIHLGELHAILRRQEDFYPFLKDNREKIEKILTFRIPYYVGPLARGNSRFAWMTRKSEETITPWNFEEVVDKGASAQSFIERMTNFDKNLPNEKVLPKHSLLYEYFTVYNELTKVKYVTEGMRKPAFLSGEQKKAIVDLLFKTNRKVTVKQLKEDYFKKIECFDSVEISGVEDRFNASLGTYHDLLKIIKDKDFLDNEENEDILEDIVLTLTLFEDREMIEERLKTYAHLFDDKVMKQLKRRRYTGWGRLSRKLINGIRDKQSGKTILDFLKSDGFANRNFMQLIHDDSLTFKEDIQKAQVSGQGDSLHEHIANLAGSPAIKKGILQTVKVVDELVKVMGRHKPENIVIEMARENQTTQKGQKNSRERMKRIEEGIKELGSQILKEHPVENTQLQNEKLYLYYLQNGRDMYVDQELDINRLSDYDVDHIVPQSFLKDDSIDNKVLTRSDKARGKSDNVPSEEVVKKMKNYWRQLLNAKLITQRKFDNLTKAERGGLSELDKAGFIKRQLVETRQITKHVAQILDSRMNTKYDENDKLIREVKVITLKSKLVSDFRKDFQFYKVREINNYHHAHDAYLNAVVGTALIKKYPKLESEFVYGDYKVYDVRKMIAKSEQEIGKATAKYFFYSNIMNFFKTEITLANGEIRKRPLIETNGETGEIVWDKGRDFATVRKVLSMPQVNIVKKTEVQTGGFSKESILPKRNSDKLIARKKDWDPKKYGGFDSPTVAYSVLVVAKVEKGKSKKLKSVKELLGITIMERSSFEKNPIDFLEAKGYKEVKKDLIIKLPKYSLFELENGRKRMLASAGELQKGNELALPSKYVNFLYLASHYEKLKGSPEDNEQKQLFVEQHKHYLDEIIEQISEFSKRVILADANLDKVLSAYNKHRDKPIREQAENIIHLFTLTNLGAPAAFKYFDTTIDRKRYTSTKEVLDATLIHQSITGLYETRIDLSQLGGDGGPAPGGGGGTLNLEDEYRLYETSAEPEVSPGSTWLSDFPQAWAETGGMGLAVRQAPLIIPLKATSTPVSIKQYPMSQEAKLGIKPHIQRLLDQGILVPCQSPWNTPLLPVKKPGTNDYRPVQDLREVNKRVEDIHPTVPNPYNLLSGLPPSHRWYTVLDLKDAFFCLRLHPTSQPLFAFEWRDPGMGISGQLTWTRLPQGFKNSPTLFNEALHRDLADFRIQHPDLILLQYVDDILLAATSELDCQQGTRALLLTLGNLGYRASAKKAQLCQKQVKYLGYLLKEGQRWLTEARKETVMGQPTPKTPRQLREFLGTAGFCRLWIPGFAEMAAPLYPLTKPGTLFNWGPDQQKAYQEIKQALLTAPALGLPDLTKPFELFVDEKQGYAKGVLTQKLGPWRRPVAYLSKKLDPVAAGWPPCLRMVAAIAVLRKDAGKLTMGQPLVILAPHAVEALVKQPPDRWLSNARMTHYQAMLLDTDRVQFGPVVALNPATLLPLPEEGAPHDCLEILAETHGTRPDLTDQPIPDADHTWYTDGSSFLQEGQRKAGAAVTTETEVIWARALPAGTSAQRAELIALTQALKMAEGKRLNVYTDSRYAFATAHIHGEIYRRRGWLTSEGREIKNKSEILALLKALFLPKRLSIIHCLGHQKGDSAEARGNRLADQAAREAAIKTPPDTSTLLAGKRTADGSEFEKRTADGSEFESPKKKAKVE

SEQ ID NO: 1849 - protein, 2097 aa, synthetic construct
MPAAKRVKLDGGDKKYSIGLDIGTNSVGWAVITDEYKVPSKKFKVLGNTDRHSIKKNLIGALLFDSGETAEATRLKRTARRRYTRRKNRICYLQEIFSNEMAKVDDSFFHRLEESFLVEEDKKHERHPIFGNIVDEVAYHEKYPTIYHLRKKLVDSTDKADLRLIYLALAHMIKFRGHFLIEGDLNPDNSDVDKLFIQLVQTYNQLFEENPINASGVDAKAILSARLSKSRRLENLIAQLPGEKKNGLFGNLIALSLGLTPNFKSNFDLAEDAKLQLSKDTYDDDLDNLLAQIGDQYADLFLAAKNLSDAILLSDILRVNTEITKAPLSASMIKRYDEHHQDLTLLKALVRQQLPEKYKEIFFDQSKNGYAGYIDGGASQEEFYKFIKPILEKMDGTEELLVKLNREDLLRKQRTFDNGSIPHQIHLGELHAILRRQEDFYPFLKDNREKIEKILTFRIPYYVGPLARGNSRFAWMTRKSEETITPWNFEEVVDKGASAQSFIERMTNFDKNLPNEKVLPKHSLLYEYFTVYNELTKVKYVTEGMRKPAFLSGEQKKAIVDLLFKTNRKVTVKQLKEDYFKKIECFDSVEISGVEDRFNASLGTYHDLLKIIKDKDFLDNEENEDILEDIVLTLTLFEDREMIEERLKTYAHLFDDKVMKQLKRRRYTGWGRLSRKLINGIRDKQSGKTILDFLKSDGFANRNFMQLIHDDSLTFKEDIQKAQVSGQGDSLHEHIANLAGSPAIKKGILQTVKVVDELVKVMGRHKPENIVIEMARENQTTQKGQKNSRERMKRIEEGIKELGSQILKEHPVENTQLQNEKLYLYYLQNGRDMYVDQELDINRLSDYDVDHIVPQSFLKDDSIDNKVLTRSDKARGKSDNVPSEEVVKKMKNYWRQLLNAKLITQRKFDNLTKAERGGLSELDKAGFIKRQLVETRQITKHVAQILDSRMNTKYDENDKLIREVKVITLKSKLVSDFRKDFQFYKVREINNYHHAHDAYLNAVVGTALIKKYPKLESEFVYGDYKVYDVRKMIAKSEQEIGKATAKYFFYSNIMNFFKTEITLANGEIRKRPLIETNGETGEIVWDKGRDFATVRKVLSMPQVNIVKKTEVQTGGFSKESILPKRNSDKLIARKKDWDPKKYGGFDSPTVAYSVLVVAKVEKGKSKKLKSVKELLGITIMERSSFEKNPIDFLEAKGYKEVKKDLIIKLPKYSLFELENGRKRMLASAGELQKGNELALPSKYVNFLYLASHYEKLKGSPEDNEQKQLFVEQHKHYLDEIIEQISEFSKRVILADANLDKVLSAYNKHRDKPIREQAENIIHLFTLTNLGAPAAFKYFDTTIDRKRYTSTKEVLDATLIHQSITGLYETRIDLSQLGGDGGGGSGGSGGSGGSGGTLNLEDEYRLYETSAEPEVSPGSTWLSDFPQAWAETGGMGLAVRQAPLIIPLKATSTPVSIKQYPMSQEAKLGIKPHIQRLLDQGILVPCQSPWNTPLLPVKKPGTNDYRPVQDLREVNKRVEDIHPTVPNPYNLLSGLPPSHRWYTVLDLKDAFFCLRLHPTSQPLFAFEWRDPGMGISGQLTWTRLPQGFKNSPTLFNEALHRDLADFRIQHPDLILLQYVDDILLAATSELDCQQGTRALLLTLGNLGYRASAKKAQLCQKQVKYLGYLLKEGQRWLTEARKETVMGQPTPKTPRQLREFLGTAGFCRLWIPGFAEMAAPLYPLTKPGTLFNWGPDQQKAYQEIKQALLTAPALGLPDLTKPFELFVDEKQGYAKGVLTQKLGPWRRPVAYLSKKLDPVAAGWPPCLRMVAAIAVLRKDAGKLTMGQPLVILAPHAVEALVKQPPDRWLSNARMTHYQAMLLDTDRVQFGPVVALNPATLLPLPEEGAPHDCLEILAETHGTRPDLTDQPIPDADHTWYTDGSSFLQEGQRKAGAAVTTETEVIWARALPAGTSAQRAELIALTQALKMAEGKRLNVYTDSRYAFATAHIHGEIYRRRGWLTSEGREIKNKSEILALLKALFLPKRLSIIHCLGHQKGDSAEARGNRLADQAAREAAIKTPPDTSTLLAGKRTADGSEFEKRTADGSEFESPKKKAKVE

SEQ ID NO: 1850 - protein, 2096 aa, synthetic construct
MPAAKRVKLDGGDKKYSIGLDIGTNSVGWAVITDEYKVPSKKFKVLGNTDRHSIKKNLIGALLFDSGETAEATRLKRTARRRYTRRKNRICYLQEIFSNEMAKVDDSFFHRLEESFLVEEDKKHERHPIFGNIVDEVAYHEKYPTIYHLRKKLVDSTDKADLRLIYLALAHMIKFRGHFLIEGDLNPDNSDVDKLFIQLVQTYNQLFEENPINASGVDAKAILSARLSKSRRLENLIAQLPGEKKNGLFGNLIALSLGLTPNFKSNFDLAEDAKLQLSKDTYDDDLDNLLAQIGDQYADLFLAAKNLSDAILLSDILRVNTEITKAPLSASMIKRYDEHHQDLTLLKALVRQQLPEKYKEIFFDQSKNGYAGYIDGGASQEEFYKFIKPILEKMDGTEELLVKLNREDLLRKQRTFDNGSIPHQIHLGELHAILRRQEDFYPFLKDNREKIEKILTFRIPYYVGPLARGNSRFAWMTRKSEETITPWNFEEVVDKGASAQSFIERMTNFDKNLPNEKVLPKHSLLYEYFTVYNELTKVKYVTEGMRKPAFLSGEQKKAIVDLLFKTNRKVTVKQLKEDYFKKIECFDSVEISGVEDRFNASLGTYHDLLKIIKDKDFLDNEENEDILEDIVLTLTLFEDREMIEERLKTYAHLFDDKVMKQLKRRRYTGWGRLSRKLINGIRDKQSGKTILDFLKSDGFANRNFMQLIHDDSLTFKEDIQKAQVSGQGDSLHEHIANLAGSPAIKKGILQTVKVVDELVKVMGRHKPENIVIEMARENQTTQKGQKNSRERMKRIEEGIKELGSQILKEHPVENTQLQNEKLYLYYLQNGRDMYVDQELDINRLSDYDVDHIVPQSFLKDDSIDNKVLTRSDKARGKSDNVPSEEVVKKMKNYWRQLLNAKLITQRKFDNLTKAERGGLSELDKAGFIKRQLVETRQITKHVAQILDSRMNTKYDENDKLIREVKVITLKSKLVSDFRKDFQFYKVREINNYHHAHDAYLNAVVGTALIKKYPKLESEFVYGDYKVYDVRKMIAKSEQEIGKATAKYFFYSNIMNFFKTEITLANGEIRKRPLIETNGETGEIVWDKGRDFATVRKVLSMPQVNIVKKTEVQTGGFSKESILPKRNSDKLIARKKDWDPKKYGGFDSPTVAYSVLVVAKVEKGKSKKLKSVKELLGITIMERSSFEKNPIDFLEAKGYKEVKKDLIIKLPKYSLFELENGRKRMLASAGELQKGNELALPSKYVNFLYLASHYEKLKGSPEDNEQKQLFVEQHKHYLDEIIEQISEFSKRVILADANLDKVLSAYNKHRDKPIREQAENIIHLFTLTNLGAPAAFKYFDTTIDRKRYTSTKEVLDATLIHQSITGLYETRIDLSQLGGDGGGSSEAAAKGGGGGTLNLEDEYRLYETSAEPEVSPGSTWLSDFPQAWAETGGMGLAVRQAPLIIPLKATSTPVSIKQYPMSQEAKLGIKPHIQRLLDQGILVPCQSPWNTPLLPVKKPGTNDYRPVQDLREVNKRVEDIHPTVPNPYNLLSGLPPSHRWYTVLDLKDAFFCLRLHPTSQPLFAFEWRDPGMGISGQLTWTRLPQGFKNSPTLFNEALHRDLADFRIQHPDLILLQYVDDILLAATSELDCQQGTRALLLTLGNLGYRASAKKAQLCQKQVKYLGYLLKEGQRWLTEARKETVMGQPTPKTPRQLREFLGTAGFCRLWIPGFAEMAAPLYPLTKPGTLFNWGPDQQKAYQEIKQALLTAPALGLPDLTKPFELFVDEKQGYAKGVLTQKLGPWRRPVAYLSKKLDPVAAGWPPCLRMVAAIAVLRKDAGKLTMGQPLVILAPHAVEALVKQPPDRWLSNARMTHYQAMLLDTDRVQFGPVVALNPATLLPLPEEGAPHDCLEILAETHGTRPDLTDQPIPDADHTWYTDGSSFLQEGQRKAGAAVTTETEVIWARALPAGTSAQRAELIALTQALKMAEGKRLNVYTDSRYAFATAHIHGEIYRRRGWLTSEGREIKNKSEILALLKALFLPKRLSIIHCLGHQKGDSAEARGNRLADQAAREAAIKTPPDTSTLLAGKRTADGSEFEKRTADGSEFESPKKKAKVE

SEQ ID NO: 1851 - protein, 2096 aa, synthetic construct
MPAAKRVKLDGGDKKYSIGLDIGTNSVGWAVITDEYKVPSKKFKVLGNTDRHSIKKNLIGALLFDSGETAEATRLKRTARRRYTRRKNRICYLQEIFSNEMAKVDDSFFHRLEESFLVEEDKKHERHPIFGNIVDEVAYHEKYPTIYHLRKKLVDSTDKADLRLIYLALAHMIKFRGHFLIEGDLNPDNSDVDKLFIQLVQTYNQLFEENPINASGVDAKAILSARLSKSRRLENLIAQLPGEKKNGLFGNLIALSLGLTPNFKSNFDLAEDAKLQLSKDTYDDDLDNLLAQIGDQYADLFLAAKNLSDAILLSDILRVNTEITKAPLSASMIKRYDEHHQDLTLLKALVRQQLPEKYKEIFFDQSKNGYAGYIDGGASQEEFYKFIKPILEKMDGTEELLVKLNREDLLRKQRTFDNGSIPHQIHLGELHAILRRQEDFYPFLKDNREKIEKILTFRIPYYVGPLARGNSRFAWMTRKSEETITPWNFEEVVDKGASAQSFIERMTNFDKNLPNEKVLPKHSLLYEYFTVYNELTKVKYVTEGMRKPAFLSGEQKKAIVDLLFKTNRKVTVKQLKEDYFKKIECFDSVEISGVEDRFNASLGTYHDLLKIIKDKDFLDNEENEDILEDIVLTLTLFEDREMIEERLKTYAHLFDDKVMKQLKRRRYTGWGRLSRKLINGIRDKQSGKTILDFLKSDGFANRNFMQLIHDDSLTFKEDIQKAQVSGQGDSLHEHIANLAGSPAIKKGILQTVKVVDELVKVMGRHKPENIVIEMARENQTTQKGQKNSRERMKRIEEGIKELGSQILKEHPVENTQLQNEKLYLYYLQNGRDMYVDQELDINRLSDYDVDHIVPQSFLKDDSIDNKVLTRSDKARGKSDNVPSEEVVKKMKNYWRQLLNAKLITQRKFDNLTKAERGGLSELDKAGFIKRQLVETRQITKHVAQILDSRMNTKYDENDKLIREVKVITLKSKLVSDFRKDFQFYKVREINNYHHAHDAYLNAVVGTALIKKYPKLESEFVYGDYKVYDVRKMIAKSEQEIGKATAKYFFYSNIMNFFKTEITLANGEIRKRPLIETNGETGEIVWDKGRDFATVRKVLSMPQVNIVKKTEVQTGGFSKESILPKRNSDKLIARKKDWDPKKYGGFDSPTVAYSVLVVAKVEKGKSKKLKSVKELLGITIMERSSFEKNPIDFLEAKGYKEVKKDLIIKLPKYSLFELENGRKRMLASAGELQKGNELALPSKYVNFLYLASHYEKLKGSPEDNEQKQLFVEQHKHYLDEIIEQISEFSKRVILADANLDKVLSAYNKHRDKPIREQAENIIHLFTLTNLGAPAAFKYFDTTIDRKRYTSTKEVLDATLIHQSITGLYETRIDLSQLGGDGGEAAAKPAPGGSGGTLNLEDEYRLYETSAEPEVSPGSTWLSDFPQAWAETGGMGLAVRQAPLIIPLKATSTPVSIKQYPMSQEAKLGIKPHIQRLLDQGILVPCQSPWNTPLLPVKKPGTNDYRPVQDLREVNKRVEDIHPTVPNPYNLLSGLPPSHRWYTVLDLKDAFFCLRLHPTSQPLFAFEWRDPGMGISGQLTWTRLPQGFKNSPTLFNEALHRDLADFRIQHPDLILLQYVDDILLAATSELDCQQGTRALLLTLGNLGYRASAKKAQLCQKQVKYLGYLLKEGQRWLTEARKETVMGQPTPKTPRQLREFLGTAGFCRLWIPGFAEMAAPLYPLTKPGTLFNWGPDQQKAYQEIKQALLTAPALGLPDLTKPFELFVDEKQGYAKGVLTQKLGPWRRPVAYLSKKLDPVAAGWPPCLRMVAAIAVLRKDAGKLTMGQPLVILAPHAVEALVKQPPDRWLSNARMTHYQAMLLDTDRVQFGPVVALNPATLLPLPEEGAPHDCLEILAETHGTRPDLTDQPIPDADHTWYTDGSSFLQEGQRKAGAAVTTETEVIWARALPAGTSAQRAELIALTQALKMAEGKRLNVYTDSRYAFATAHIHGEIYRRRGWLTSEGREIKNKSEILALLKALFLPKRLSIIHCLGHQKGDSAEARGNRLADQAAREAAIKTPPDTSTLLAGKRTADGSEFEKRTADGSEFESPKKKAKVE

SEQ ID NO: 1852 - protein, 2094 aa, synthetic construct
MPAAKRVKLDGGDKKYSIGLDIGTNSVGWAVITDEYKVPSKKFKVLGNTDRHSIKKNLIGALLFDSGETAEATRLKRTARRRYTRRKNRICYLQEIFSNEMAKVDDSFFHRLEESFLVEEDKKHERHPIFGNIVDEVAYHEKYPTIYHLRKKLVDSTDKADLRLIYLALAHMIKFRGHFLIEGDLNPDNSDVDKLFIQLVQTYNQLFEENPINASGVDAKAILSARLSKSRRLENLIAQLPGEKKNGLFGNLIALSLGLTPNFKSNFDLAEDAKLQLSKDTYDDDLDNLLAQIGDQYADLFLAAKNLSDAILLSDILRVNTEITKAPLSASMIKRYDEHHQDLTLLKALVRQQLPEKYKEIFFDQSKNGYAGYIDGGASQEEFYKFIKPILEKMDGTEELLVKLNREDLLRKQRTFDNGSIPHQIHLGELHAILRRQEDFYPFLKDNREKIEKILTFRIPYYVGPLARGNSRFAWMTRKSEETITPWNFEEVVDKGASAQSFIERMTNFDKNLPNEKVLPKHSLLYEYFTVYNELTKVKYVTEGMRKPAFLSGEQKKAIVDLLFKTNRKVTVKQLKEDYFKKIECFDSVEISGVEDRFNASLGTYHDLLKIIKDKDFLDNEENEDILEDIVLTLTLFEDREMIEERLKTYAHLFDDKVMKQLKRRRYTGWGRLSRKLINGIRDKQSGKTILDFLKSDGFANRNFMQLIHDDSLTFKEDIQKAQVSGQGDSLHEHIANLAGSPAIKKGILQTVKVVDELVKVMGRHKPENIVIEMARENQTTQKGQKNSRERMKRIEEGIKELGSQILKEHPVENTQLQNEKLYLYYLQNGRDMYVDQELDINRLSDYDVDHIVPQSFLKDDSIDNKVLTRSDKARGKSDNVPSEEVVKKMKNYWRQLLNAKLITQRKFDNLTKAERGGLSELDKAGFIKRQLVETRQITKHVAQILDSRMNTKYDENDKLIREVKVITLKSKLVSDFRKDFQFYKVREINNYHHAHDAYLNAVVGTALIKKYPKLESEFVYGDYKVYDVRKMIAKSEQEIGKATAKYFFYSNIMNFFKTEITLANGEIRKRPLIETNGETGEIVWDKGRDFATVRKVLSMPQVNIVKKTEVQTGGFSKESILPKRNSDKLIARKKDWDPKKYGGFDSPTVAYSVLVVAKVEKGKSKKLKSVKELLGITIMERSSFEKNPIDFLEAKGYKEVKKDLIIKLPKYSLFELENGRKRMLASAGELQKGNELALPSKYVNFLYLASHYEKLKGSPEDNEQKQLFVEQHKHYLDEIIEQISEFSKRVILADANLDKVLSAYNKHRDKPIREQAENIIHLFTLTNLGAPAAFKYFDTTIDRKRYTSTKEVLDATLIHQSITGLYETRIDLSQLGGDGGPAPAPAPAPGGTLNLEDEYRLYETSAEPEVSPGSTWLSDFPQAWAETGGMGLAVRQAPLIIPLKATSTPVSIKQYPMSQEAKLGIKPHIQRLLDQGILVPCQSPWNTPLLPVKKPGTNDYRPVQDLREVNKRVEDIHPTVPNPYNLLSGLPPSHRWYTVLDLKDAFFCLRLHPTSQPLFAFEWRDPGMGISGQLTWTRLPQGFKNSPTLFNEALHRDLADFRIQHPDLILLQYVDDILLAATSELDCQQGTRALLLTLGNLGYRASAKKAQLCQKQVKYLGYLLKEGQRWLTEARKETVMGQPTPKTPRQLREFLGTAGFCRLWIPGFAEMAAPLYPLTKPGTLFNWGPDQQKAYQEIKQALLTAPALGLPDLTKPFELFVDEKQGYAKGVLTQKLGPWRRPVAYLSKKLDPVAAGWPPCLRMVAAIAVLRKDAGKLTMGQPLVILAPHAVEALVKQPPDRWLSNARMTHYQAMLLDTDRVQFGPVVALNPATLLPLPEEGAPHDCLEILAETHGTRPDLTDQPIPDADHTWYTDGSSFLQEGQRKAGAAVTTETEVIWARALPAGTSAQRAELIALTQALKMAEGKRLNVYTDSRYAFATAHIHGEIYRRRGWLTSEGREIKNKSEILALLKALFLPKRLSIIHCLGHQKGDSAEARGNRLADQAAREAAIKTPPDTSTLLAGKRTADGSEFEKRTADGSEFESPKKKAKVE

SEQ ID NO: 1853 - protein, 2091 aa, synthetic construct
MPAAKRVKLDGGDKKYSIGLDIGTNSVGWAVITDEYKVPSKKFKVLGNTDRHSIKKNLIGALLFDSGETAEATRLKRTARRRYTRRKNRICYLQEIFSNEMAKVDDSFFHRLEESFLVEEDKKHERHPIFGNIVDEVAYHEKYPTIYHLRKKLVDSTDKADLRLIYLALAHMIKFRGHFLIEGDLNPDNSDVDKLFIQLVQTYNQLFEENPINASGVDAKAILSARLSKSRRLENLIAQLPGEKKNGLFGNLIALSLGLTPNFKSNFDLAEDAKLQLSKDTYDDDLDNLLAQIGDQYADLFLAAKNLSDAILLSDILRVNTEITKAPLSASMIKRYDEHHQDLTLLKALVRQQLPEKYKEIFFDQSKNGYAGYIDGGASQEEFYKFIKPILEKMDGTEELLVKLNREDLLRKQRTFDNGSIPHQIHLGELHAILRRQEDFYPFLKDNREKIEKILTFRIPYYVGPLARGNSRFAWMTRKSEETITPWNFEEVVDKGASAQSFIERMTNFDKNLPNEKVLPKHSLLYEYFTVYNELTKVKYVTEGMRKPAFLSGEQKKAIVDLLFKTNRKVTVKQLKEDYFKKIECFDSVEISGVEDRFNASLGTYHDLLKIIKDKDFLDNEENEDILEDIVLTLTLFEDREMIEERLKTYAHLFDDKVMKQLKRRRYTGWGRLSRKLINGIRDKQSGKTILDFLKSDGFANRNFMQLIHDDSLTFKEDIQKAQVSGQGDSLHEHIANLAGSPAIKKGILQTVKVVDELVKVMGRHKPENIVIEMARENQTTQKGQKNSRERMKRIEEGIKELGSQILKEHPVENTQLQNEKLYLYYLQNGRDMYVDQELDINRLSDYDVDHIVPQSFLKDDSIDNKVLTRSDKARGKSDNVPSEEVVKKMKNYWRQLLNAKLITQRKFDNLTKAERGGLSELDKAGFIKRQLVETRQITKHVAQILDSRMNTKYDENDKLIREVKVITLKSKLVSDFRKDFQFYKVREINNYHHAHDAYLNAVVGTALIKKYPKLESEFVYGDYKVYDVRKMIAKSEQEIGKATAKYFFYSNIMNFFKTEITLANGEIRKRPLIETNGETGEIVWDKGRDFATVRKVLSMPQVNIVKKTEVQTGGFSKESILPKRNSDKLIARKKDWDPKKYGGFDSPTVAYSVLVVAKVEKGKSKKLKSVKELLGITIMERSSFEKNPIDFLEAKGYKEVKKDLIIKLPKYSLFELENGRKRMLASAGELQKGNELALPSKYVNFLYLASHYEKLKGSPEDNEQKQLFVEQHKHYLDEIIEQISEFSKRVILADANLDKVLSAYNKHRDKPIREQAENIIHLFTLTNLGAPAAFKYFDTTIDRKRYTSTKEVLDATLIHQSITGLYETRIDLSQLGGDGGGGGGSSGGTLNLEDEYRLYETSAEPEVSPGSTWLSDFPQAWAETGGMGLAVRQAPLIIPLKATSTPVSIKQYPMSQEAKLGIKPHIQRLLDQGILVPCQSPWNTPLLPVKKPGTNDYRPVQDLREVNKRVEDIHPTVPNPYNLLSGLPPSHRWYTVLDLKDAFFCLRLHPTSQPLFAFEWRDPGMGISGQLTWTRLPQGFKNSPTLFNEALHRDLADFRIQHPDLILLQYVDDILLAATSELDCQQGTRALLLTLGNLGYRASAKKAQLCQKQVKYLGYLLKEGQRWLTEARKETVMGQPTPKTPRQLREFLGTAGFCRLWIPGFAEMAAPLYPLTKPGTLFNWGPDQQKAYQEIKQALLTAPALGLPDLTKPFELFVDEKQGYAKGVLTQKLGPWRRPVAYLSKKLDPVAAGWPPCLRMVAAIAVLRKDAGKLTMGQPLVILAPHAVEALVKQPPDRWLSNARMTHYQAMLLDTDRVQFGPVVALNPATLLPLPEEGAPHDCLEILAETHGTRPDLTDQPIPDADHTWYTDGSSFLQEGQRKAGAAVTTETEVIWARALPAGTSAQRAELIALTQALKMAEGKRLNVYTDSRYAFATAHIHGEIYRRRGWLTSEGREIKNKSEILALLKALFLPKRLSIIHCLGHQKGDSAEARGNRLADQAAREAAIKTPPDTSTLLAGKRTADGSEFEKRTADGSEFESPKKKAKVE

SEQ ID NO: 1854 - protein, 2091 aa, synthetic construct
MPAAKRVKLDGGDKKYSIGLDIGTNSVGWAVITDEYKVPSKKFKVLGNTDRHSIKKNLIGALLFDSGETAEATRLKRTARRRYTRRKNRICYLQEIFSNEMAKVDDSFFHRLEESFLVEEDKKHERHPIFGNIVDEVAYHEKYPTIYHLRKKLVDSTDKADLRLIYLALAHMIKFRGHFLIEGDLNPDNSDVDKLFIQLVQTYNQLFEENPINASGVDAKAILSARLSKSRRLENLIAQLPGEKKNGLFGNLIALSLGLTPNFKSNFDLAEDAKLQLSKDTYDDDLDNLLAQIGDQYADLFLAAKNLSDAILLSDILRVNTEITKAPLSASMIKRYDEHHQDLTLLKALVRQQLPEKYKEIFFDQSKNGYAGYIDGGASQEEFYKFIKPILEKMDGTEELLVKLNREDLLRKQRTFDNGSIPHQIHLGELHAILRRQEDFYPFLKDNREKIEKILTFRIPYYVGPLARGNSRFAWMTRKSEETITPWNFEEVVDKGASAQSFIERMTNFDKNLPNEKVLPKHSLLYEYFTVYNELTKVKYVTEGMRKPAFLSGEQKKAIVDLLFKTNRKVTVKQLKEDYFKKIECFDSVEISGVEDRFNASLGTYHDLLKIIKDKDFLDNEENEDILEDIVLTLTLFEDREMIEERLKTYAHLFDDKVMKQLKRRRYTGWGRLSRKLINGIRDKQSGKTILDFLKSDGFANRNFMQLIHDDSLTFKEDIQKAQVSGQGDSLHEHIANLAGSPAIKKGILQTVKVVDELVKVMGRHKPENIVIEMARENQTTQKGQKNSRERMKRIEEGIKELGSQILKEHPVENTQLQNEKLYLYYLQNGRDMYVDQELDINRLSDYDVDHIVPQSFLKDDSIDNKVLTRSDKARGKSDNVPSEEVVKKMKNYWRQLLNAKLITQRKFDNLTKAERGGLSELDKAGFIKRQLVETRQITKHVAQILDSRMNTKYDENDKLIREVKVITLKSKLVSDFRKDFQFYKVREINNYHHAHDAYLNAVVGTALIKKYPKLESEFVYGDYKVYDVRKMIAKSEQEIGKATAKYFFYSNIMNFFKTEITLANGEIRKRPLIETNGETGEIVWDKGRDFATVRKVLSMPQVNIVKKTEVQTGGFSKESILPKRNSDKLIARKKDWDPKKYGGFDSPTVAYSVLVVAKVEKGKSKKLKSVKELLGITIMERSSFEKNPIDFLEAKGYKEVKKDLIIKLPKYSLFELENGRKRMLASAGELQKGNELALPSKYVNFLYLASHYEKLKGSPEDNEQKQLFVEQHKHYLDEIIEQISEFSKRVILADANLDKVLSAYNKHRDKPIREQAENIIHLFTLTNLGAPAAFKYFDTTIDRKRYTSTKEVLDATLIHQSITGLYETRIDLSQLGGDGGGGGPAPGGTLNLEDEYRLYETSAEPEVSPGSTWLSDFPQAWAETGGMGLAVRQAPLIIPLKATSTPVSIKQYPMSQEAKLGIKPHIQRLLDQGILVPCQSPWNTPLLPVKKPGTNDYRPVQDLREVNKRVEDIHPTVPNPYNLLSGLPPSHRWYTVLDLKDAFFCLRLHPTSQPLFAFEWRDPGMGISGQLTWTRLPQGFKNSPTLFNEALHRDLADFRIQHPDLILLQYVDDILLAATSELDCQQGTRALLLTLGNLGYRASAKKAQLCQKQVKYLGYLLKEGQRWLTEARKETVMGQPTPKTPRQLREFLGTAGFCRLWIPGFAEMAAPLYPLTKPGTLFNWGPDQQKAYQEIKQALLTAPALGLPDLTKPFELFVDEKQGYAKGVLTQKLGPWRRPVAYLSKKLDPVAAGWPPCLRMVAAIAVLRKDAGKLTMGQPLVILAPHAVEALVKQPPDRWLSNARMTHYQAMLLDTDRVQFGPVVALNPATLLPLPEEGAPHDCLEILAETHGTRPDLTDQPIPDADHTWYTDGSSFLQEGQRKAGAAVTTETEVIWARALPAGTSAQRAELIALTQALKMAEGKRLNVYTDSRYAFATAHIHGEIYRRRGWLTSEGREIKNKSEILALLKALFLPKRLSIIHCLGHQKGDSAEARGNRLADQAAREAAIKTPPDTSTLLAGKRTADGSEFEKRTADGSEFESPKKKAKVE

SEQ ID NO: 1855 - protein, 2090 aa, synthetic construct
MPAAKRVKLDGGDKKYSIGLDIGTNSVGWAVITDEYKVPSKKFKVLGNTDRHSIKKNLIGALLFDSGETAEATRLKRTARRRYTRRKNRICYLQEIFSNEMAKVDDSFFHRLEESFLVEEDKKHERHPIFGNIVDEVAYHEKYPTIYHLRKKLVDSTDKADLRLIYLALAHMIKFRGHFLIEGDLNPDNSDVDKLFIQLVQTYNQLFEENPINASGVDAKAILSARLSKSRRLENLIAQLPGEKKNGLFGNLIALSLGLTPNFKSNFDLAEDAKLQLSKDTYDDDLDNLLAQIGDQYADLFLAAKNLSDAILLSDILRVNTEITKAPLSASMIKRYDEHHQDLTLLKALVRQQLPEKYKEIFFDQSKNGYAGYIDGGASQEEFYKFIKPILEKMDGTEELLVKLNREDLLRKQRTFDNGSIPHQIHLGELHAILRRQEDFYPFLKDNREKIEKILTFRIPYYVGPLARGNSRFAWMTRKSEETITPWNFEEVVDKGASAQSFIERMTNFDKNLPNEKVLPKHSLLYEYFTVYNELTKVKYVTEGMRKPAFLSGEQKKAIVDLLFKTNRKVTVKQLKEDYFKKIECFDSVEISGVEDRFNASLGTYHDLLKIIKDKDFLDNEENEDILEDIVLTLTLFEDREMIEERLKTYAHLFDDKVMKQLKRRRYTGWGRLSRKLINGIRDKQSGKTILDFLKSDGFANRNFMQLIHDDSLTFKEDIQKAQVSGQGDSLHEHIANLAGSPAIKKGILQTVKVVDELVKVMGRHKPENIVIEMARENQTTQKGQKNSRERMKRIEEGIKELGSQILKEHPVENTQLQNEKLYLYYLQNGRDMYVDQELDINRLSDYDVDHIVPQSFLKDDSIDNKVLTRSDKARGKSDNVPSEEVVKKMKNYWRQLLNAKLITQRKFDNLTKAERGGLSELDKAGFIKRQLVETRQITKHVAQILDSRMNTKYDENDKLIREVKVITLKSKLVSDFRKDFQFYKVREINNYHHAHDAYLNAVVGTALIKKYPKLESEFVYGDYKVYDVRKMIAKSEQEIGKATAKYFFYSNIMNFFKTEITLANGEIRKRPLIETNGETGEIVWDKGRDFATVRKVLSMPQVNIVKKTEVQTGGFSKESILPKRNSDKLIARKKDWDPKKYGGFDSPTVAYSVLVVAKVEKGKSKKLKSVKELLGITIMERSSFEKNPIDFLEAKGYKEVKKDLIIKLPKYSLFELENGRKRMLASAGELQKGNELALPSKYVNFLYLASHYEKLKGSPEDNEQKQLFVEQHKHYLDEIIEQISEFSKRVILADANLDKVLSAYNKHRDKPIREQAENIIHLFTLTNLGAPAAFKYFDTTIDRKRYTSTKEVLDATLIHQSITGLYETRIDLSQLGGDGGPAPAPGGTLNLEDEYRLYETSAEPEVSPGSTWLSDFPQAWAETGGMGLAVRQAPLIIPLKATSTPVSIKQYPMSQEAKLGIKPHIQRLLDQGILVPCQSPWNTPLLPVKKPGTNDYRPVQDLREVNKRVEDIHPTVPNPYNLLSGLPPSHRWYTVLDLKDAFFCLRLHPTSQPLFAFEWRDPGMGISGQLTWTRLPQGFKNSPTLFNEALHRDLADFRIQHPDLILLQYVDDILLAATSELDCQQGTRALLLTLGNLGYRASAKKAQLCQKQVKYLGYLLKEGQRWLTEARKETVMGQPTPKTPRQLREFLGTAGFCRLWIPGFAEMAAPLYPLTKPGTLFNWGPDQQKAYQEIKQALLTAPALGLPDLTKPFELFVDEKQGYAKGVLTQKLGPWRRPVAYLSKKLDPVAAGWPPCLRMVAAIAVLRKDAGKLTMGQPLVILAPHAVEALVKQPPDRWLSNARMTHYQAMLLDTDRVQFGPVVALNPATLLPLPEEGAPHDCLEILAETHGTRPDLTDQPIPDADHTWYTDGSSFLQEGQRKAGAAVTTETEVIWARALPAGTSAQRAELIALTQALKMAEGKRLNVYTDSRYAFATAHIHGEIYRRRGWLTSEGREIKNKSEILALLKALFLPKRLSIIHCLGHQKGDSAEARGNRLADQAAREAAIKTPPDTSTLLAGKRTADGSEFEKRTADGSEFESPKKKAKVE

SEQ ID NO: 1856 - protein, 2096 aa, synthetic construct
MPAAKRVKLDGGDKKYSIGLDIGTNSVGWAVITDEYKVPSKKFKVLGNTDRHSIKKNLIGALLFDSGETAEATRLKRTARRRYTRRKNRICYLQEIFSNEMAKVDDSFFHRLEESFLVEEDKKHERHPIFGNIVDEVAYHEKYPTIYHLRKKLVDSTDKADLRLIYLALAHMIKFRGHFLIEGDLNPDNSDVDKLFIQLVQTYNQLFEENPINASGVDAKAILSARLSKSRRLENLIAQLPGEKKNGLFGNLIALSLGLTPNFKSNFDLAEDAKLQLSKDTYDDDLDNLLAQIGDQYADLFLAAKNLSDAILLSDILRVNTEITKAPLSASMIKRYDEHHQDLTLLKALVRQQLPEKYKEIFFDQSKNGYAGYIDGGASQEEFYKFIKPILEKMDGTEELLVKLNREDLLRKQRTFDNGSIPHQIHLGELHAILRRQEDFYPFLKDNREKIEKILTFRIPYYVGPLARGNSRFAWMTRKSEETITPWNFEEVVDKGASAQSFIERMTNFDKNLPNEKVLPKHSLLYEYFTVYNELTKVKYVTEGMRKPAFLSGEQKKAIVDLLFKTNRKVTVKQLKEDYFKKIECFDSVEISGVEDRFNASLGTYHDLLKIIKDKDFLDNEENEDILEDIVLTLTLFEDREMIEERLKTYAHLFDDKVMKQLKRRRYTGWGRLSRKLINGIRDKQSGKTILDFLKSDGFANRNFMQLIHDDSLTFKEDIQKAQVSGQGDSLHEHIANLAGSPAIKKGILQTVKVVDELVKVMGRHKPENIVIEMARENQTTQKGQKNSRERMKRIEEGIKELGSQILKEHPVENTQLQNEKLYLYYLQNGRDMYVDQELDINRLSDYDVDHIVPQSFLKDDSIDNKVLTRSDKARGKSDNVPSEEVVKKMKNYWRQLLNAKLITQRKFDNLTKAERGGLSELDKAGFIKRQLVETRQITKHVAQILDSRMNTKYDENDKLIREVKVITLKSKLVSDFRKDFQFYKVREINNYHHAHDAYLNAVVGTALIKKYPKLESEFVYGDYKVYDVRKMIAKSEQEIGKATAKYFFYSNIMNFFKTEITLANGEIRKRPLIETNGETGEIVWDKGRDFATVRKVLSMPQVNIVKKTEVQTGGFSKESILPKRNSDKLIARKKDWDPKKYGGFDSPTVAYSVLVVAKVEKGKSKKLKSVKELLGITIMERSSFEKNPIDFLEAKGYKEVKKDLIIKLPKYSLFELENGRKRMLASAGELQKGNELALPSKYVNFLYLASHYEKLKGSPEDNEQKQLFVEQHKHYLDEIIEQISEFSKRVILADANLDKVLSAYNKHRDKPIREQAENIIHLFTLTNLGAPAAFKYFDTTIDRKRYTSTKEVLDATLIHQSITGLYETRIDLSQLGGDGGPAPGGGEAAAKGGTLNLEDEYRLYETSAEPEVSPGSTWLSDFPQAWAETGGMGLAVRQAPLIIPLKATSTPVSIKQYPMSQEAKLGIKPHIQRLLDQGILVPCQSPWNTPLLPVKKPGTNDYRPVQDLREVNKRVEDIHPTVPNPYNLLSGLPPSHRWYTVLDLKDAFFCLRLHPTSQPLFAFEWRDPGMGISGQLTWTRLPQGFKNSPTLFNEALHRDLADFRIQHPDLILLQYVDDILLAATSELDCQQGTRALLLTLGNLGYRASAKKAQLCQKQVKYLGYLLKEGQRWLTEARKETVMGQPTPKTPRQLREFLGKAGFCRLFIPGFAEMAAPLYPLTKPGTLFNWGPDQQKAYQEIKQALLTAPALGLPDLTKPFELFVDEKQGYAKGVLTQKLGPWRRPVAYLSKKLDPVAAGWPPCLRMVAAIAVLRKDAGKLTMGQPLVILAPHAVEALVKQPPDRWLSNARMTHYQAMLLDTDRVQFGPVVALNPATLLPLPEEGAPHDCLEILAETHGTRPDLTDQPIPDADHTWYTDGSSFLQEGQRKAGAAVTTETEVIWARALPAGTSAQRAELIALTQALKMAEGKRLNVYTDSRYAFATAHIHGEIYRRRGWLTSEGREIKNKSEILALLKALFLPKRLSIIHCLGHQKGDSAEARGNRLADQAAREAAIKTPPDTSTLLAGKRTADGSEFEKRTADGSEFESPKKKAKVE

SEQ ID NO: 1857 - protein, 2094 aa, synthetic construct
MPAAKRVKLDGGDKKYSIGLDIGTNSVGWAVITDEYKVPSKKFKVLGNTDRHSIKKNLIGALLFDSGETAEATRLKRTARRRYTRRKNRICYLQEIFSNEMAKVDDSFFHRLEESFLVEEDKKHERHPIFGNIVDEVAYHEKYPTIYHLRKKLVDSTDKADLRLIYLALAHMIKFRGHFLIEGDLNPDNSDVDKLFIQLVQTYNQLFEENPINASGVDAKAILSARLSKSRRLENLIAQLPGEKKNGLFGNLIALSLGLTPNFKSNFDLAEDAKLQLSKDTYDDDLDNLLAQIGDQYADLFLAAKNLSDAILLSDILRVNTEITKAPLSASMIKRYDEHHQDLTLLKALVRQQLPEKYKEIFFDQSKNGYAGYIDGGASQEEFYKFIKPILEKMDGTEELLVKLNREDLLRKQRTFDNGSIPHQIHLGELHAILRRQEDFYPFLKDNREKIEKILTFRIPYYVGPLARGNSRFAWMTRKSEETITPWNFEEVVDKGASAQSFIERMTNFDKNLPNEKVLPKHSLLYEYFTVYNELTKVKYVTEGMRKPAFLSGEQKKAIVDLLFKTNRKVTVKQLKEDYFKKIECFDSVEISGVEDRFNASLGTYHDLLKIIKDKDFLDNEENEDILEDIVLTLTLFEDREMIEERLKTYAHLFDDKVMKQLKRRRYTGWGRLSRKLINGIRDKQSGKTILDFLKSDGFANRNFMQLIHDDSLTFKEDIQKAQVSGQGDSLHEHIANLAGSPAIKKGILQTVKVVDELVKVMGRHKPENIVIEMARENQTTQKGQKNSRERMKRIEEGIKELGSQILKEHPVENTQLQNEKLYLYYLQNGRDMYVDQELDINRLSDYDVDHIVPQSFLKDDSIDNKVLTRSDKARGKSDNVPSEEVVKKMKNYWRQLLNAKLITQRKFDNLTKAERGGLSELDKAGFIKRQLVETRQITKHVAQILDSRMNTKYDENDKLIREVKVITLKSKLVSDFRKDFQFYKVREINNYHHAHDAYLNAVVGTALIKKYPKLESEFVYGDYKVYDVRKMIAKSEQEIGKATAKYFFYSNIMNFFKTEITLANGEIRKRPLIETNGETGEIVWDKGRDFATVRKVLSMPQVNIVKKTEVQTGGFSKESILPKRNSDKLIARKKDWDPKKYGGFDSPTVAYSVLVVAKVEKGKSKKLKSVKELLGITIMERSSFEKNPIDFLEAKGYKEVKKDLIIKLPKYSLFELENGRKRMLASAGELQKGNELALPSKYVNFLYLASHYEKLKGSPEDNEQKQLFVEQHKHYLDEIIEQISEFSKRVILADANLDKVLSAYNKHRDKPIREQAENIIHLFTLTNLGAPAAFKYFDTTIDRKRYTSTKEVLDATLIHQSITGLYETRIDLSQLGGDGGGGGPAPGSSGGTLNLEDEYRLYETSAEPEVSPGSTWLSDFPQAWAETGGMGLAVRQAPLIIPLKATSTPVSIKQYPMSQEAKLGIKPHIQRLLDQGILVPCQSPWNTPLLPVKKPGTNDYRPVQDLREVNKRVEDIHPTVPNPYNLLSGLPPSHRWYTVLDLKDAFFCLRLHPTSQPLFAFEWRDPGMGISGQLTWTRLPQGFKNSPTLFNEALHRDLADFRIQHPDLILLQYVDDILLAATSELDCQQGTRALLLTLGNLGYRASAKKAQLCQKQVKYLGYLLKEGQRWLTEARKETVMGQPTPKTPRQLREFLGKAGFCRLFIPGFAEMAAPLYPLTKPGTLFNWGPDQQKAYQEIKQALLTAPALGLPDLTKPFELFVDEKQGYAKGVLTQKLGPWRRPVAYLSKKLDPVAAGWPPCLRMVAAIAVLRKDAGKLTMGQPLVILAPHAVEALVKQPPDRWLSNARMTHYQAMLLDTDRVQFGPVVALNPATLLPLPEEGAPHDCLEILAETHGTRPDLTDQPIPDADHTWYTDGSSFLQEGQRKAGAAVTTETEVIWARALPAGTSAQRAELIALTQALKMAEGKRLNVYTDSRYAFATAHIHGEIYRRRGWLTSEGREIKNKSEILALLKALFLPKRLSIIHCLGHQKGDSAEARGNRLADQAAREAAIKTPPDTSTLLAGKRTADGSEFEKRTADGSEFESPKKKAKVE

SEQ ID NO: 1858 - protein, 2093 aa, synthetic construct
MPAAKRVKLDGGDKKYSIGLDIGTNSVGWAVITDEYKVPSKKFKVLGNTDRHSIKKNLIGALLFDSGETAEATRLKRTARRRYTRRKNRICYLQEIFSNEMAKVDDSFFHRLEESFLVEEDKKHERHPIFGNIVDEVAYHEKYPTIYHLRKKLVDSTDKADLRLIYLALAHMIKFRGHFLIEGDLNPDNSDVDKLFIQLVQTYNQLFEENPINASGVDAKAILSARLSKSRRLENLIAQLPGEKKNGLFGNLIALSLGLTPNFKSNFDLAEDAKLQLSKDTYDDDLDNLLAQIGDQYADLFLAAKNLSDAILLSDILRVNTEITKAPLSASMIKRYDEHHQDLTLLKALVRQQLPEKYKEIFFDQSKNGYAGYIDGGASQEEFYKFIKPILEKMDGTEELLVKLNREDLLRKQRTFDNGSIPHQIHLGELHAILRRQEDFYPFLKDNREKIEKILTFRIPYYVGPLARGNSRFAWMTRKSEETITPWNFEEVVDKGASAQSFIERMTNFDKNLPNEKVLPKHSLLYEYFTVYNELTKVKYVTEGMRKPAFLSGEQKKAIVDLLFKTNRKVTVKQLKEDYFKKIECFDSVEISGVEDRFNASLGTYHDLLKIIKDKDFLDNEENEDILEDIVLTLTLFEDREMIEERLKTYAHLFDDKVMKQLKRRRYTGWGRLSRKLINGIRDKQSGKTILDFLKSDGFANRNFMQLIHDDSLTFKEDIQKAQVSGQGDSLHEHIANLAGSPAIKKGILQTVKVVDELVKVMGRHKPENIVIEMARENQTTQKGQKNSRERMKRIEEGIKELGSQILKEHPVENTQLQNEKLYLYYLQNGRDMYVDQELDINRLSDYDVDHIVPQSFLKDDSIDNKVLTRSDKARGKSDNVPSEEVVKKMKNYWRQLLNAKLITQRKFDNLTKAERGGLSELDKAGFIKRQLVETRQITKHVAQILDSRMNTKYDENDKLIREVKVITLKSKLVSDFRKDFQFYKVREINNYHHAHDAYLNAVVGTALIKKYPKLESEFVYGDYKVYDVRKMIAKSEQEIGKATAKYFFYSNIMNFFKTEITLANGEIRKRPLIETNGETGEIVWDKGRDFATVRKVLSMPQVNIVKKTEVQTGGFSKESILPKRNSDKLIARKKDWDPKKYGGFDSPTVAYSVLVVAKVEKGKSKKLKSVKELLGITIMERSSFEKNPIDFLEAKGYKEVKKDLIIKLPKYSLFELENGRKRMLASAGELQKGNELALPSKYVNFLYLASHYEKLKGSPEDNEQKQLFVEQHKHYLDEIIEQISEFSKRVILADANLDKVLSAYNKHRDKPIREQAENIIHLFTLTNLGAPAAFKYFDTTIDRKRYTSTKEVLDATLIHQSITGLYETRIDLSQLGGDGGPAPEAAAKGGTLNLEDEYRLYETSAEPEVSPGSTWLSDFPQAWAETGGMGLAVRQAPLIIPLKATSTPVSIKQYPMSQEAKLGIKPHIQRLLDQGILVPCQSPWNTPLLPVKKPGTNDYRPVQDLREVNKRVEDIHPTVPNPYNLLSGLPPSHRWYTVLDLKDAFFCLRLHPTSQPLFAFEWRDPGMGISGQLTWTRLPQGFKNSPTLFNEALHRDLADFRIQHPDLILLQYVDDILLAATSELDCQQGTRALLLTLGNLGYRASAKKAQLCQKQVKYLGYLLKEGQRWLTEARKETVMGQPTPKTPRQLREFLGKAGFCRLFIPGFAEMAAPLYPLTKPGTLFNWGPDQQKAYQEIKQALLTAPALGLPDLTKPFELFVDEKQGYAKGVLTQKLGPWRRPVAYLSKKLDPVAAGWPPCLRMVAAIAVLRKDAGKLTMGQPLVILAPHAVEALVKQPPDRWLSNARMTHYQAMLLDTDRVQFGPVVALNPATLLPLPEEGAPHDCLEILAETHGTRPDLTDQPIPDADHTWYTDGSSFLQEGQRKAGAAVTTETEVIWARALPAGTSAQRAELIALTQALKMAEGKRLNVYTDSRYAFATAHIHGEIYRRRGWLTSEGREIKNKSEILALLKALFLPKRLSIIHCLGHQKGDSAEARGNRLADQAAREAAIKTPPDTSTLLAGKRTADGSEFEKRTADGSEFESPKKKAKVE

SEQ ID NO: 1859 - protein, 2096 aa, synthetic construct
MPAAKRVKLDGGDKKYSIGLDIGTNSVGWAVITDEYKVPSKKFKVLGNTDRHSIKKNLIGALLFDSGETAEATRLKRTARRRYTRRKNRICYLQEIFSNEMAKVDDSFFHRLEESFLVEEDKKHERHPIFGNIVDEVAYHEKYPTIYHLRKKLVDSTDKADLRLIYLALAHMIKFRGHFLIEGDLNPDNSDVDKLFIQLVQTYNQLFEENPINASGVDAKAILSARLSKSRRLENLIAQLPGEKKNGLFGNLIALSLGLTPNFKSNFDLAEDAKLQLSKDTYDDDLDNLLAQIGDQYADLFLAAKNLSDAILLSDILRVNTEITKAPLSASMIKRYDEHHQDLTLLKALVRQQLPEKYKEIFFDQSKNGYAGYIDGGASQEEFYKFIKPILEKMDGTEELLVKLNREDLLRKQRTFDNGSIPHQIHLGELHAILRRQEDFYPFLKDNREKIEKILTFRIPYYVGPLARGNSRFAWMTRKSEETITPWNFEEVVDKGASAQSFIERMTNFDKNLPNEKVLPKHSLLYEYFTVYNELTKVKYVTEGMRKPAFLSGEQKKAIVDLLFKTNRKVTVKQLKEDYFKKIECFDSVEISGVEDRFNASLGTYHDLLKIIKDKDFLDNEENEDILEDIVLTLTLFEDREMIEERLKTYAHLFDDKVMKQLKRRRYTGWGRLSRKLINGIRDKQSGKTILDFLKSDGFANRNFMQLIHDDSLTFKEDIQKAQVSGQGDSLHEHIANLAGSPAIKKGILQTVKVVDELVKVMGRHKPENIVIEMARENQTTQKGQKNSRERMKRIEEGIKELGSQILKEHPVENTQLQNEKLYLYYLQNGRDMYVDQELDINRLSDYDVDHIVPQSFLKDDSIDNKVLTRSDKARGKSDNVPSEEVVKKMKNYWRQLLNAKLITQRKFDNLTKAERGGLSELDKAGFIKRQLVETRQITKHVAQILDSRMNTKYDENDKLIREVKVITLKSKLVSDFRKDFQFYKVREINNYHHAHDAYLNAVVGTALIKKYPKLESEFVYGDYKVYDVRKMIAKSEQEIGKATAKYFFYSNIMNFFKTEITLANGEIRKRPLIETNGETGEIVWDKGRDFATVRKVLSMPQVNIVKKTEVQTGGFSKESILPKRNSDKLIARKKDWDPKKYGGFDSPTVAYSVLVVAKVEKGKSKKLKSVKELLGITIMERSSFEKNPIDFLEAKGYKEVKKDLIIKLPKYSLFELENGRKRMLASAGELQKGNELALPSKYVNFLYLASHYEKLKGSPEDNEQKQLFVEQHKHYLDEIIEQISEFSKRVILADANLDKVLSAYNKHRDKPIREQAENIIHLFTLTNLGAPAAFKYFDTTIDRKRYTSTKEVLDATLIHQSITGLYETRIDLSQLGGDGGGGSEAAAKGSSGGTLNLEDEYRLYETSAEPEVSPGSTWLSDFPQAWAETGGMGLAVRQAPLIIPLKATSTPVSIKQYPMSQEAKLGIKPHIQRLLDQGILVPCQSPWNTPLLPVKKPGTNDYRPVQDLREVNKRVEDIHPTVPNPYNLLSGLPPSHRWYTVLDLKDAFFCLRLHPTSQPLFAFEWRDPGMGISGQLTWTRLPQGFKNSPTLFNEALHRDLADFRIQHPDLILLQYVDDILLAATSELDCQQGTRALLLTLGNLGYRASAKKAQLCQKQVKYLGYLLKEGQRWLTEARKETVMGQPTPKTPRQLREFLGKAGFCRLFIPGFAEMAAPLYPLTKPGTLFNWGPDQQKAYQEIKQALLTAPALGLPDLTKPFELFVDEKQGYAKGVLTQKLGPWRRPVAYLSKKLDPVAAGWPPCLRMVAAIAVLRKDAGKLTMGQPLVILAPHAVEALVKQPPDRWLSNARMTHYQAMLLDTDRVQFGPVVALNPATLLPLPEEGAPHDCLEILAETHGTRPDLTDQPIPDADHTWYTDGSSFLQEGQRKAGAAVTTETEVIWARALPAGTSAQRAELIALTQALKMAEGKRLNVYTDSRYAFATAHIHGEIYRRRGWLTSEGREIKNKSEILALLKALFLPKRLSIIHCLGHQKGDSAEARGNRLADQAAREAAIKTPPDTSTLLAGKRTADGSEFEKRTADGSEFESPKKKAKVE

SEQ ID NO: 1860 - protein, 2100 aa, synthetic construct
MPAAKRVKLDGGDKKYSIGLDIGTNSVGWAVITDEYKVPSKKFKVLGNTDRHSIKKNLIGALLFDSGETAEATRLKRTARRRYTRRKNRICYLQEIFSNEMAKVDDSFFHRLEESFLVEEDKKHERHPIFGNIVDEVAYHEKYPTIYHLRKKLVDSTDKADLRLIYLALAHMIKFRGHFLIEGDLNPDNSDVDKLFIQLVQTYNQLFEENPINASGVDAKAILSARLSKSRRLENLIAQLPGEKKNGLFGNLIALSLGLTPNFKSNFDLAEDAKLQLSKDTYDDDLDNLLAQIGDQYADLFLAAKNLSDAILLSDILRVNTEITKAPLSASMIKRYDEHHQDLTLLKALVRQQLPEKYKEIFFDQSKNGYAGYIDGGASQEEFYKFIKPILEKMDGTEELLVKLNREDLLRKQRTFDNGSIPHQIHLGELHAILRRQEDFYPFLKDNREKIEKILTFRIPYYVGPLARGNSRFAWMTRKSEETITPWNFEEVVDKGASAQSFIERMTNFDKNLPNEKVLPKHSLLYEYFTVYNELTKVKYVTEGMRKPAFLSGEQKKAIVDLLFKTNRKVTVKQLKEDYFKKIECFDSVEISGVEDRFNASLGTYHDLLKIIKDKDFLDNEENEDILEDIVLTLTLFEDREMIEERLKTYAHLFDDKVMKQLKRRRYTGWGRLSRKLINGIRDKQSGKTILDFLKSDGFANRNFMQLIHDDSLTFKEDIQKAQVSGQGDSLHEHIANLAGSPAIKKGILQTVKVVDELVKVMGRHKPENIVIEMARENQTTQKGQKNSRERMKRIEEGIKELGSQILKEHPVENTQLQNEKLYLYYLQNGRDMYVDQELDINRLSDYDVDHIVPQSFLKDDSIDNKVLTRSDKARGKSDNVPSEEVVKKMKNYWRQLLNAKLITQRKFDNLTKAERGGLSELDKAGFIKRQLVETRQITKHVAQILDSRMNTKYDENDKLIREVKVITLKSKLVSDFRKDFQFYKVREINNYHHAHDAYLNAVVGTALIKKYPKLESEFVYGDYKVYDVRKMIAKSEQEIGKATAKYFFYSNIMNFFKTEITLANGEIRKRPLIETNGETGEIVWDKGRDFATVRKVLSMPQVNIVKKTEVQTGGFSKESILPKRNSDKLIARKKDWDPKKYGGFDSPTVAYSVLVVAKVEKGKSKKLKSVKELLGITIMERSSFEKNPIDFLEAKGYKEVKKDLIIKLPKYSLFELENGRKRMLASAGELQKGNELALPSKYVNFLYLASHYEKLKGSPEDNEQKQLFVEQHKHYLDEIIEQISEFSKRVILADANLDKVLSAYNKHRDKPIREQAENIIHLFTLTNLGAPAAFKYFDTTIDRKRYTSTKEVLDATLIHQSITGLYETRIDLSQLGGDGGEAAAKGGGGSEAAAKGGTLNLEDEYRLYETSAEPEVSPGSTWLSDFPQAWAETGGMGLAVRQAPLIIPLKATSTPVSIKQYPMSQEAKLGIKPHIQRLLDQGILVPCQSPWNTPLLPVKKPGTNDYRPVQDLREVNKRVEDIHPTVPNPYNLLSGLPPSHRWYTVLDLKDAFFCLRLHPTSQPLFAFEWRDPGMGISGQLTWTRLPQGFKNSPTLFNEALHRDLADFRIQHPDLILLQYVDDILLAATSELDCQQGTRALLLTLGNLGYRASAKKAQLCQKQVKYLGYLLKEGQRWLTEARKETVMGQPTPKTPRQLREFLGKAGFCRLFIPGFAEMAAPLYPLTKPGTLFNWGPDQQKAYQEIKQALLTAPALGLPDLTKPFELFVDEKQGYAKGVLTQKLGPWRRPVAYLSKKLDPVAAGWPPCLRMVAAIAVLRKDAGKLTMGQPLVILAPHAVEALVKQPPDRWLSNARMTHYQAMLLDTDRVQFGPVVALNPATLLPLPEEGAPHDCLEILAETHGTRPDLTDQPIPDADHTWYTDGSSFLQEGQRKAGAAVTTETEVIWARALPAGTSAQRAELIALTQALKMAEGKRLNVYTDSRYAFATAHIHGEIYRRRGWLTSEGREIKNKSEILALLKALFLPKRLSIIHCLGHQKGDSAEARGNRLADQAAREAAIKTPPDTSTLLAGKRTADGSEFEKRTADGSEFESPKKKAKVE

SEQ ID NO: 1861 - protein, 2096 aa, synthetic construct
MPAAKRVKLDGGDKKYSIGLDIGTNSVGWAVITDEYKVPSKKFKVLGNTDRHSIKKNLIGALLFDSGETAEATRLKRTARRRYTRRKNRICYLQEIFSNEMAKVDDSFFHRLEESFLVEEDKKHERHPIFGNIVDEVAYHEKYPTIYHLRKKLVDSTDKADLRLIYLALAHMIKFRGHFLIEGDLNPDNSDVDKLFIQLVQTYNQLFEENPINASGVDAKAILSARLSKSRRLENLIAQLPGEKKNGLFGNLIALSLGLTPNFKSNFDLAEDAKLQLSKDTYDDDLDNLLAQIGDQYADLFLAAKNLSDAILLSDILRVNTEITKAPLSASMIKRYDEHHQDLTLLKALVRQQLPEKYKEIFFDQSKNGYAGYIDGGASQEEFYKFIKPILEKMDGTEELLVKLNREDLLRKQRTFDNGSIPHQIHLGELHAILRRQEDFYPFLKDNREKIEKILTFRIPYYVGPLARGNSRFAWMTRKSEETITPWNFEEVVDKGASAQSFIERMTNFDKNLPNEKVLPKHSLLYEYFTVYNELTKVKYVTEGMRKPAFLSGEQKKAIVDLLFKTNRKVTVKQLKEDYFKKIECFDSVEISGVEDRFNASLGTYHDLLKIIKDKDFLDNEENEDILEDIVLTLTLFEDREMIEERLKTYAHLFDDKVMKQLKRRRYTGWGRLSRKLINGIRDKQSGKTILDFLKSDGFANRNFMQLIHDDSLTFKEDIQKAQVSGQGDSLHEHIANLAGSPAIKKGILQTVKVVDELVKVMGRHKPENIVIEMARENQTTQKGQKNSRERMKRIEEGIKELGSQILKEHPVENTQLQNEKLYLYYLQNGRDMYVDQELDINRLSDYDVDHIVPQSFLKDDSIDNKVLTRSDKARGKSDNVPSEEVVKKMKNYWRQLLNAKLITQRKFDNLTKAERGGLSELDKAGFIKRQLVETRQITKHVAQILDSRMNTKYDENDKLIREVKVITLKSKLVSDFRKDFQFYKVREINNYHHAHDAYLNAVVGTALIKKYPKLESEFVYGDYKVYDVRKMIAKSEQEIGKATAKYFFYSNIMNFFKTEITLANGEIRKRPLIETNGETGEIVWDKGRDFATVRKVLSMPQVNIVKKTEVQTGGFSKESILPKRNSDKLIARKKDWDPKKYGGFDSPTVAYSVLVVAKVEKGKSKKLKSVKELLGITIMERSSFEKNPIDFLEAKGYKEVKKDLIIKLPKYSLFELENGRKRMLASAGELQKGNELALPSKYVNFLYLASHYEKLKGSPEDNEQKQLFVEQHKHYLDEIIEQISEFSKRVILADANLDKVLSAYNKHRDKPIREQAENIIHLFTLTNLGAPAAFKYFDTTIDRKRYTSTKEVLDATLIHQSITGLYETRIDLSQLGGDGGGSSEAAAKGGGGGTLNLEDEYRLYETSAEPEVSPGSTWLSDFPQAWAETGGMGLAVRQAPLIIPLKATSTPVSIKQYPMSQEAKLGIKPHIQRLLDQGILVPCQSPWNTPLLPVKKPGTNDYRPVQDLREVNKRVEDIHPTVPNPYNLLSGLPPSHRWYTVLDLKDAFFCLRLHPTSQPLFAFEWRDPGMGISGQLTWTRLPQGFKNSPTLFNEALHRDLADFRIQHPDLILLQYVDDILLAATSELDCQQGTRALLLTLGNLGYRASAKKAQLCQKQVKYLGYLLKEGQRWLTEARKETVMGQPTPKTPRQLREFLGKAGFCRLFIPGFAEMAAPLYPLTKPGTLFNWGPDQQKAYQEIKQALLTAPALGLPDLTKPFELFVDEKQGYAKGVLTQKLGPWRRPVAYLSKKLDPVAAGWPPCLRMVAAIAVLRKDAGKLTMGQPLVILAPHAVEALVKQPPDRWLSNARMTHYQAMLLDTDRVQFGPVVALNPATLLPLPEEGAPHDCLEILAETHGTRPDLTDQPIPDADHTWYTDGSSFLQEGQRKAGAAVTTETEVIWARALPAGTSAQRAELIALTQALKMAEGKRLNVYTDSRYAFATAHIHGEIYRRRGWLTSEGREIKNKSEILALLKALFLPKRLSIIHCLGHQKGDSAEARGNRLADQAAREAAIKTPPDTSTLLAGKRTADGSEFEKRTADGSEFESPKKKAKVE

SEQ ID NO: 1862 - protein, 2110 aa, synthetic construct
MPAAKRVKLDGGDKKYSIGLDIGTNSVGWAVITDEYKVPSKKFKVLGNTDRHSIKKNLIGALLFDSGETAEATRLKRTARRRYTRRKNRICYLQEIFSNEMAKVDDSFFHRLEESFLVEEDKKHERHPIFGNIVDEVAYHEKYPTIYHLRKKLVDSTDKADLRLIYLALAHMIKFRGHFLIEGDLNPDNSDVDKLFIQLVQTYNQLFEENPINASGVDAKAILSARLSKSRRLENLIAQLPGEKKNGLFGNLIALSLGLTPNFKSNFDLAEDAKLQLSKDTYDDDLDNLLAQIGDQYADLFLAAKNLSDAILLSDILRVNTEITKAPLSASMIKRYDEHHQDLTLLKALVRQQLPEKYKEIFFDQSKNGYAGYIDGGASQEEFYKFIKPILEKMDGTEELLVKLNREDLLRKQRTFDNGSIPHQIHLGELHAILRRQEDFYPFLKDNREKIEKILTFRIPYYVGPLARGNSRFAWMTRKSEETITPWNFEEVVDKGASAQSFIERMTNFDKNLPNEKVLPKHSLLYEYFTVYNELTKVKYVTEGMRKPAFLSGEQKKAIVDLLFKTNRKVTVKQLKEDYFKKIECFDSVEISGVEDRFNASLGTYHDLLKIIKDKDFLDNEENEDILEDIVLTLTLFEDREMIEERLKTYAHLFDDKVMKQLKRRRYTGWGRLSRKLINGIRDKQSGKTILDFLKSDGFANRNFMQLIHDDSLTFKEDIQKAQVSGQGDSLHEHIANLAGSPAIKKGILQTVKVVDELVKVMGRHKPENIVIEMARENQTTQKGQKNSRERMKRIEEGIKELGSQILKEHPVENTQLQNEKLYLYYLQNGRDMYVDQELDINRLSDYDVDHIVPQSFLKDDSIDNKVLTRSDKARGKSDNVPSEEVVKKMKNYWRQLLNAKLITQRKFDNLTKAERGGLSELDKAGFIKRQLVETRQITKHVAQILDSRMNTKYDENDKLIREVKVITLKSKLVSDFRKDFQFYKVREINNYHHAHDAYLNAVVGTALIKKYPKLESEFVYGDYKVYDVRKMIAKSEQEIGKATAKYFFYSNIMNFFKTEITLANGEIRKRPLIETNGETGEIVWDKGRDFATVRKVLSMPQVNIVKKTEVQTGGFSKESILPKRNSDKLIARKKDWDPKKYGGFDSPTVAYSVLVVAKVEKGKSKKLKSVKELLGITIMERSSFEKNPIDFLEAKGYKEVKKDLIIKLPKYSLFELENGRKRMLASAGELQKGNELALPSKYVNFLYLASHYEKLKGSPEDNEQKQLFVEQHKHYLDEIIEQISEFSKRVILADANLDKVLSAYNKHRDKPIREQAENIIHLFTLTNLGAPAAFKYFDTTIDRKRYTSTKEVLDATLIHQSITGLYETRIDLSQLGGDGGEAAAKEAAAKEAAAKEAAAKEAAAKGGTLNLEDEYRLYETSAEPEVSPGSTWLSDFPQAWAETGGMGLAVRQAPLIIPLKATSTPVSIKQYPMSQEAKLGIKPHIQRLLDQGILVPCQSPWNTPLLPVKKPGTNDYRPVQDLREVNKRVEDIHPTVPNPYNLLSGLPPSHRWYTVLDLKDAFFCLRLHPTSQPLFAFEWRDPGMGISGQLTWTRLPQGFKNSPTLFNEALHRDLADFRIQHPDLILLQYVDDILLAATSELDCQQGTRALLLTLGNLGYRASAKKAQLCQKQVKYLGYLLKEGQRWLTEARKETVMGQPTPKTPRQLREFLGKAGFCRLFIPGFAEMAAPLYPLTKPGTLFNWGPDQQKAYQEIKQALLTAPALGLPDLTKPFELFVDEKQGYAKGVLTQKLGPWRRPVAYLSKKLDPVAAGWPPCLRMVAAIAVLRKDAGKLTMGQPLVILAPHAVEALVKQPPDRWLSNARMTHYQAMLLDTDRVQFGPVVALNPATLLPLPEEGAPHDCLEILAETHGTRPDLTDQPIPDADHTWYTDGSSFLQEGQRKAGAAVTTETEVIWARALPAGTSAQRAELIALTQALKMAEGKRLNVYTDSRYAFATAHIHGEIYRRRGWLTSEGREIKNKSEILALLKALFLPKRLSIIHCLGHQKGDSAEARGNRLADQAAREAAIKTPPDTSTLLAGKRTADGSEFEKRTADGSEFESPKKKAKVE

SEQ ID NO: 1863 - protein, 2098 aa, synthetic construct
MPAAKRVKLDGGDKKYSIGLDIGTNSVGWAVITDEYKVPSKKFKVLGNTDRHSIKKNLIGALLFDSGETAEATRLKRTARRRYTRRKNRICYLQEIFSNEMAKVDDSFFHRLEESFLVEEDKKHERHPIFGNIVDEVAYHEKYPTIYHLRKKLVDSTDKADLRLIYLALAHMIKFRGHFLIEGDLNPDNSDVDKLFIQLVQTYNQLFEENPINASGVDAKAILSARLSKSRRLENLIAQLPGEKKNGLFGNLIALSLGLTPNFKSNFDLAEDAKLQLSKDTYDDDLDNLLAQIGDQYADLFLAAKNLSDAILLSDILRVNTEITKAPLSASMIKRYDEHHQDLTLLKALVRQQLPEKYKEIFFDQSKNGYAGYIDGGASQEEFYKFIKPILEKMDGTEELLVKLNREDLLRKQRTFDNGSIPHQIHLGELHAILRRQEDFYPFLKDNREKIEKILTFRIPYYVGPLARGNSRFAWMTRKSEETITPWNFEEVVDKGASAQSFIERMTNFDKNLPNEKVLPKHSLLYEYFTVYNELTKVKYVTEGMRKPAFLSGEQKKAIVDLLFKTNRKVTVKQLKEDYFKKIECFDSVEISGVEDRFNASLGTYHDLLKIIKDKDFLDNEENEDILEDIVLTLTLFEDREMIEERLKTYAHLFDDKVMKQLKRRRYTGWGRLSRKLINGIRDKQSGKTILDFLKSDGFANRNFMQLIHDDSLTFKEDIQKAQVSGQGDSLHEHIANLAGSPAIKKGILQTVKVVDELVKVMGRHKPENIVIEMARENQTTQKGQKNSRERMKRIEEGIKELGSQILKEHPVENTQLQNEKLYLYYLQNGRDMYVDQELDINRLSDYDVDHIVPQSFLKDDSIDNKVLTRSDKARGKSDNVPSEEVVKKMKNYWRQLLNAKLITQRKFDNLTKAERGGLSELDKAGFIKRQLVETRQITKHVAQILDSRMNTKYDENDKLIREVKVITLKSKLVSDFRKDFQFYKVREINNYHHAHDAYLNAVVGTALIKKYPKLESEFVYGDYKVYDVRKMIAKSEQEIGKATAKYFFYSNIMNFFKTEITLANGEIRKRPLIETNGETGEIVWDKGRDFATVRKVLSMPQVNIVKKTEVQTGGFSKESILPKRNSDKLIARKKDWDPKKYGGFDSPTVAYSVLVVAKVEKGKSKKLKSVKELLGITIMERSSFEKNPIDFLEAKGYKEVKKDLIIKLPKYSLFELENGRKRMLASAGELQKGNELALPSKYVNFLYLASHYEKLKGSPEDNEQKQLFVEQHKHYLDEIIEQISEFSKRVILADANLDKVLSAYNKHRDKPIREQAENIIHLFTLTNLGAPAAFKYFDTTIDRKRYTSTKEVLDATLIHQSITGLYETRIDLSQLGGDGGPAPAPAPAPAPAPGGTLNLEDEYRLYETSAEPEVSPGSTWLSDFPQAWAETGGMGLAVRQAPLIIPLKATSTPVSIKQYPMSQEAKLGIKPHIQRLLDQGILVPCQSPWNTPLLPVKKPGTNDYRPVQDLREVNKRVEDIHPTVPNPYNLLSGLPPSHRWYTVLDLKDAFFCLRLHPTSQPLFAFEWRDPGMGISGQLTWTRLPQGFKNSPTLFNEALHRDLADFRIQHPDLILLQYVDDILLAATSELDCQQGTRALLLTLGNLGYRASAKKAQLCQKQVKYLGYLLKEGQRWLTEARKETVMGQPTPKTPRQLREFLGKAGFCRLFIPGFAEMAAPLYPLTKPGTLFNWGPDQQKAYQEIKQALLTAPALGLPDLTKPFELFVDEKQGYAKGVLTQKLGPWRRPVAYLSKKLDPVAAGWPPCLRMVAAIAVLRKDAGKLTMGQPLVILAPHAVEALVKQPPDRWLSNARMTHYQAMLLDTDRVQFGPVVALNPATLLPLPEEGAPHDCLEILAETHGTRPDLTDQPIPDADHTWYTDGSSFLQEGQRKAGAAVTTETEVIWARALPAGTSAQRAELIALTQALKMAEGKRLNVYTDSRYAFATAHIHGEIYRRRGWLTSEGREIKNKSEILALLKALFLPKRLSIIHCLGHQKGDSAEARGNRLADQAAREAAIKTPPDTSTLLAGKRTADGSEFEKRTADGSEFESPKKKAKVE

SEQ ID NO: 1864 - protein, 2096 aa, synthetic construct
MPAAKRVKLDGGDKKYSIGLDIGTNSVGWAVITDEYKVPSKKFKVLGNTDRHSIKKNLIGALLFDSGETAEATRLKRTARRRYTRRKNRICYLQEIFSNEMAKVDDSFFHRLEESFLVEEDKKHERHPIFGNIVDEVAYHEKYPTIYHLRKKLVDSTDKADLRLIYLALAHMIKFRGHFLIEGDLNPDNSDVDKLFIQLVQTYNQLFEENPINASGVDAKAILSARLSKSRRLENLIAQLPGEKKNGLFGNLIALSLGLTPNFKSNFDLAEDAKLQLSKDTYDDDLDNLLAQIGDQYADLFLAAKNLSDAILLSDILRVNTEITKAPLSASMIKRYDEHHQDLTLLKALVRQQLPEKYKEIFFDQSKNGYAGYIDGGASQEEFYKFIKPILEKMDGTEELLVKLNREDLLRKQRTFDNGSIPHQIHLGELHAILRRQEDFYPFLKDNREKIEKILTFRIPYYVGPLARGNSRFAWMTRKSEETITPWNFEEVVDKGASAQSFIERMTNFDKNLPNEKVLPKHSLLYEYFTVYNELTKVKYVTEGMRKPAFLSGEQKKAIVDLLFKTNRKVTVKQLKEDYFKKIECFDSVEISGVEDRFNASLGTYHDLLKIIKDKDFLDNEENEDILEDIVLTLTLFEDREMIEERLKTYAHLFDDKVMKQLKRRRYTGWGRLSRKLINGIRDKQSGKTILDFLKSDGFANRNFMQLIHDDSLTFKEDIQKAQVSGQGDSLHEHIANLAGSPAIKKGILQTVKVVDELVKVMGRHKPENIVIEMARENQTTQKGQKNSRERMKRIEEGIKELGSQILKEHPVENTQLQNEKLYLYYLQNGRDMYVDQELDINRLSDYDVDHIVPQSFLKDDSIDNKVLTRSDKARGKSDNVPSEEVVKKMKNYWRQLLNAKLITQRKFDNLTKAERGGLSELDKAGFIKRQLVETRQITKHVAQILDSRMNTKYDENDKLIREVKVITLKSKLVSDFRKDFQFYKVREINNYHHAHDAYLNAVVGTALIKKYPKLESEFVYGDYKVYDVRKMIAKSEQEIGKATAKYFFYSNIMNFFKTEITLANGEIRKRPLIETNGETGEIVWDKGRDFATVRKVLSMPQVNIVKKTEVQTGGFSKESILPKRNSDKLIARKKDWDPKKYGGFDSPTVAYSVLVVAKVEKGKSKKLKSVKELLGITIMERSSFEKNPIDFLEAKGYKEVKKDLIIKLPKYSLFELENGRKRMLASAGELQKGNELALPSKYVNFLYLASHYEKLKGSPEDNEQKQLFVEQHKHYLDEIIEQISEFSKRVILADANLDKVLSAYNKHRDKPIREQAENIIHLFTLTNLGAPAAFKYFDTTIDRKRYTSTKEVLDATLIHQSITGLYETRIDLSQLGGDGGPAPEAAAKGGGGGTLNLEDEYRLYETSAEPEVSPGSTWLSDFPQAWAETGGMGLAVRQAPLIIPLKATSTPVSIKQYPMSQEAKLGIKPHIQRLLDQGILVPCQSPWNTPLLPVKKPGTNDYRPVQDLREVNKRVEDIHPTVPNPYNLLSGLPPSHRWYTVLDLKDAFFCLRLHPTSQPLFAFEWRDPGMGISGQLTWTRLPQGFKNSPTLFNEALHRDLADFRIQHPDLILLQYVDDILLAATSELDCQQGTRALLLTLGNLGYRASAKKAQLCQKQVKYLGYLLKEGQRWLTEARKETVMGQPTPKTPRQLREFLGKAGFCRLFIPGFAEMAAPLYPLTKPGTLFNWGPDQQKAYQEIKQALLTAPALGLPDLTKPFELFVDEKQGYAKGVLTQKLGPWRRPVAYLSKKLDPVAAGWPPCLRMVAAIAVLRKDAGKLTMGQPLVILAPHAVEALVKQPPDRWLSNARMTHYQAMLLDTDRVQFGPVVALNPATLLPLPEEGAPHDCLEILAETHGTRPDLTDQPIPDADHTWYTDGSSFLQEGQRKAGAAVTTETEVIWARALPAGTSAQRAELIALTQALKMAEGKRLNVYTDSRYAFATAHIHGEIYRRRGWLTSEGREIKNKSEILALLKALFLPKRLSIIHCLGHQKGDSAEARGNRLADQAAREAAIKTPPDTSTLLAGKRTADGSEFEKRTADGSEFESPKKKAKVE

SEQ ID NO: 1865 - protein, 2105 aa, synthetic construct
MPAAKRVKLDGGDKKYSIGLDIGTNSVGWAVITDEYKVPSKKFKVLGNTDRHSIKKNLIGALLFDSGETAEATRLKRTARRRYTRRKNRICYLQEIFSNEMAKVDDSFFHRLEESFLVEEDKKHERHPIFGNIVDEVAYHEKYPTIYHLRKKLVDSTDKADLRLIYLALAHMIKFRGHFLIEGDLNPDNSDVDKLFIQLVQTYNQLFEENPINASGVDAKAILSARLSKSRRLENLIAQLPGEKKNGLFGNLIALSLGLTPNFKSNFDLAEDAKLQLSKDTYDDDLDNLLAQIGDQYADLFLAAKNLSDAILLSDILRVNTEITKAPLSASMIKRYDEHHQDLTLLKALVRQQLPEKYKEIFFDQSKNGYAGYIDGGASQEEFYKFIKPILEKMDGTEELLVKLNREDLLRKQRTFDNGSIPHQIHLGELHAILRRQEDFYPFLKDNREKIEKILTFRIPYYVGPLARGNSRFAWMTRKSEETITPWNFEEVVDKGASAQSFIERMTNFDKNLPNEKVLPKHSLLYEYFTVYNELTKVKYVTEGMRKPAFLSGEQKKAIVDLLFKTNRKVTVKQLKEDYFKKIECFDSVEISGVEDRFNASLGTYHDLLKIIKDKDFLDNEENEDILEDIVLTLTLFEDREMIEERLKTYAHLFDDKVMKQLKRRRYTGWGRLSRKLINGIRDKQSGKTILDFLKSDGFANRNFMQLIHDDSLTFKEDIQKAQVSGQGDSLHEHIANLAGSPAIKKGILQTVKVVDELVKVMGRHKPENIVIEMARENQTTQKGQKNSRERMKRIEEGIKELGSQILKEHPVENTQLQNEKLYLYYLQNGRDMYVDQELDINRLSDYDVDHIVPQSFLKDDSIDNKVLTRSDKARGKSDNVPSEEVVKKMKNYWRQLLNAKLITQRKFDNLTKAERGGLSELDKAGFIKRQLVETRQITKHVAQILDSRMNTKYDENDKLIREVKVITLKSKLVSDFRKDFQFYKVREINNYHHAHDAYLNAVVGTALIKKYPKLESEFVYGDYKVYDVRKMIAKSEQEIGKATAKYFFYSNIMNFFKTEITLANGEIRKRPLIETNGETGEIVWDKGRDFATVRKVLSMPQVNIVKKTEVQTGGFSKESILPKRNSDKLIARKKDWDPKKYGGFDSPTVAYSVLVVAKVEKGKSKKLKSVKELLGITIMERSSFEKNPIDFLEAKGYKEVKKDLIIKLPKYSLFELENGRKRMLASAGELQKGNELALPSKYVNFLYLASHYEKLKGSPEDNEQKQLFVEQHKHYLDEIIEQISEFSKRVILADANLDKVLSAYNKHRDKPIREQAENIIHLFTLTNLGAPAAFKYFDTTIDRKRYTSTKEVLDATLIHQSITGLYETRIDLSQLGGDGGEAAAKEAAAKEAAAKEAAAKGGTLNLEDEYRLYETSAEPEVSPGSTWLSDFPQAWAETGGMGLAVRQAPLIIPLKATSTPVSIKQYPMSQEAKLGIKPHIQRLLDQGILVPCQSPWNTPLLPVKKPGTNDYRPVQDLREVNKRVEDIHPTVPNPYNLLSGLPPSHRWYTVLDLKDAFFCLRLHPTSQPLFAFEWRDPGMGISGQLTWTRLPQGFKNSPTLFNEALHRDLADFRIQHPDLILLQYVDDILLAATSELDCQQGTRALLLTLGNLGYRASAKKAQLCQKQVKYLGYLLKEGQRWLTEARKETVMGQPTPKTPRQLREFLGKAGFCRLFIPGFAEMAAPLYPLTKPGTLFNWGPDQQKAYQEIKQALLTAPALGLPDLTKPFELFVDEKQGYAKGVLTQKLGPWRRPVAYLSKKLDPVAAGWPPCLRMVAAIAVLRKDAGKLTMGQPLVILAPHAVEALVKQPPDRWLSNARMTHYQAMLLDTDRVQFGPVVALNPATLLPLPEEGAPHDCLEILAETHGTRPDLTDQPIPDADHTWYTDGSSFLQEGQRKAGAAVTTETEVIWARALPAGTSAQRAELIALTQALKMAEGKRLNVYTDSRYAFATAHIHGEIYRRRGWLTSEGREIKNKSEILALLKALFLPKRLSIIHCLGHQKGDSAEARGNRLADQAAREAAIKTPPDTSTLLAGKRTADGSEFEKRTADGSEFESPKKKAKVE

SEQ ID NO: 1866 - protein, 2096 aa, synthetic construct
MPAAKRVKLDGGDKKYSIGLDIGTNSVGWAVITDEYKVPSKKFKVLGNTDRHSIKKNLIGALLFDSGETAEATRLKRTARRRYTRRKNRICYLQEIFSNEMAKVDDSFFHRLEESFLVEEDKKHERHPIFGNIVDEVAYHEKYPTIYHLRKKLVDSTDKADLRLIYLALAHMIKFRGHFLIEGDLNPDNSDVDKLFIQLVQTYNQLFEENPINASGVDAKAILSARLSKSRRLENLIAQLPGEKKNGLFGNLIALSLGLTPNFKSNFDLAEDAKLQLSKDTYDDDLDNLLAQIGDQYADLFLAAKNLSDAILLSDILRVNTEITKAPLSASMIKRYDEHHQDLTLLKALVRQQLPEKYKEIFFDQSKNGYAGYIDGGASQEEFYKFIKPILEKMDGTEELLVKLNREDLLRKQRTFDNGSIPHQIHLGELHAILRRQEDFYPFLKDNREKIEKILTFRIPYYVGPLARGNSRFAWMTRKSEETITPWNFEEVVDKGASAQSFIERMTNFDKNLPNEKVLPKHSLLYEYFTVYNELTKVKYVTEGMRKPAFLSGEQKKAIVDLLFKTNRKVTVKQLKEDYFKKIECFDSVEISGVEDRFNASLGTYHDLLKIIKDKDFLDNEENEDILEDIVLTLTLFEDREMIEERLKTYAHLFDDKVMKQLKRRRYTGWGRLSRKLINGIRDKQSGKTILDFLKSDGFANRNFMQLIHDDSLTFKEDIQKAQVSGQGDSLHEHIANLAGSPAIKKGILQTVKVVDELVKVMGRHKPENIVIEMARENQTTQKGQKNSRERMKRIEEGIKELGSQILKEHPVENTQLQNEKLYLYYLQNGRDMYVDQELDINRLSDYDVDHIVPQSFLKDDSIDNKVLTRSDKARGKSDNVPSEEVVKKMKNYWRQLLNAKLITQRKFDNLTKAERGGLSELDKAGFIKRQLVETRQITKHVAQILDSRMNTKYDENDKLIREVKVITLKSKLVSDFRKDFQFYKVREINNYHHAHDAYLNAVVGTALIKKYPKLESEFVYGDYKVYDVRKMIAKSEQEIGKATAKYFFYSNIMNFFKTEITLANGEIRKRPLIETNGETGEIVWDKGRDFATVRKVLSMPQVNIVKKTEVQTGGFSKESILPKRNSDKLIARKKDWDPKKYGGFDSPTVAYSVLVVAKVEKGKSKKLKSVKELLGITIMERSSFEKNPIDFLEAKGYKEVKKDLIIKLPKYSLFELENGRKRMLASAGELQKGNELALPSKYVNFLYLASHYEKLKGSPEDNEQKQLFVEQHKHYLDEIIEQISEFSKRVILADANLDKVLSAYNKHRDKPIREQAENIIHLFTLTNLGAPAAFKYFDTTIDRKRYTSTKEVLDATLIHQSITGLYETRIDLSQLGGDGGPAPGGSEAAAKGGTLNLEDEYRLYETSAEPEVSPGSTWLSDFPQAWAETGGMGLAVRQAPLIIPLKATSTPVSIKQYPMSQEAKLGIKPHIQRLLDQGILVPCQSPWNTPLLPVKKPGTNDYRPVQDLREVNKRVEDIHPTVPNPYNLLSGLPPSHRWYTVLDLKDAFFCLRLHPTSQPLFAFEWRDPGMGISGQLTWTRLPQGFKNSPTLFNEALHRDLADFRIQHPDLILLQYVDDILLAATSELDCQQGTRALLLTLGNLGYRASAKKAQLCQKQVKYLGYLLKEGQRWLTEARKETVMGQPTPKTPRQLREFLGKAGFCRLFIPGFAEMAAPLYPLTKPGTLFNWGPDQQKAYQEIKQALLTAPALGLPDLTKPFELFVDEKQGYAKGVLTQKLGPWRRPVAYLSKKLDPVAAGWPPCLRMVAAIAVLRKDAGKLTMGQPLVILAPHAVEALVKQPPDRWLSNARMTHYQAMLLDTDRVQFGPVVALNPATLLPLPEEGAPHDCLEILAETHGTRPDLTDQPIPDADHTWYTDGSSFLQEGQRKAGAAVTTETEVIWARALPAGTSAQRAELIALTQALKMAEGKRLNVYTDSRYAFATAHIHGEIYRRRGWLTSEGREIKNKSEILALLKALFLPKRLSIIHCLGHQKGDSAEARGNRLADQAAREAAIKTPPDTSTLLAGKRTADGSEFEKRTADGSEFESPKKKAKVE

SEQ ID NO: 1867 - protein, 2096 aa, synthetic construct
MPAAKRVKLDGGDKKYSIGLDIGTNSVGWAVITDEYKVPSKKFKVLGNTDRHSIKKNLIGALLFDSGETAEATRLKRTARRRYTRRKNRICYLQEIFSNEMAKVDDSFFHRLEESFLVEEDKKHERHPIFGNIVDEVAYHEKYPTIYHLRKKLVDSTDKADLRLIYLALAHMIKFRGHFLIEGDLNPDNSDVDKLFIQLVQTYNQLFEENPINASGVDAKAILSARLSKSRRLENLIAQLPGEKKNGLFGNLIALSLGLTPNFKSNFDLAEDAKLQLSKDTYDDDLDNLLAQIGDQYADLFLAAKNLSDAILLSDILRVNTEITKAPLSASMIKRYDEHHQDLTLLKALVRQQLPEKYKEIFFDQSKNGYAGYIDGGASQEEFYKFIKPILEKMDGTEELLVKLNREDLLRKQRTFDNGSIPHQIHLGELHAILRRQEDFYPFLKDNREKIEKILTFRIPYYVGPLARGNSRFAWMTRKSEETITPWNFEEVVDKGASAQSFIERMTNFDKNLPNEKVLPKHSLLYEYFTVYNELTKVKYVTEGMRKPAFLSGEQKKAIVDLLFKTNRKVTVKQLKEDYFKKIECFDSVEISGVEDRFNASLGTYHDLLKIIKDKDFLDNEENEDILEDIVLTLTLFEDREMIEERLKTYAHLFDDKVMKQLKRRRYTGWGRLSRKLINGIRDKQSGKTILDFLKSDGFANRNFMQLIHDDSLTFKEDIQKAQVSGQGDSLHEHIANLAGSPAIKKGILQTVKVVDELVKVMGRHKPENIVIEMARENQTTQKGQKNSRERMKRIEEGIKELGSQILKEHPVENTQLQNEKLYLYYLQNGRDMYVDQELDINRLSDYDVDHIVPQSFLKDDSIDNKVLTRSDKARGKSDNVPSEEVVKKMKNYWRQLLNAKLITQRKFDNLTKAERGGLSELDKAGFIKRQLVETRQITKHVAQILDSRMNTKYDENDKLIREVKVITLKSKLVSDFRKDFQFYKVREINNYHHAHDAYLNAVVGTALIKKYPKLESEFVYGDYKVYDVRKMIAKSEQEIGKATAKYFFYSNIMNFFKTEITLANGEIRKRPLIETNGETGEIVWDKGRDFATVRKVLSMPQVNIVKKTEVQTGGFSKESILPKRNSDKLIARKKDWDPKKYGGFDSPTVAYSVLVVAKVEKGKSKKLKSVKELLGITIMERSSFEKNPIDFLEAKGYKEVKKDLIIKLPKYSLFELENGRKRMLASAGELQKGNELALPSKYVNFLYLASHYEKLKGSPEDNEQKQLFVEQHKHYLDEIIEQISEFSKRVILADANLDKVLSAYNKHRDKPIREQAENIIHLFTLTNLGAPAAFKYFDTTIDRKRYTSTKEVLDATLIHQSITGLYETRIDLSQLGGDGGEAAAKGGGPAPGGTLNLEDEYRLYETSAEPEVSPGSTWLSDFPQAWAETGGMGLAVRQAPLIIPLKATSTPVSIKQYPMSQEAKLGIKPHIQRLLDQGILVPCQSPWNTPLLPVKKPGTNDYRPVQDLREVNKRVEDIHPTVPNPYNLLSGLPPSHRWYTVLDLKDAFFCLRLHPTSQPLFAFEWRDPGMGISGQLTWTRLPQGFKNSPTLFNEALHRDLADFRIQHPDLILLQYVDDILLAATSELDCQQGTRALLLTLGNLGYRASAKKAQLCQKQVKYLGYLLKEGQRWLTEARKETVMGQPTPKTPRQLREFLGKAGFCRLFIPGFAEMAAPLYPLTKPGTLFNWGPDQQKAYQEIKQALLTAPALGLPDLTKPFELFVDEKQGYAKGVLTQKLGPWRRPVAYLSKKLDPVAAGWPPCLRMVAAIAVLRKDAGKLTMGQPLVILAPHAVEALVKQPPDRWLSNARMTHYQAMLLDTDRVQFGPVVALNPATLLPLPEEGAPHDCLEILAETHGTRPDLTDQPIPDADHTWYTDGSSFLQEGQRKAGAAVTTETEVIWARALPAGTSAQRAELIALTQALKMAEGKRLNVYTDSRYAFATAHIHGEIYRRRGWLTSEGREIKNKSEILALLKALFLPKRLSIIHCLGHQKGDSAEARGNRLADQAAREAAIKTPPDTSTLLAGKRTADGSEFEKRTADGSEFESPKKKAKVE

SEQ ID NO: 1868 - protein, 2090 aa, synthetic construct
MPAAKRVKLDGGDKKYSIGLDIGTNSVGWAVITDEYKVPSKKFKVLGNTDRHSIKKNLIGALLFDSGETAEATRLKRTARRRYTRRKNRICYLQEIFSNEMAKVDDSFFHRLEESFLVEEDKKHERHPIFGNIVDEVAYHEKYPTIYHLRKKLVDSTDKADLRLIYLALAHMIKFRGHFLIEGDLNPDNSDVDKLFIQLVQTYNQLFEENPINASGVDAKAILSARLSKSRRLENLIAQLPGEKKNGLFGNLIALSLGLTPNFKSNFDLAEDAKLQLSKDTYDDDLDNLLAQIGDQYADLFLAAKNLSDAILLSDILRVNTEITKAPLSASMIKRYDEHHQDLTLLKALVRQQLPEKYKEIFFDQSKNGYAGYIDGGASQEEFYKFIKPILEKMDGTEELLVKLNREDLLRKQRTFDNGSIPHQIHLGELHAILRRQEDFYPFLKDNREKIEKILTFRIPYYVGPLARGNSRFAWMTRKSEETITPWNFEEVVDKGASAQSFIERMTNFDKNLPNEKVLPKHSLLYEYFTVYNELTKVKYVTEGMRKPAFLSGEQKKAIVDLLFKTNRKVTVKQLKEDYFKKIECFDSVEISGVEDRFNASLGTYHDLLKIIKDKDFLDNEENEDILEDIVLTLTLFEDREMIEERLKTYAHLFDDKVMKQLKRRRYTGWGRLSRKLINGIRDKQSGKTILDFLKSDGFANRNFMQLIHDDSLTFKEDIQKAQVSGQGDSLHEHIANLAGSPAIKKGILQTVKVVDELVKVMGRHKPENIVIEMARENQTTQKGQKNSRERMKRIEEGIKELGSQILKEHPVENTQLQNEKLYLYYLQNGRDMYVDQELDINRLSDYDVDHIVPQSFLKDDSIDNKVLTRSDKARGKSDNVPSEEVVKKMKNYWRQLLNAKLITQRKFDNLTKAERGGLSELDKAGFIKRQLVETRQITKHVAQILDSRMNTKYDENDKLIREVKVITLKSKLVSDFRKDFQFYKVREINNYHHAHDAYLNAVVGTALIKKYPKLESEFVYGDYKVYDVRKMIAKSEQEIGKATAKYFFYSNIMNFFKTEITLANGEIRKRPLIETNGETGEIVWDKGRDFATVRKVLSMPQVNIVKKTEVQTGGFSKESILPKRNSDKLIARKKDWDPKKYGGFDSPTVAYSVLVVAKVEKGKSKKLKSVKELLGITIMERSSFEKNPIDFLEAKGYKEVKKDLIIKLPKYSLFELENGRKRMLASAGELQKGNELALPSKYVNFLYLASHYEKLKGSPEDNEQKQLFVEQHKHYLDEIIEQISEFSKRVILADANLDKVLSAYNKHRDKPIREQAENIIHLFTLTNLGAPAAFKYFDTTIDRKRYTSTKEVLDATLIHQSITGLYETRIDLSQLGGDGGEAAAKGGTLNLEDEYRLYETSAEPEVSPGSTWLSDFPQAWAETGGMGLAVRQAPLIIPLKATSTPVSIKQYPMSQEAKLGIKPHIQRLLDQGILVPCQSPWNTPLLPVKKPGTNDYRPVQDLREVNKRVEDIHPTVPNPYNLLSGLPPSHRWYTVLDLKDAFFCLRLHPTSQPLFAFEWRDPGMGISGQLTWTRLPQGFKNSPTLFNEALHRDLADFRIQHPDLILLQYVDDILLAATSELDCQQGTRALLLTLGNLGYRASAKKAQLCQKQVKYLGYLLKEGQRWLTEARKETVMGQPTPKTPRQLREFLGKAGFCRLFIPGFAEMAAPLYPLTKPGTLFNWGPDQQKAYQEIKQALLTAPALGLPDLTKPFELFVDEKQGYAKGVLTQKLGPWRRPVAYLSKKLDPVAAGWPPCLRMVAAIAVLRKDAGKLTMGQPLVILAPHAVEALVKQPPDRWLSNARMTHYQAMLLDTDRVQFGPVVALNPATLLPLPEEGAPHDCLEILAETHGTRPDLTDQPIPDADHTWYTDGSSFLQEGQRKAGAAVTTETEVIWARALPAGTSAQRAELIALTQALKMAEGKRLNVYTDSRYAFATAHIHGEIYRRRGWLTSEGREIKNKSEILALLKALFLPKRLSIIHCLGHQKGDSAEARGNRLADQAAREAAIKTPPDTSTLLAGKRTADGSEFEKRTADGSEFESPKKKAKVE

SEQ ID NO: 1869 - protein, 2096 aa, synthetic construct
MPAAKRVKLDGGDKKYSIGLDIGTNSVGWAVITDEYKVPSKKFKVLGNTDRHSIKKNLIGALLFDSGETAEATRLKRTARRRYTRRKNRICYLQEIFSNEMAKVDDSFFHRLEESFLVEEDKKHERHPIFGNIVDEVAYHEKYPTIYHLRKKLVDSTDKADLRLIYLALAHMIKFRGHFLIEGDLNPDNSDVDKLFIQLVQTYNQLFEENPINASGVDAKAILSARLSKSRRLENLIAQLPGEKKNGLFGNLIALSLGLTPNFKSNFDLAEDAKLQLSKDTYDDDLDNLLAQIGDQYADLFLAAKNLSDAILLSDILRVNTEITKAPLSASMIKRYDEHHQDLTLLKALVRQQLPEKYKEIFFDQSKNGYAGYIDGGASQEEFYKFIKPILEKMDGTEELLVKLNREDLLRKQRTFDNGSIPHQIHLGELHAILRRQEDFYPFLKDNREKIEKILTFRIPYYVGPLARGNSRFAWMTRKSEETITPWNFEEVVDKGASAQSFIERMTNFDKNLPNEKVLPKHSLLYEYFTVYNELTKVKYVTEGMRKPAFLSGEQKKAIVDLLFKTNRKVTVKQLKEDYFKKIECFDSVEISGVEDRFNASLGTYHDLLKIIKDKDFLDNEENEDILEDIVLTLTLFEDREMIEERLKTYAHLFDDKVMKQLKRRRYTGWGRLSRKLINGIRDKQSGKTILDFLKSDGFANRNFMQLIHDDSLTFKEDIQKAQVSGQGDSLHEHIANLAGSPAIKKGILQTVKVVDELVKVMGRHKPENIVIEMARENQTTQKGQKNSRERMKRIEEGIKELGSQILKEHPVENTQLQNEKLYLYYLQNGRDMYVDQELDINRLSDYDVDHIVPQSFLKDDSIDNKVLTRSDKARGKSDNVPSEEVVKKMKNYWRQLLNAKLITQRKFDNLTKAERGGLSELDKAGFIKRQLVETRQITKHVAQILDSRMNTKYDENDKLIREVKVITLKSKLVSDFRKDFQFYKVREINNYHHAHDAYLNAVVGTALIKKYPKLESEFVYGDYKVYDVRKMIAKSEQEIGKATAKYFFYSNIMNFFKTEITLANGEIRKRPLIETNGETGEIVWDKGRDFATVRKVLSMPQVNIVKKTEVQTGGFSKESILPKRNSDKLIARKKDWDPKKYGGFDSPTVAYSVLVVAKVEKGKSKKLKSVKELLGITIMERSSFEKNPIDFLEAKGYKEVKKDLIIKLPKYSLFELENGRKRMLASAGELQKGNELALPSKYVNFLYLASHYEKLKGSPEDNEQKQLFVEQHKHYLDEIIEQISEFSKRVILADANLDKVLSAYNKHRDKPIREQAENIIHLFTLTNLGAPAAFKYFDTTIDRKRYTSTKEVLDATLIHQSITGLYETRIDLSQLGGDGGEAAAKGGGGSSGGTLNLEDEYRLYETSAEPEVSPGSTWLSDFPQAWAETGGMGLAVRQAPLIIPLKATSTPVSIKQYPMSQEAKLGIKPHIQRLLDQGILVPCQSPWNTPLLPVKKPGTNDYRPVQDLREVNKRVEDIHPTVPNPYNLLSGLPPSHRWYTVLDLKDAFFCLRLHPTSQPLFAFEWRDPGMGISGQLTWTRLPQGFKNSPTLFNEALHRDLADFRIQHPDLILLQYVDDILLAATSELDCQQGTRALLLTLGNLGYRASAKKAQLCQKQVKYLGYLLKEGQRWLTEARKETVMGQPTPKTPRQLREFLGKAGFCRLFIPGFAEMAAPLYPLTKPGTLFNWGPDQQKAYQEIKQALLTAPALGLPDLTKPFELFVDEKQGYAKGVLTQKLGPWRRPVAYLSKKLDPVAAGWPPCLRMVAAIAVLRKDAGKLTMGQPLVILAPHAVEALVKQPPDRWLSNARMTHYQAMLLDTDRVQFGPVVALNPATLLPLPEEGAPHDCLEILAETHGTRPDLTDQPIPDADHTWYTDGSSFLQEGQRKAGAAVTTETEVIWARALPAGTSAQRAELIALTQALKMAEGKRLNVYTDSRYAFATAHIHGEIYRRRGWLTSEGREIKNKSEILALLKALFLPKRLSIIHCLGHQKGDSAEARGNRLADQAAREAAIKTPPDTSTLLAGKRTADGSEFEKRTADGSEFESPKKKAKVE

SEQ ID NO: 1870 - protein, 2097 aa, synthetic construct
MPAAKRVKLDGGDKKYSIGLDIGTNSVGWAVITDEYKVPSKKFKVLGNTDRHSIKKNLIGALLFDSGETAEATRLKRTARRRYTRRKNRICYLQEIFSNEMAKVDDSFFHRLEESFLVEEDKKHERHPIFGNIVDEVAYHEKYPTIYHLRKKLVDSTDKADLRLIYLALAHMIKFRGHFLIEGDLNPDNSDVDKLFIQLVQTYNQLFEENPINASGVDAKAILSARLSKSRRLENLIAQLPGEKKNGLFGNLIALSLGLTPNFKSNFDLAEDAKLQLSKDTYDDDLDNLLAQIGDQYADLFLAAKNLSDAILLSDILRVNTEITKAPLSASMIKRYDEHHQDLTLLKALVRQQLPEKYKEIFFDQSKNGYAGYIDGGASQEEFYKFIKPILEKMDGTEELLVKLNREDLLRKQRTFDNGSIPHQIHLGELHAILRRQEDFYPFLKDNREKIEKILTFRIPYYVGPLARGNSRFAWMTRKSEETITPWNFEEVVDKGASAQSFIERMTNFDKNLPNEKVLPKHSLLYEYFTVYNELTKVKYVTEGMRKPAFLSGEQKKAIVDLLFKTNRKVTVKQLKEDYFKKIECFDSVEISGVEDRFNASLGTYHDLLKIIKDKDFLDNEENEDILEDIVLTLTLFEDREMIEERLKTYAHLFDDKVMKQLKRRRYTGWGRLSRKLINGIRDKQSGKTILDFLKSDGFANRNFMQLIHDDSLTFKEDIQKAQVSGQGDSLHEHIANLAGSPAIKKGILQTVKVVDELVKVMGRHKPENIVIEMARENQTTQKGQKNSRERMKRIEEGIKELGSQILKEHPVENTQLQNEKLYLYYLQNGRDMYVDQELDINRLSDYDVDHIVPQSFLKDDSIDNKVLTRSDKARGKSDNVPSEEVVKKMKNYWRQLLNAKLITQRKFDNLTKAERGGLSELDKAGFIKRQLVETRQITKHVAQILDSRMNTKYDENDKLIREVKVITLKSKLVSDFRKDFQFYKVREINNYHHAHDAYLNAVVGTALIKKYPKLESEFVYGDYKVYDVRKMIAKSEQEIGKATAKYFFYSNIMNFFKTEITLANGEIRKRPLIETNGETGEIVWDKGRDFATVRKVLSMPQVNIVKKTEVQTGGFSKESILPKRNSDKLIARKKDWDPKKYGGFDSPTVAYSVLVVAKVEKGKSKKLKSVKELLGITIMERSSFEKNPIDFLEAKGYKEVKKDLIIKLPKYSLFELENGRKRMLASAGELQKGNELALPSKYVNFLYLASHYEKLKGSPEDNEQKQLFVEQHKHYLDEIIEQISEFSKRVILADANLDKVLSAYNKHRDKPIREQAENIIHLFTLTNLGAPAAFKYFDTTIDRKRYTSTKEVLDATLIHQSITGLYETRIDLSQLGGDGGGSAGSAAGSGEFGGTLNLEDEYRLYETSAEPEVSPGSTWLSDFPQAWAETGGMGLAVRQAPLIIPLKATSTPVSIKQYPMSQEAKLGIKPHIQRLLDQGILVPCQSPWNTPLLPVKKPGTNDYRPVQDLREVNKRVEDIHPTVPNPYNLLSGLPPSHRWYTVLDLKDAFFCLRLHPTSQPLFAFEWRDPGMGISGQLTWTRLPQGFKNSPTLFNEALHRDLADFRIQHPDLILLQYVDDILLAATSELDCQQGTRALLLTLGNLGYRASAKKAQLCQKQVKYLGYLLKEGQRWLTEARKETVMGQPTPKTPRQLREFLGKAGFCRLFIPGFAEMAAPLYPLTKPGTLFNWGPDQQKAYQEIKQALLTAPALGLPDLTKPFELFVDEKQGYAKGVLTQKLGPWRRPVAYLSKKLDPVAAGWPPCLRMVAAIAVLRKDAGKLTMGQPLVILAPHAVEALVKQPPDRWLSNARMTHYQAMLLDTDRVQFGPVVALNPATLLPLPEEGAPHDCLEILAETHGTRPDLTDQPIPDADHTWYTDGSSFLQEGQRKAGAAVTTETEVIWARALPAGTSAQRAELIALTQALKMAEGKRLNVYTDSRYAFATAHIHGEIYRRRGWLTSEGREIKNKSEILALLKALFLPKRLSIIHCLGHQKGDSAEARGNRLADQAAREAAIKTPPDTSTLLAGKRTADGSEFEKRTADGSEFESPKKKAKVE

SEQ ID NO: 1871 - protein, 2096 aa, synthetic construct
MPAAKRVKLDGGDKKYSIGLDIGTNSVGWAVITDEYKVPSKKFKVLGNTDRHSIKKNLIGALLFDSGETAEATRLKRTARRRYTRRKNRICYLQEIFSNEMAKVDDSFFHRLEESFLVEEDKKHERHPIFGNIVDEVAYHEKYPTIYHLRKKLVDSTDKADLRLIYLALAHMIKFRGHFLIEGDLNPDNSDVDKLFIQLVQTYNQLFEENPINASGVDAKAILSARLSKSRRLENLIAQLPGEKKNGLFGNLIALSLGLTPNFKSNFDLAEDAKLQLSKDTYDDDLDNLLAQIGDQYADLFLAAKNLSDAILLSDILRVNTEITKAPLSASMIKRYDEHHQDLTLLKALVRQQLPEKYKEIFFDQSKNGYAGYIDGGASQEEFYKFIKPILEKMDGTEELLVKLNREDLLRKQRTFDNGSIPHQIHLGELHAILRRQEDFYPFLKDNREKIEKILTFRIPYYVGPLARGNSRFAWMTRKSEETITPWNFEEVVDKGASAQSFIERMTNFDKNLPNEKVLPKHSLLYEYFTVYNELTKVKYVTEGMRKPAFLSGEQKKAIVDLLFKTNRKVTVKQLKEDYFKKIECFDSVEISGVEDRFNASLGTYHDLLKIIKDKDFLDNEENEDILEDIVLTLTLFEDREMIEERLKTYAHLFDDKVMKQLKRRRYTGWGRLSRKLINGIRDKQSGKTILDFLKSDGFANRNFMQLIHDDSLTFKEDIQKAQVSGQGDSLHEHIANLAGSPAIKKGILQTVKVVDELVKVMGRHKPENIVIEMARENQTTQKGQKNSRERMKRIEEGIKELGSQILKEHPVENTQLQNEKLYLYYLQNGRDMYVDQELDINRLSDYDVDHIVPQSFLKDDSIDNKVLTRSDKARGKSDNVPSEEVVKKMKNYWRQLLNAKLITQRKFDNLTKAERGGLSELDKAGFIKRQLVETRQITKHVAQILDSRMNTKYDENDKLIREVKVITLKSKLVSDFRKDFQFYKVREINNYHHAHDAYLNAVVGTALIKKYPKLESEFVYGDYKVYDVRKMIAKSEQEIGKATAKYFFYSNIMNFFKTEITLANGEIRKRPLIETNGETGEIVWDKGRDFATVRKVLSMPQVNIVKKTEVQTGGFSKESILPKRNSDKLIARKKDWDPKKYGGFDSPTVAYSVLVVAKVEKGKSKKLKSVKELLGITIMERSSFEKNPIDFLEAKGYKEVKKDLIIKLPKYSLFELENGRKRMLASAGELQKGNELALPSKYVNFLYLASHYEKLKGSPEDNEQKQLFVEQHKHYLDEIIEQISEFSKRVILADANLDKVLSAYNKHRDKPIREQAENIIHLFTLTNLGAPAAFKYFDTTIDRKRYTSTKEVLDATLIHQSITGLYETRIDLSQLGGDGGEAAAKPAPGGSGGTLNLEDEYRLYETSAEPEVSPGSTWLSDFPQAWAETGGMGLAVRQAPLIIPLKATSTPVSIKQYPMSQEAKLGIKPHIQRLLDQGILVPCQSPWNTPLLPVKKPGTNDYRPVQDLREVNKRVEDIHPTVPNPYNLLSGLPPSHRWYTVLDLKDAFFCLRLHPTSQPLFAFEWRDPGMGISGQLTWTRLPQGFKNSPTLFNEALHRDLADFRIQHPDLILLQYVDDILLAATSELDCQQGTRALLLTLGNLGYRASAKKAQLCQKQVKYLGYLLKEGQRWLTEARKETVMGQPTPKTPRQLREFLGKAGFCRLFIPGFAEMAAPLYPLTKPGTLFNWGPDQQKAYQEIKQALLTAPALGLPDLTKPFELFVDEKQGYAKGVLTQKLGPWRRPVAYLSKKLDPVAAGWPPCLRMVAAIAVLRKDAGKLTMGQPLVILAPHAVEALVKQPPDRWLSNARMTHYQAMLLDTDRVQFGPVVALNPATLLPLPEEGAPHDCLEILAETHGTRPDLTDQPIPDADHTWYTDGSSFLQEGQRKAGAAVTTETEVIWARALPAGTSAQRAELIALTQALKMAEGKRLNVYTDSRYAFATAHIHGEIYRRRGWLTSEGREIKNKSEILALLKALFLPKRLSIIHCLGHQKGDSAEARGNRLADQAAREAAIKTPPDTSTLLAGKRTADGSEFEKRTADGSEFESPKKKAKVE

SEQ ID NO: 1872 - protein, 2096 aa, synthetic construct
MPAAKRVKLDGGDKKYSIGLDIGTNSVGWAVITDEYKVPSKKFKVLGNTDRHSIKKNLIGALLFDSGETAEATRLKRTARRRYTRRKNRICYLQEIFSNEMAKVDDSFFHRLEESFLVEEDKKHERHPIFGNIVDEVAYHEKYPTIYHLRKKLVDSTDKADLRLIYLALAHMIKFRGHFLIEGDLNPDNSDVDKLFIQLVQTYNQLFEENPINASGVDAKAILSARLSKSRRLENLIAQLPGEKKNGLFGNLIALSLGLTPNFKSNFDLAEDAKLQLSKDTYDDDLDNLLAQIGDQYADLFLAAKNLSDAILLSDILRVNTEITKAPLSASMIKRYDEHHQDLTLLKALVRQQLPEKYKEIFFDQSKNGYAGYIDGGASQEEFYKFIKPILEKMDGTEELLVKLNREDLLRKQRTFDNGSIPHQIHLGELHAILRRQEDFYPFLKDNREKIEKILTFRIPYYVGPLARGNSRFAWMTRKSEETITPWNFEEVVDKGASAQSFIERMTNFDKNLPNEKVLPKHSLLYEYFTVYNELTKVKYVTEGMRKPAFLSGEQKKAIVDLLFKTNRKVTVKQLKEDYFKKIECFDSVEISGVEDRFNASLGTYHDLLKIIKDKDFLDNEENEDILEDIVLTLTLFEDREMIEERLKTYAHLFDDKVMKQLKRRRYTGWGRLSRKLINGIRDKQSGKTILDFLKSDGFANRNFMQLIHDDSLTFKEDIQKAQVSGQGDSLHEHIANLAGSPAIKKGILQTVKVVDELVKVMGRHKPENIVIEMARENQTTQKGQKNSRERMKRIEEGIKELGSQILKEHPVENTQLQNEKLYLYYLQNGRDMYVDQELDINRLSDYDVDHIVPQSFLKDDSIDNKVLTRSDKARGKSDNVPSEEVVKKMKNYWRQLLNAKLITQRKFDNLTKAERGGLSELDKAGFIKRQLVETRQITKHVAQILDSRMNTKYDENDKLIREVKVITLKSKLVSDFRKDFQFYKVREINNYHHAHDAYLNAVVGTALIKKYPKLESEFVYGDYKVYDVRKMIAKSEQEIGKATAKYFFYSNIMNFFKTEITLANGEIRKRPLIETNGETGEIVWDKGRDFATVRKVLSMPQVNIVKKTEVQTGGFSKESILPKRNSDKLIARKKDWDPKKYGGFDSPTVAYSVLVVAKVEKGKSKKLKSVKELLGITIMERSSFEKNPIDFLEAKGYKEVKKDLIIKLPKYSLFELENGRKRMLASAGELQKGNELALPSKYVNFLYLASHYEKLKGSPEDNEQKQLFVEQHKHYLDEIIEQISEFSKRVILADANLDKVLSAYNKHRDKPIREQAENIIHLFTLTNLGAPAAFKYFDTTIDRKRYTSTKEVLDATLIHQSITGLYETRIDLSQLGGDGGEAAAKGSSPAPGGTLNLEDEYRLYETSAEPEVSPGSTWLSDFPQAWAETGGMGLAVRQAPLIIPLKATSTPVSIKQYPMSQEAKLGIKPHIQRLLDQGILVPCQSPWNTPLLPVKKPGTNDYRPVQDLREVNKRVEDIHPTVPNPYNLLSGLPPSHRWYTVLDLKDAFFCLRLHPTSQPLFAFEWRDPGMGISGQLTWTRLPQGFKNSPTLFNEALHRDLADFRIQHPDLILLQYVDDILLAATSELDCQQGTRALLLTLGNLGYRASAKKAQLCQKQVKYLGYLLKEGQRWLTEARKETVMGQPTPKTPRQLREFLGKAGFCRLFIPGFAEMAAPLYPLTKPGTLFNWGPDQQKAYQEIKQALLTAPALGLPDLTKPFELFVDEKQGYAKGVLTQKLGPWRRPVAYLSKKLDPVAAGWPPCLRMVAAIAVLRKDAGKLTMGQPLVILAPHAVEALVKQPPDRWLSNARMTHYQAMLLDTDRVQFGPVVALNPATLLPLPEEGAPHDCLEILAETHGTRPDLTDQPIPDADHTWYTDGSSFLQEGQRKAGAAVTTETEVIWARALPAGTSAQRAELIALTQALKMAEGKRLNVYTDSRYAFATAHIHGEIYRRRGWLTSEGREIKNKSEILALLKALFLPKRLSIIHCLGHQKGDSAEARGNRLADQAAREAAIKTPPDTSTLLAGKRTADGSEFEKRTADGSEFESPKKKAKVE

SEQ ID NO: 1873 - protein, 2091 aa, synthetic construct
MPAAKRVKLDGGDKKYSIGLDIGTNSVGWAVITDEYKVPSKKFKVLGNTDRHSIKKNLIGALLFDSGETAEATRLKRTARRRYTRRKNRICYLQEIFSNEMAKVDDSFFHRLEESFLVEEDKKHERHPIFGNIVDEVAYHEKYPTIYHLRKKLVDSTDKADLRLIYLALAHMIKFRGHFLIEGDLNPDNSDVDKLFIQLVQTYNQLFEENPINASGVDAKAILSARLSKSRRLENLIAQLPGEKKNGLFGNLIALSLGLTPNFKSNFDLAEDAKLQLSKDTYDDDLDNLLAQIGDQYADLFLAAKNLSDAILLSDILRVNTEITKAPLSASMIKRYDEHHQDLTLLKALVRQQLPEKYKEIFFDQSKNGYAGYIDGGASQEEFYKFIKPILEKMDGTEELLVKLNREDLLRKQRTFDNGSIPHQIHLGELHAILRRQEDFYPFLKDNREKIEKILTFRIPYYVGPLARGNSRFAWMTRKSEETITPWNFEEVVDKGASAQSFIERMTNFDKNLPNEKVLPKHSLLYEYFTVYNELTKVKYVTEGMRKPAFLSGEQKKAIVDLLFKTNRKVTVKQLKEDYFKKIECFDSVEISGVEDRFNASLGTYHDLLKIIKDKDFLDNEENEDILEDIVLTLTLFEDREMIEERLKTYAHLFDDKVMKQLKRRRYTGWGRLSRKLINGIRDKQSGKTILDFLKSDGFANRNFMQLIHDDSLTFKEDIQKAQVSGQGDSLHEHIANLAGSPAIKKGILQTVKVVDELVKVMGRHKPENIVIEMARENQTTQKGQKNSRERMKRIEEGIKELGSQILKEHPVENTQLQNEKLYLYYLQNGRDMYVDQELDINRLSDYDVDHIVPQSFLKDDSIDNKVLTRSDKARGKSDNVPSEEVVKKMKNYWRQLLNAKLITQRKFDNLTKAERGGLSELDKAGFIKRQLVETRQITKHVAQILDSRMNTKYDENDKLIREVKVITLKSKLVSDFRKDFQFYKVREINNYHHAHDAYLNAVVGTALIKKYPKLESEFVYGDYKVYDVRKMIAKSEQEIGKATAKYFFYSNIMNFFKTEITLANGEIRKRPLIETNGETGEIVWDKGRDFATVRKVLSMPQVNIVKKTEVQTGGFSKESILPKRNSDKLIARKKDWDPKKYGGFDSPTVAYSVLVVAKVEKGKSKKLKSVKELLGITIMERSSFEKNPIDFLEAKGYKEVKKDLIIKLPKYSLFELENGRKRMLASAGELQKGNELALPSKYVNFLYLASHYEKLKGSPEDNEQKQLFVEQHKHYLDEIIEQISEFSKRVILADANLDKVLSAYNKHRDKPIREQAENIIHLFTLTNLGAPAAFKYFDTTIDRKRYTSTKEVLDATLIHQSITGLYETRIDLSQLGGDGGGGGGGGGGTLNLEDEYRLYETSAEPEVSPGSTWLSDFPQAWAETGGMGLAVRQAPLIIPLKATSTPVSIKQYPMSQEAKLGIKPHIQRLLDQGILVPCQSPWNTPLLPVKKPGTNDYRPVQDLREVNKRVEDIHPTVPNPYNLLSGLPPSHRWYTVLDLKDAFFCLRLHPTSQPLFAFEWRDPGMGISGQLTWTRLPQGFKNSPTLFNEALHRDLADFRIQHPDLILLQYVDDILLAATSELDCQQGTRALLLTLGNLGYRASAKKAQLCQKQVKYLGYLLKEGQRWLTEARKETVMGQPTPKTPRQLREFLGKAGFCRLFIPGFAEMAAPLYPLTKPGTLFNWGPDQQKAYQEIKQALLTAPALGLPDLTKPFELFVDEKQGYAKGVLTQKLGPWRRPVAYLSKKLDPVAAGWPPCLRMVAAIAVLRKDAGKLTMGQPLVILAPHAVEALVKQPPDRWLSNARMTHYQAMLLDTDRVQFGPVVALNPATLLPLPEEGAPHDCLEILAETHGTRPDLTDQPIPDADHTWYTDGSSFLQEGQRKAGAAVTTETEVIWARALPAGTSAQRAELIALTQALKMAEGKRLNVYTDSRYAFATAHIHGEIYRRRGWLTSEGREIKNKSEILALLKALFLPKRLSIIHCLGHQKGDSAEARGNRLADQAAREAAIKTPPDTSTLLAGKRTADGSEFEKRTADGSEFESPKKKAKVE

SEQ ID NO: 1874 - protein, 2094 aa, synthetic construct
MPAAKRVKLDGGDKKYSIGLDIGTNSVGWAVITDEYKVPSKKFKVLGNTDRHSIKKNLIGALLFDSGETAEATRLKRTARRRYTRRKNRICYLQEIFSNEMAKVDDSFFHRLEESFLVEEDKKHERHPIFGNIVDEVAYHEKYPTIYHLRKKLVDSTDKADLRLIYLALAHMIKFRGHFLIEGDLNPDNSDVDKLFIQLVQTYNQLFEENPINASGVDAKAILSARLSKSRRLENLIAQLPGEKKNGLFGNLIALSLGLTPNFKSNFDLAEDAKLQLSKDTYDDDLDNLLAQIGDQYADLFLAAKNLSDAILLSDILRVNTEITKAPLSASMIKRYDEHHQDLTLLKALVRQQLPEKYKEIFFDQSKNGYAGYIDGGASQEEFYKFIKPILEKMDGTEELLVKLNREDLLRKQRTFDNGSIPHQIHLGELHAILRRQEDFYPFLKDNREKIEKILTFRIPYYVGPLARGNSRFAWMTRKSEETITPWNFEEVVDKGASAQSFIERMTNFDKNLPNEKVLPKHSLLYEYFTVYNELTKVKYVTEGMRKPAFLSGEQKKAIVDLLFKTNRKVTVKQLKEDYFKKIECFDSVEISGVEDRFNASLGTYHDLLKIIKDKDFLDNEENEDILEDIVLTLTLFEDREMIEERLKTYAHLFDDKVMKQLKRRRYTGWGRLSRKLINGIRDKQSGKTILDFLKSDGFANRNFMQLIHDDSLTFKEDIQKAQVSGQGDSLHEHIANLAGSPAIKKGILQTVKVVDELVKVMGRHKPENIVIEMARENQTTQKGQKNSRERMKRIEEGIKELGSQILKEHPVENTQLQNEKLYLYYLQNGRDMYVDQELDINRLSDYDVDHIVPQSFLKDDSIDNKVLTRSDKARGKSDNVPSEEVVKKMKNYWRQLLNAKLITQRKFDNLTKAERGGLSELDKAGFIKRQLVETRQITKHVAQILDSRMNTKYDENDKLIREVKVITLKSKLVSDFRKDFQFYKVREINNYHHAHDAYLNAVVGTALIKKYPKLESEFVYGDYKVYDVRKMIAKSEQEIGKATAKYFFYSNIMNFFKTEITLANGEIRKRPLIETNGETGEIVWDKGRDFATVRKVLSMPQVNIVKKTEVQTGGFSKESILPKRNSDKLIARKKDWDPKKYGGFDSPTVAYSVLVVAKVEKGKSKKLKSVKELLGITIMERSSFEKNPIDFLEAKGYKEVKKDLIIKLPKYSLFELENGRKRMLASAGELQKGNELALPSKYVNFLYLASHYEKLKGSPEDNEQKQLFVEQHKHYLDEIIEQISEFSKRVILADANLDKVLSAYNKHRDKPIREQAENIIHLFTLTNLGAPAAFKYFDTTIDRKRYTSTKEVLDATLIHQSITGLYETRIDLSQLGGDGGGSSPAPGGGGGTLNLEDEYRLYETSAEPEVSPGSTWLSDFPQAWAETGGMGLAVRQAPLIIPLKATSTPVSIKQYPMSQEAKLGIKPHIQRLLDQGILVPCQSPWNTPLLPVKKPGTNDYRPVQDLREVNKRVEDIHPTVPNPYNLLSGLPPSHRWYTVLDLKDAFFCLRLHPTSQPLFAFEWRDPGMGISGQLTWTRLPQGFKNSPTLFNEALHRDLADFRIQHPDLILLQYVDDILLAATSELDCQQGTRALLLTLGNLGYRASAKKAQLCQKQVKYLGYLLKEGQRWLTEARKETVMGQPTPKTPRQLREFLGKAGFCRLFIPGFAEMAAPLYPLTKPGTLFNWGPDQQKAYQEIKQALLTAPALGLPDLTKPFELFVDEKQGYAKGVLTQKLGPWRRPVAYLSKKLDPVAAGWPPCLRMVAAIAVLRKDAGKLTMGQPLVILAPHAVEALVKQPPDRWLSNARMTHYQAMLLDTDRVQFGPVVALNPATLLPLPEEGAPHDCLEILAETHGTRPDLTDQPIPDADHTWYTDGSSFLQEGQRKAGAAVTTETEVIWARALPAGTSAQRAELIALTQALKMAEGKRLNVYTDSRYAFATAHIHGEIYRRRGWLTSEGREIKNKSEILALLKALFLPKRLSIIHCLGHQKGDSAEARGNRLADQAAREAAIKTPPDTSTLLAGKRTADGSEFEKRTADGSEFESPKKKAKVE

SEQ ID NO: 1875 - protein, 2096 aa, synthetic construct
MPAAKRVKLDGGDKKYSIGLDIGTNSVGWAVITDEYKVPSKKFKVLGNTDRHSIKKNLIGALLFDSGETAEATRLKRTARRRYTRRKNRICYLQEIFSNEMAKVDDSFFHRLEESFLVEEDKKHERHPIFGNIVDEVAYHEKYPTIYHLRKKLVDSTDKADLRLIYLALAHMIKFRGHFLIEGDLNPDNSDVDKLFIQLVQTYNQLFEENPINASGVDAKAILSARLSKSRRLENLIAQLPGEKKNGLFGNLIALSLGLTPNFKSNFDLAEDAKLQLSKDTYDDDLDNLLAQIGDQYADLFLAAKNLSDAILLSDILRVNTEITKAPLSASMIKRYDEHHQDLTLLKALVRQQLPEKYKEIFFDQSKNGYAGYIDGGASQEEFYKFIKPILEKMDGTEELLVKLNREDLLRKQRTFDNGSIPHQIHLGELHAILRRQEDFYPFLKDNREKIEKILTFRIPYYVGPLARGNSRFAWMTRKSEETITPWNFEEVVDKGASAQSFIERMTNFDKNLPNEKVLPKHSLLYEYFTVYNELTKVKYVTEGMRKPAFLSGEQKKAIVDLLFKTNRKVTVKQLKEDYFKKIECFDSVEISGVEDRFNASLGTYHDLLKIIKDKDFLDNEENEDILEDIVLTLTLFEDREMIEERLKTYAHLFDDKVMKQLKRRRYTGWGRLSRKLINGIRDKQSGKTILDFLKSDGFANRNFMQLIHDDSLTFKEDIQKAQVSGQGDSLHEHIANLAGSPAIKKGILQTVKVVDELVKVMGRHKPENIVIEMARENQTTQKGQKNSRERMKRIEEGIKELGSQILKEHPVENTQLQNEKLYLYYLQNGRDMYVDQELDINRLSDYDVDHIVPQSFLKDDSIDNKVLTRSDKARGKSDNVPSEEVVKKMKNYWRQLLNAKLITQRKFDNLTKAERGGLSELDKAGFIKRQLVETRQITKHVAQILDSRMNTKYDENDKLIREVKVITLKSKLVSDFRKDFQFYKVREINNYHHAHDAYLNAVVGTALIKKYPKLESEFVYGDYKVYDVRKMIAKSEQEIGKATAKYFFYSNIMNFFKTEITLANGEIRKRPLIETNGETGEIVWDKGRDFATVRKVLSMPQVNIVKKTEVQTGGFSKESILPKRNSDKLIARKKDWDPKKYGGFDSPTVAYSVLVVAKVEKGKSKKLKSVKELLGITIMERSSFEKNPIDFLEAKGYKEVKKDLIIKLPKYSLFELENGRKRMLASAGELQKGNELALPSKYVNFLYLASHYEKLKGSPEDNEQKQLFVEQHKHYLDEIIEQISEFSKRVILADANLDKVLSAYNKHRDKPIREQAENIIHLFTLTNLGAPAAFKYFDTTIDRKRYTSTKEVLDATLIHQSITGLYETRIDLSQLGGDGGGSSGGGEAAAKGGTLNLEDEYRLYETSAEPEVSPGSTWLSDFPQAWAETGGMGLAVRQAPLIIPLKATSTPVSIKQYPMSQEAKLGIKPHIQRLLDQGILVPCQSPWNTPLLPVKKPGTNDYRPVQDLREVNKRVEDIHPTVPNPYNLLSGLPPSHRWYTVLDLKDAFFCLRLHPTSQPLFAFEWRDPGMGISGQLTWTRLPQGFKNSPTLFNEALHRDLADFRIQHPDLILLQYVDDILLAATSELDCQQGTRALLLTLGNLGYRASAKKAQLCQKQVKYLGYLLKEGQRWLTEARKETVMGQPTPKTPRQLREFLGKAGFCRLFIPGFAEMAAPLYPLTKPGTLFNWGPDQQKAYQEIKQALLTAPALGLPDLTKPFELFVDEKQGYAKGVLTQKLGPWRRPVAYLSKKLDPVAAGWPPCLRMVAAIAVLRKDAGKLTMGQPLVILAPHAVEALVKQPPDRWLSNARMTHYQAMLLDTDRVQFGPVVALNPATLLPLPEEGAPHDCLEILAETHGTRPDLTDQPIPDADHTWYTDGSSFLQEGQRKAGAAVTTETEVIWARALPAGTSAQRAELIALTQALKMAEGKRLNVYTDSRYAFATAHIHGEIYRRRGWLTSEGREIKNKSEILALLKALFLPKRLSIIHCLGHQKGDSAEARGNRLADQAAREAAIKTPPDTSTLLAGKRTADGSEFEKRTADGSEFESPKKKAKVE

SEQ ID NO: 1876 - protein, 2105 aa, synthetic construct
MPAAKRVKLDGGDKKYSIGLDIGTNSVGWAVITDEYKVPSKKFKVLGNTDRHSIKKNLIGALLFDSGETAEATRLKRTARRRYTRRKNRICYLQEIFSNEMAKVDDSFFHRLEESFLVEEDKKHERHPIFGNIVDEVAYHEKYPTIYHLRKKLVDSTDKADLRLIYLALAHMIKFRGHFLIEGDLNPDNSDVDKLFIQLVQTYNQLFEENPINASGVDAKAILSARLSKSRRLENLIAQLPGEKKNGLFGNLIALSLGLTPNFKSNFDLAEDAKLQLSKDTYDDDLDNLLAQIGDQYADLFLAAKNLSDAILLSDILRVNTEITKAPLSASMIKRYDEHHQDLTLLKALVRQQLPEKYKEIFFDQSKNGYAGYIDGGASQEEFYKFIKPILEKMDGTEELLVKLNREDLLRKQRTFDNGSIPHQIHLGELHAILRRQEDFYPFLKDNREKIEKILTFRIPYYVGPLARGNSRFAWMTRKSEETITPWNFEEVVDKGASAQSFIERMTNFDKNLPNEKVLPKHSLLYEYFTVYNELTKVKYVTEGMRKPAFLSGEQKKAIVDLLFKTNRKVTVKQLKEDYFKKIECFDSVEISGVEDRFNASLGTYHDLLKIIKDKDFLDNEENEDILEDIVLTLTLFEDREMIEERLKTYAHLFDDKVMKQLKRRRYTGWGRLSRKLINGIRDKQSGKTILDFLKSDGFANRNFMQLIHDDSLTFKEDIQKAQVSGQGDSLHEHIANLAGSPAIKKGILQTVKVVDELVKVMGRHKPENIVIEMARENQTTQKGQKNSRERMKRIEEGIKELGSQILKEHPVENTQLQNEKLYLYYLQNGRDMYVDQELDINRLSDYDVDHIVPQSFLKDDSIDNKVLTRSDKARGKSDNVPSEEVVKKMKNYWRQLLNAKLITQRKFDNLTKAERGGLSELDKAGFIKRQLVETRQITKHVAQILDSRMNTKYDENDKLIREVKVITLKSKLVSDFRKDFQFYKVREINNYHHAHDAYLNAVVGTALIKKYPKLESEFVYGDYKVYDVRKMIAKSEQEIGKATAKYFFYSNIMNFFKTEITLANGEIRKRPLIETNGETGEIVWDKGRDFATVRKVLSMPQVNIVKKTEVQTGGFSKESILPKRNSDKLIARKKDWDPKKYGGFDSPTVAYSVLVVAKVEKGKSKKLKSVKELLGITIMERSSFEKNPIDFLEAKGYKEVKKDLIIKLPKYSLFELENGRKRMLASAGELQKGNELALPSKYVNFLYLASHYEKLKGSPEDNEQKQLFVEQHKHYLDEIIEQISEFSKRVILADANLDKVLSAYNKHRDKPIREQAENIIHLFTLTNLGAPAAFKYFDTTIDRKRYTSTKEVLDATLIHQSITGLYETRIDLSQLGGDGGGGGGSGGGGSGGGGSGGGGSGGTLNLEDEYRLYETSAEPEVSPGSTWLSDFPQAWAETGGMGLAVRQAPLIIPLKATSTPVSIKQYPMSQEAKLGIKPHIQRLLDQGILVPCQSPWNTPLLPVKKPGTNDYRPVQDLREVNKRVEDIHPTVPNPYNLLSGLPPSHRWYTVLDLKDAFFCLRLHPTSQPLFAFEWRDPGMGISGQLTWTRLPQGFKNSPTLFNEALHRDLADFRIQHPDLILLQYVDDILLAATSELDCQQGTRALLLTLGNLGYRASAKKAQLCQKQVKYLGYLLKEGQRWLTEARKETVMGQPTPKTPRQLREFLGKAGFCRLFIPGFAEMAAPLYPLTKPGTLFNWGPDQQKAYQEIKQALLTAPALGLPDLTKPFELFVDEKQGYAKGVLTQKLGPWRRPVAYLSKKLDPVAAGWPPCLRMVAAIAVLRKDAGKLTMGQPLVILAPHAVEALVKQPPDRWLSNARMTHYQAMLLDTDRVQFGPVVALNPATLLPLPEEGAPHDCLEILAETHGTRPDLTDQPIPDADHTWYTDGSSFLQEGQRKAGAAVTTETEVIWARALPAGTSAQRAELIALTQALKMAEGKRLNVYTDSRYAFATAHIHGEIYRRRGWLTSEGREIKNKSEILALLKALFLPKRLSIIHCLGHQKGDSAEARGNRLADQAAREAAIKTPPDTSTLLAGKRTADGSEFEKRTADGSEFESPKKKAKVE

SEQ ID NO: 1877 - protein, 2097 aa, synthetic construct
MPAAKRVKLDGGDKKYSIGLDIGTNSVGWAVITDEYKVPSKKFKVLGNTDRHSIKKNLIGALLFDSGETAEATRLKRTARRRYTRRKNRICYLQEIFSNEMAKVDDSFFHRLEESFLVEEDKKHERHPIFGNIVDEVAYHEKYPTIYHLRKKLVDSTDKADLRLIYLALAHMIKFRGHFLIEGDLNPDNSDVDKLFIQLVQTYNQLFEENPINASGVDAKAILSARLSKSRRLENLIAQLPGEKKNGLFGNLIALSLGLTPNFKSNFDLAEDAKLQLSKDTYDDDLDNLLAQIGDQYADLFLAAKNLSDAILLSDILRVNTEITKAPLSASMIKRYDEHHQDLTLLKALVRQQLPEKYKEIFFDQSKNGYAGYIDGGASQEEFYKFIKPILEKMDGTEELLVKLNREDLLRKQRTFDNGSIPHQIHLGELHAILRRQEDFYPFLKDNREKIEKILTFRIPYYVGPLARGNSRFAWMTRKSEETITPWNFEEVVDKGASAQSFIERMTNFDKNLPNEKVLPKHSLLYEYFTVYNELTKVKYVTEGMRKPAFLSGEQKKAIVDLLFKTNRKVTVKQLKEDYFKKIECFDSVEISGVEDRFNASLGTYHDLLKIIKDKDFLDNEENEDILEDIVLTLTLFEDREMIEERLKTYAHLFDDKVMKQLKRRRYTGWGRLSRKLINGIRDKQSGKTILDFLKSDGFANRNFMQLIHDDSLTFKEDIQKAQVSGQGDSLHEHIANLAGSPAIKKGILQTVKVVDELVKVMGRHKPENIVIEMARENQTTQKGQKNSRERMKRIEEGIKELGSQILKEHPVENTQLQNEKLYLYYLQNGRDMYVDQELDINRLSDYDVDHIVPQSFLKDDSIDNKVLTRSDKARGKSDNVPSEEVVKKMKNYWRQLLNAKLITQRKFDNLTKAERGGLSELDKAGFIKRQLVETRQITKHVAQILDSRMNTKYDENDKLIREVKVITLKSKLVSDFRKDFQFYKVREINNYHHAHDAYLNAVVGTALIKKYPKLESEFVYGDYKVYDVRKMIAKSEQEIGKATAKYFFYSNIMNFFKTEITLANGEIRKRPLIETNGETGEIVWDKGRDFATVRKVLSMPQVNIVKKTEVQTGGFSKESILPKRNSDKLIARKKDWDPKKYGGFDSPTVAYSVLVVAKVEKGKSKKLKSVKELLGITIMERSSFEKNPIDFLEAKGYKEVKKDLIIKLPKYSLFELENGRKRMLASAGELQKGNELALPSKYVNFLYLASHYEKLKGSPEDNEQKQLFVEQHKHYLDEIIEQISEFSKRVILADANLDKVLSAYNKHRDKPIREQAENIIHLFTLTNLGAPAAFKYFDTTIDRKRYTSTKEVLDATLIHQSITGLYETRIDLSQLGGDGGGSSGSSGSSGSSGGTLNLEDEYRLYETSAEPEVSPGSTWLSDFPQAWAETGGMGLAVRQAPLIIPLKATSTPVSIKQYPMSQEAKLGIKPHIQRLLDQGILVPCQSPWNTPLLPVKKPGTNDYRPVQDLREVNKRVEDIHPTVPNPYNLLSGLPPSHRWYTVLDLKDAFFCLRLHPTSQPLFAFEWRDPGMGISGQLTWTRLPQGFKNSPTLFNEALHRDLADFRIQHPDLILLQYVDDILLAATSELDCQQGTRALLLTLGNLGYRASAKKAQLCQKQVKYLGYLLKEGQRWLTEARKETVMGQPTPKTPRQLREFLGKAGFCRLFIPGFAEMAAPLYPLTKPGTLFNWGPDQQKAYQEIKQALLTAPALGLPDLTKPFELFVDEKQGYAKGVLTQKLGPWRRPVAYLSKKLDPVAAGWPPCLRMVAAIAVLRKDAGKLTMGQPLVILAPHAVEALVKQPPDRWLSNARMTHYQAMLLDTDRVQFGPVVALNPATLLPLPEEGAPHDCLEILAETHGTRPDLTDQPIPDADHTWYTDGSSFLQEGQRKAGAAVTTETEVIWARALPAGTSAQRAELIALTQALKMAEGKRLNVYTDSRYAFATAHIHGEIYRRRGWLTSEGREIKNKSEILALLKALFLPKRLSIIHCLGHQKGDSAEARGNRLADQAAREAAIKTPPDTSTLLAGKRTADGSEFEKRTADGSEFESPKKKAKVE

SEQ ID NO: 1878 - protein, 2096 aa, synthetic construct
MPAAKRVKLDGGDKKYSIGLDIGTNSVGWAVITDEYKVPSKKFKVLGNTDRHSIKKNLIGALLFDSGETAEATRLKRTARRRYTRRKNRICYLQEIFSNEMAKVDDSFFHRLEESFLVEEDKKHERHPIFGNIVDEVAYHEKYPTIYHLRKKLVDSTDKADLRLIYLALAHMIKFRGHFLIEGDLNPDNSDVDKLFIQLVQTYNQLFEENPINASGVDAKAILSARLSKSRRLENLIAQLPGEKKNGLFGNLIALSLGLTPNFKSNFDLAEDAKLQLSKDTYDDDLDNLLAQIGDQYADLFLAAKNLSDAILLSDILRVNTEITKAPLSASMIKRYDEHHQDLTLLKALVRQQLPEKYKEIFFDQSKNGYAGYIDGGASQEEFYKFIKPILEKMDGTEELLVKLNREDLLRKQRTFDNGSIPHQIHLGELHAILRRQEDFYPFLKDNREKIEKILTFRIPYYVGPLARGNSRFAWMTRKSEETITPWNFEEVVDKGASAQSFIERMTNFDKNLPNEKVLPKHSLLYEYFTVYNELTKVKYVTEGMRKPAFLSGEQKKAIVDLLFKTNRKVTVKQLKEDYFKKIECFDSVEISGVEDRFNASLGTYHDLLKIIKDKDFLDNEENEDILEDIVLTLTLFEDREMIEERLKTYAHLFDDKVMKQLKRRRYTGWGRLSRKLINGIRDKQSGKTILDFLKSDGFANRNFMQLIHDDSLTFKEDIQKAQVSGQGDSLHEHIANLAGSPAIKKGILQTVKVVDELVKVMGRHKPENIVIEMARENQTTQKGQKNSRERMKRIEEGIKELGSQILKEHPVENTQLQNEKLYLYYLQNGRDMYVDQELDINRLSDYDVDHIVPQSFLKDDSIDNKVLTRSDKARGKSDNVPSEEVVKKMKNYWRQLLNAKLITQRKFDNLTKAERGGLSELDKAGFIKRQLVETRQITKHVAQILDSRMNTKYDENDKLIREVKVITLKSKLVSDFRKDFQFYKVREINNYHHAHDAYLNAVVGTALIKKYPKLESEFVYGDYKVYDVRKMIAKSEQEIGKATAKYFFYSNIMNFFKTEITLANGEIRKRPLIETNGETGEIVWDKGRDFATVRKVLSMPQVNIVKKTEVQTGGFSKESILPKRNSDKLIARKKDWDPKKYGGFDSPTVAYSVLVVAKVEKGKSKKLKSVKELLGITIMERSSFEKNPIDFLEAKGYKEVKKDLIIKLPKYSLFELENGRKRMLASAGELQKGNELALPSKYVNFLYLASHYEKLKGSPEDNEQKQLFVEQHKHYLDEIIEQISEFSKRVILADANLDKVLSAYNKHRDKPIREQAENIIHLFTLTNLGAPAAFKYFDTTIDRKRYTSTKEVLDATLIHQSITGLYETRIDLSQLGGDGGGGGEAAAKGSSGGTLNLEDEYRLYETSAEPEVSPGSTWLSDFPQAWAETGGMGLAVRQAPLIIPLKATSTPVSIKQYPMSQEAKLGIKPHIQRLLDQGILVPCQSPWNTPLLPVKKPGTNDYRPVQDLREVNKRVEDIHPTVPNPYNLLSGLPPSHRWYTVLDLKDAFFCLRLHPTSQPLFAFEWRDPGMGISGQLTWTRLPQGFKNSPTLFNEALHRDLADFRIQHPDLILLQYVDDILLAATSELDCQQGTRALLLTLGNLGYRASAKKAQLCQKQVKYLGYLLKEGQRWLTEARKETVMGQPTPKTPRQLREFLGKAGFCRLFIPGFAEMAAPLYPLTKPGTLFNWGPDQQKAYQEIKQALLTAPALGLPDLTKPFELFVDEKQGYAKGVLTQKLGPWRRPVAYLSKKLDPVAAGWPPCLRMVAAIAVLRKDAGKLTMGQPLVILAPHAVEALVKQPPDRWLSNARMTHYQAMLLDTDRVQFGPVVALNPATLLPLPEEGAPHDCLEILAETHGTRPDLTDQPIPDADHTWYTDGSSFLQEGQRKAGAAVTTETEVIWARALPAGTSAQRAELIALTQALKMAEGKRLNVYTDSRYAFATAHIHGEIYRRRGWLTSEGREIKNKSEILALLKALFLPKRLSIIHCLGHQKGDSAEARGNRLADQAAREAAIKTPPDTSTLLAGKRTADGSEFEKRTADGSEFESPKKKAKVE

SEQ ID NO: 1879 - protein, 2100 aa, synthetic construct
MPAAKRVKLDGGDKKYSIGLDIGTNSVGWAVITDEYKVPSKKFKVLGNTDRHSIKKNLIGALLFDSGETAEATRLKRTARRRYTRRKNRICYLQEIFSNEMAKVDDSFFHRLEESFLVEEDKKHERHPIFGNIVDEVAYHEKYPTIYHLRKKLVDSTDKADLRLIYLALAHMIKFRGHFLIEGDLNPDNSDVDKLFIQLVQTYNQLFEENPINASGVDAKAILSARLSKSRRLENLIAQLPGEKKNGLFGNLIALSLGLTPNFKSNFDLAEDAKLQLSKDTYDDDLDNLLAQIGDQYADLFLAAKNLSDAILLSDILRVNTEITKAPLSASMIKRYDEHHQDLTLLKALVRQQLPEKYKEIFFDQSKNGYAGYIDGGASQEEFYKFIKPILEKMDGTEELLVKLNREDLLRKQRTFDNGSIPHQIHLGELHAILRRQEDFYPFLKDNREKIEKILTFRIPYYVGPLARGNSRFAWMTRKSEETITPWNFEEVVDKGASAQSFIERMTNFDKNLPNEKVLPKHSLLYEYFTVYNELTKVKYVTEGMRKPAFLSGEQKKAIVDLLFKTNRKVTVKQLKEDYFKKIECFDSVEISGVEDRFNASLGTYHDLLKIIKDKDFLDNEENEDILEDIVLTLTLFEDREMIEERLKTYAHLFDDKVMKQLKRRRYTGWGRLSRKLINGIRDKQSGKTILDFLKSDGFANRNFMQLIHDDSLTFKEDIQKAQVSGQGDSLHEHIANLAGSPAIKKGILQTVKVVDELVKVMGRHKPENIVIEMARENQTTQKGQKNSRERMKRIEEGIKELGSQILKEHPVENTQLQNEKLYLYYLQNGRDMYVDQELDINRLSDYDVDHIVPQSFLKDDSIDNKVLTRSDKARGKSDNVPSEEVVKKMKNYWRQLLNAKLITQRKFDNLTKAERGGLSELDKAGFIKRQLVETRQITKHVAQILDSRMNTKYDENDKLIREVKVITLKSKLVSDFRKDFQFYKVREINNYHHAHDAYLNAVVGTALIKKYPKLESEFVYGDYKVYDVRKMIAKSEQEIGKATAKYFFYSNIMNFFKTEITLANGEIRKRPLIETNGETGEIVWDKGRDFATVRKVLSMPQVNIVKKTEVQTGGFSKESILPKRNSDKLIARKKDWDPKKYGGFDSPTVAYSVLVVAKVEKGKSKKLKSVKELLGITIMERSSFEKNPIDFLEAKGYKEVKKDLIIKLPKYSLFELENGRKRMLASAGELQKGNELALPSKYVNFLYLASHYEKLKGSPEDNEQKQLFVEQHKHYLDEIIEQISEFSKRVILADANLDKVLSAYNKHRDKPIREQAENIIHLFTLTNLGAPAAFKYFDTTIDRKRYTSTKEVLDATLIHQSITGLYETRIDLSQLGGDGGEAAAKEAAAKEAAAKGGTLNLEDEYRLYETSAEPEVSPGSTWLSDFPQAWAETGGMGLAVRQAPLIIPLKATSTPVSIKQYPMSQEAKLGIKPHIQRLLDQGILVPCQSPWNTPLLPVKKPGTNDYRPVQDLREVNKRVEDIHPTVPNPYNLLSGLPPSHRWYTVLDLKDAFFCLRLHPTSQPLFAFEWRDPGMGISGQLTWTRLPQGFKNSPTLFNEALHRDLADFRIQHPDLILLQYVDDILLAATSELDCQQGTRALLLTLGNLGYRASAKKAQLCQKQVKYLGYLLKEGQRWLTEARKETVMGQPTPKTPRQLREFLGKAGFCRLFIPGFAEMAAPLYPLTKPGTLFNWGPDQQKAYQEIKQALLTAPALGLPDLTKPFELFVDEKQGYAKGVLTQKLGPWRRPVAYLSKKLDPVAAGWPPCLRMVAAIAVLRKDAGKLTMGQPLVILAPHAVEALVKQPPDRWLSNARMTHYQAMLLDTDRVQFGPVVALNPATLLPLPEEGAPHDCLEILAETHGTRPDLTDQPIPDADHTWYTDGSSFLQEGQRKAGAAVTTETEVIWARALPAGTSAQRAELIALTQALKMAEGKRLNVYTDSRYAFATAHIHGEIYRRRGWLTSEGREIKNKSEILALLKALFLPKRLSIIHCLGHQKGDSAEARGNRLADQAAREAAIKTPPDTSTLLAGKRTADGSEFEKRTADGSEFESPKKKAKVE

SEQ ID NO: 1880 - protein, 2103 aa, synthetic construct
MPAAKRVKLDGGDKKYSIGLDIGTNSVGWAVITDEYKVPSKKFKVLGNTDRHSIKKNLIGALLFDSGETAEATRLKRTARRRYTRRKNRICYLQEIFSNEMAKVDDSFFHRLEESFLVEEDKKHERHPIFGNIVDEVAYHEKYPTIYHLRKKLVDSTDKADLRLIYLALAHMIKFRGHFLIEGDLNPDNSDVDKLFIQLVQTYNQLFEENPINASGVDAKAILSARLSKSRRLENLIAQLPGEKKNGLFGNLIALSLGLTPNFKSNFDLAEDAKLQLSKDTYDDDLDNLLAQIGDQYADLFLAAKNLSDAILLSDILRVNTEITKAPLSASMIKRYDEHHQDLTLLKALVRQQLPEKYKEIFFDQSKNGYAGYIDGGASQEEFYKFIKPILEKMDGTEELLVKLNREDLLRKQRTFDNGSIPHQIHLGELHAILRRQEDFYPFLKDNREKIEKILTFRIPYYVGPLARGNSRFAWMTRKSEETITPWNFEEVVDKGASAQSFIERMTNFDKNLPNEKVLPKHSLLYEYFTVYNELTKVKYVTEGMRKPAFLSGEQKKAIVDLLFKTNRKVTVKQLKEDYFKKIECFDSVEISGVEDRFNASLGTYHDLLKIIKDKDFLDNEENEDILEDIVLTLTLFEDREMIEERLKTYAHLFDDKVMKQLKRRRYTGWGRLSRKLINGIRDKQSGKTILDFLKSDGFANRNFMQLIHDDSLTFKEDIQKAQVSGQGDSLHEHIANLAGSPAIKKGILQTVKVVDELVKVMGRHKPENIVIEMARENQTTQKGQKNSRERMKRIEEGIKELGSQILKEHPVENTQLQNEKLYLYYLQNGRDMYVDQELDINRLSDYDVDHIVPQSFLKDDSIDNKVLTRSDKARGKSDNVPSEEVVKKMKNYWRQLLNAKLITQRKFDNLTKAERGGLSELDKAGFIKRQLVETRQITKHVAQILDSRMNTKYDENDKLIREVKVITLKSKLVSDFRKDFQFYKVREINNYHHAHDAYLNAVVGTALIKKYPKLESEFVYGDYKVYDVRKMIAKSEQEIGKATAKYFFYSNIMNFFKTEITLANGEIRKRPLIETNGETGEIVWDKGRDFATVRKVLSMPQVNIVKKTEVQTGGFSKESILPKRNSDKLIARKKDWDPKKYGGFDSPTVAYSVLVVAKVEKGKSKKLKSVKELLGITIMERSSFEKNPIDFLEAKGYKEVKKDLIIKLPKYSLFELENGRKRMLASAGELQKGNELALPSKYVNFLYLASHYEKLKGSPEDNEQKQLFVEQHKHYLDEIIEQISEFSKRVILADANLDKVLSAYNKHRDKPIREQAENIIHLFTLTNLGAPAAFKYFDTTIDRKRYTSTKEVLDATLIHQSITGLYETRIDLSQLGGDGGGGSGGSGGSGGSGGSGGSGGTLNLEDEYRLYETSAEPEVSPGSTWLSDFPQAWAETGGMGLAVRQAPLIIPLKATSTPVSIKQYPMSQEAKLGIKPHIQRLLDQGILVPCQSPWNTPLLPVKKPGTNDYRPVQDLREVNKRVEDIHPTVPNPYNLLSGLPPSHRWYTVLDLKDAFFCLRLHPTSQPLFAFEWRDPGMGISGQLTWTRLPQGFKNSPTLFNEALHRDLADFRIQHPDLILLQYVDDILLAATSELDCQQGTRALLLTLGNLGYRASAKKAQLCQKQVKYLGYLLKEGQRWLTEARKETVMGQPTPKTPRQLREFLGKAGFCRLFIPGFAEMAAPLYPLTKPGTLFNWGPDQQKAYQEIKQALLTAPALGLPDLTKPFELFVDEKQGYAKGVLTQKLGPWRRPVAYLSKKLDPVAAGWPPCLRMVAAIAVLRKDAGKLTMGQPLVILAPHAVEALVKQPPDRWLSNARMTHYQAMLLDTDRVQFGPVVALNPATLLPLPEEGAPHDCLEILAETHGTRPDLTDQPIPDADHTWYTDGSSFLQEGQRKAGAAVTTETEVIWARALPAGTSAQRAELIALTQALKMAEGKRLNVYTDSRYAFATAHIHGEIYRRRGWLTSEGREIKNKSEILALLKALFLPKRLSIIHCLGHQKGDSAEARGNRLADQAAREAAIKTPPDTSTLLAGKRTADGSEFEKRTADGSEFESPKKKAKVE

SEQ ID NO: 1881 - protein, 2094 aa, synthetic construct
MPAAKRVKLDGGDKKYSIGLDIGTNSVGWAVITDEYKVPSKKFKVLGNTDRHSIKKNLIGALLFDSGETAEATRLKRTARRRYTRRKNRICYLQEIFSNEMAKVDDSFFHRLEESFLVEEDKKHERHPIFGNIVDEVAYHEKYPTIYHLRKKLVDSTDKADLRLIYLALAHMIKFRGHFLIEGDLNPDNSDVDKLFIQLVQTYNQLFEENPINASGVDAKAILSARLSKSRRLENLIAQLPGEKKNGLFGNLIALSLGLTPNFKSNFDLAEDAKLQLSKDTYDDDLDNLLAQIGDQYADLFLAAKNLSDAILLSDILRVNTEITKAPLSASMIKRYDEHHQDLTLLKALVRQQLPEKYKEIFFDQSKNGYAGYIDGGASQEEFYKFIKPILEKMDGTEELLVKLNREDLLRKQRTFDNGSIPHQIHLGELHAILRRQEDFYPFLKDNREKIEKILTFRIPYYVGPLARGNSRFAWMTRKSEETITPWNFEEVVDKGASAQSFIERMTNFDKNLPNEKVLPKHSLLYEYFTVYNELTKVKYVTEGMRKPAFLSGEQKKAIVDLLFKTNRKVTVKQLKEDYFKKIECFDSVEISGVEDRFNASLGTYHDLLKIIKDKDFLDNEENEDILEDIVLTLTLFEDREMIEERLKTYAHLFDDKVMKQLKRRRYTGWGRLSRKLINGIRDKQSGKTILDFLKSDGFANRNFMQLIHDDSLTFKEDIQKAQVSGQGDSLHEHIANLAGSPAIKKGILQTVKVVDELVKVMGRHKPENIVIEMARENQTTQKGQKNSRERMKRIEEGIKELGSQILKEHPVENTQLQNEKLYLYYLQNGRDMYVDQELDINRLSDYDVDHIVPQSFLKDDSIDNKVLTRSDKARGKSDNVPSEEVVKKMKNYWRQLLNAKLITQRKFDNLTKAERGGLSELDKAGFIKRQLVETRQITKHVAQILDSRMNTKYDENDKLIREVKVITLKSKLVSDFRKDFQFYKVREINNYHHAHDAYLNAVVGTALIKKYPKLESEFVYGDYKVYDVRKMIAKSEQEIGKATAKYFFYSNIMNFFKTEITLANGEIRKRPLIETNGETGEIVWDKGRDFATVRKVLSMPQVNIVKKTEVQTGGFSKESILPKRNSDKLIARKKDWDPKKYGGFDSPTVAYSVLVVAKVEKGKSKKLKSVKELLGITIMERSSFEKNPIDFLEAKGYKEVKKDLIIKLPKYSLFELENGRKRMLASAGELQKGNELALPSKYVNFLYLASHYEKLKGSPEDNEQKQLFVEQHKHYLDEIIEQISEFSKRVILADANLDKVLSAYNKHRDKPIREQAENIIHLFTLTNLGAPAAFKYFDTTIDRKRYTSTKEVLDATLIHQSITGLYETRIDLSQLGGDGGPAPAPAPAPGGTLNLEDEYRLYETSAEPEVSPGSTWLSDFPQAWAETGGMGLAVRQAPLIIPLKATSTPVSIKQYPMSQEAKLGIKPHIQRLLDQGILVPCQSPWNTPLLPVKKPGTNDYRPVQDLREVNKRVEDIHPTVPNPYNLLSGLPPSHRWYTVLDLKDAFFCLRLHPTSQPLFAFEWRDPGMGISGQLTWTRLPQGFKNSPTLFNEALHRDLADFRIQHPDLILLQYVDDILLAATSELDCQQGTRALLLTLGNLGYRASAKKAQLCQKQVKYLGYLLKEGQRWLTEARKETVMGQPTPKTPRQLREFLGKAGFCRLFIPGFAEMAAPLYPLTKPGTLFNWGPDQQKAYQEIKQALLTAPALGLPDLTKPFELFVDEKQGYAKGVLTQKLGPWRRPVAYLSKKLDPVAAGWPPCLRMVAAIAVLRKDAGKLTMGQPLVILAPHAVEALVKQPPDRWLSNARMTHYQAMLLDTDRVQFGPVVALNPATLLPLPEEGAPHDCLEILAETHGTRPDLTDQPIPDADHTWYTDGSSFLQEGQRKAGAAVTTETEVIWARALPAGTSAQRAELIALTQALKMAEGKRLNVYTDSRYAFATAHIHGEIYRRRGWLTSEGREIKNKSEILALLKALFLPKRLSIIHCLGHQKGDSAEARGNRLADQAAREAAIKTPPDTSTLLAGKRTADGSEFEKRTADGSEFESPKKKAKVE

SEQ ID NO: 1882 - protein, 2093 aa, synthetic construct
MPAAKRVKLDGGDKKYSIGLDIGTNSVGWAVITDEYKVPSKKFKVLGNTDRHSIKKNLIGALLFDSGETAEATRLKRTARRRYTRRKNRICYLQEIFSNEMAKVDDSFFHRLEESFLVEEDKKHERHPIFGNIVDEVAYHEKYPTIYHLRKKLVDSTDKADLRLIYLALAHMIKFRGHFLIEGDLNPDNSDVDKLFIQLVQTYNQLFEENPINASGVDAKAILSARLSKSRRLENLIAQLPGEKKNGLFGNLIALSLGLTPNFKSNFDLAEDAKLQLSKDTYDDDLDNLLAQIGDQYADLFLAAKNLSDAILLSDILRVNTEITKAPLSASMIKRYDEHHQDLTLLKALVRQQLPEKYKEIFFDQSKNGYAGYIDGGASQEEFYKFIKPILEKMDGTEELLVKLNREDLLRKQRTFDNGSIPHQIHLGELHAILRRQEDFYPFLKDNREKIEKILTFRIPYYVGPLARGNSRFAWMTRKSEETITPWNFEEVVDKGASAQSFIERMTNFDKNLPNEKVLPKHSLLYEYFTVYNELTKVKYVTEGMRKPAFLSGEQKKAIVDLLFKTNRKVTVKQLKEDYFKKIECFDSVEISGVEDRFNASLGTYHDLLKIIKDKDFLDNEENEDILEDIVLTLTLFEDREMIEERLKTYAHLFDDKVMKQLKRRRYTGWGRLSRKLINGIRDKQSGKTILDFLKSDGFANRNFMQLIHDDSLTFKEDIQKAQVSGQGDSLHEHIANLAGSPAIKKGILQTVKVVDELVKVMGRHKPENIVIEMARENQTTQKGQKNSRERMKRIEEGIKELGSQILKEHPVENTQLQNEKLYLYYLQNGRDMYVDQELDINRLSDYDVDHIVPQSFLKDDSIDNKVLTRSDKARGKSDNVPSEEVVKKMKNYWRQLLNAKLITQRKFDNLTKAERGGLSELDKAGFIKRQLVETRQITKHVAQILDSRMNTKYDENDKLIREVKVITLKSKLVSDFRKDFQFYKVREINNYHHAHDAYLNAVVGTALIKKYPKLESEFVYGDYKVYDVRKMIAKSEQEIGKATAKYFFYSNIMNFFKTEITLANGEIRKRPLIETNGETGEIVWDKGRDFATVRKVLSMPQVNIVKKTEVQTGGFSKESILPKRNSDKLIARKKDWDPKKYGGFDSPTVAYSVLVVAKVEKGKSKKLKSVKELLGITIMERSSFEKNPIDFLEAKGYKEVKKDLIIKLPKYSLFELENGRKRMLASAGELQKGNELALPSKYVNFLYLASHYEKLKGSPEDNEQKQLFVEQHKHYLDEIIEQISEFSKRVILADANLDKVLSAYNKHRDKPIREQAENIIHLFTLTNLGAPAAFKYFDTTIDRKRYTSTKEVLDATLIHQSITGLYETRIDLSQLGGDGGEAAAKGGSGGTLNLEDEYRLYETSAEPEVSPGSTWLSDFPQAWAETGGMGLAVRQAPLIIPLKATSTPVSIKQYPMSQEAKLGIKPHIQRLLDQGILVPCQSPWNTPLLPVKKPGTNDYRPVQDLREVNKRVEDIHPTVPNPYNLLSGLPPSHRWYTVLDLKDAFFCLRLHPTSQPLFAFEWRDPGMGISGQLTWTRLPQGFKNSPTLFNEALHRDLADFRIQHPDLILLQYVDDILLAATSELDCQQGTRALLLTLGNLGYRASAKKAQLCQKQVKYLGYLLKEGQRWLTEARKETVMGQPTPKTPRQLREFLGKAGFCRLFIPGFAEMAAPLYPLTKPGTLFNWGPDQQKAYQEIKQALLTAPALGLPDLTKPFELFVDEKQGYAKGVLTQKLGPWRRPVAYLSKKLDPVAAGWPPCLRMVAAIAVLRKDAGKLTMGQPLVILAPHAVEALVKQPPDRWLSNARMTHYQAMLLDTDRVQFGPVVALNPATLLPLPEEGAPHDCLEILAETHGTRPDLTDQPIPDADHTWYTDGSSFLQEGQRKAGAAVTTETEVIWARALPAGTSAQRAELIALTQALKMAEGKRLNVYTDSRYAFATAHIHGEIYRRRGWLTSEGREIKNKSEILALLKALFLPKRLSIIHCLGHQKGDSAEARGNRLADQAAREAAIKTPPDTSTLLAGKRTADGSEFEKRTADGSEFESPKKKAKVE

SEQ ID NO: 1883 - protein, 2094 aa, synthetic construct
MPAAKRVKLDGGDKKYSIGLDIGTNSVGWAVITDEYKVPSKKFKVLGNTDRHSIKKNLIGALLFDSGETAEATRLKRTARRRYTRRKNRICYLQEIFSNEMAKVDDSFFHRLEESFLVEEDKKHERHPIFGNIVDEVAYHEKYPTIYHLRKKLVDSTDKADLRLIYLALAHMIKFRGHFLIEGDLNPDNSDVDKLFIQLVQTYNQLFEENPINASGVDAKAILSARLSKSRRLENLIAQLPGEKKNGLFGNLIALSLGLTPNFKSNFDLAEDAKLQLSKDTYDDDLDNLLAQIGDQYADLFLAAKNLSDAILLSDILRVNTEITKAPLSASMIKRYDEHHQDLTLLKALVRQQLPEKYKEIFFDQSKNGYAGYIDGGASQEEFYKFIKPILEKMDGTEELLVKLNREDLLRKQRTFDNGSIPHQIHLGELHAILRRQEDFYPFLKDNREKIEKILTFRIPYYVGPLARGNSRFAWMTRKSEETITPWNFEEVVDKGASAQSFIERMTNFDKNLPNEKVLPKHSLLYEYFTVYNELTKVKYVTEGMRKPAFLSGEQKKAIVDLLFKTNRKVTVKQLKEDYFKKIECFDSVEISGVEDRFNASLGTYHDLLKIIKDKDFLDNEENEDILEDIVLTLTLFEDREMIEERLKTYAHLFDDKVMKQLKRRRYTGWGRLSRKLINGIRDKQSGKTILDFLKSDGFANRNFMQLIHDDSLTFKEDIQKAQVSGQGDSLHEHIANLAGSPAIKKGILQTVKVVDELVKVMGRHKPENIVIEMARENQTTQKGQKNSRERMKRIEEGIKELGSQILKEHPVENTQLQNEKLYLYYLQNGRDMYVDQELDINRLSDYDVDHIVPQSFLKDDSIDNKVLTRSDKARGKSDNVPSEEVVKKMKNYWRQLLNAKLITQRKFDNLTKAERGGLSELDKAGFIKRQLVETRQITKHVAQILDSRMNTKYDENDKLIREVKVITLKSKLVSDFRKDFQFYKVREINNYHHAHDAYLNAVVGTALIKKYPKLESEFVYGDYKVYDVRKMIAKSEQEIGKATAKYFFYSNIMNFFKTEITLANGEIRKRPLIETNGETGEIVWDKGRDFATVRKVLSMPQVNIVKKTEVQTGGFSKESILPKRNSDKLIARKKDWDPKKYGGFDSPTVAYSVLVVAKVEKGKSKKLKSVKELLGITIMERSSFEKNPIDFLEAKGYKEVKKDLIIKLPKYSLFELENGRKRMLASAGELQKGNELALPSKYVNFLYLASHYEKLKGSPEDNEQKQLFVEQHKHYLDEIIEQISEFSKRVILADANLDKVLSAYNKHRDKPIREQAENIIHLFTLTNLGAPAAFKYFDTTIDRKRYTSTKEVLDATLIHQSITGLYETRIDLSQLGGDGGPAPGSSGGSGGTLNLEDEYRLYETSAEPEVSPGSTWLSDFPQAWAETGGMGLAVRQAPLIIPLKATSTPVSIKQYPMSQEAKLGIKPHIQRLLDQGILVPCQSPWNTPLLPVKKPGTNDYRPVQDLREVNKRVEDIHPTVPNPYNLLSGLPPSHRWYTVLDLKDAFFCLRLHPTSQPLFAFEWRDPGMGISGQLTWTRLPQGFKNSPTLFNEALHRDLADFRIQHPDLILLQYVDDILLAATSELDCQQGTRALLLTLGNLGYRASAKKAQLCQKQVKYLGYLLKEGQRWLTEARKETVMGQPTPKTPRQLREFLGKAGFCRLFIPGFAEMAAPLYPLTKPGTLFNWGPDQQKAYQEIKQALLTAPALGLPDLTKPFELFVDEKQGYAKGVLTQKLGPWRRPVAYLSKKLDPVAAGWPPCLRMVAAIAVLRKDAGKLTMGQPLVILAPHAVEALVKQPPDRWLSNARMTHYQAMLLDTDRVQFGPVVALNPATLLPLPEEGAPHDCLEILAETHGTRPDLTDQPIPDADHTWYTDGSSFLQEGQRKAGAAVTTETEVIWARALPAGTSAQRAELIALTQALKMAEGKRLNVYTDSRYAFATAHIHGEIYRRRGWLTSEGREIKNKSEILALLKALFLPKRLSIIHCLGHQKGDSAEARGNRLADQAAREAAIKTPPDTSTLLAGKRTADGSEFEKRTADGSEFESPKKKAKVE

SEQ ID NO: 1884 - protein, 2094 aa, synthetic construct
MPAAKRVKLDGGDKKYSIGLDIGTNSVGWAVITDEYKVPSKKFKVLGNTDRHSIKKNLIGALLFDSGETAEATRLKRTARRRYTRRKNRICYLQEIFSNEMAKVDDSFFHRLEESFLVEEDKKHERHPIFGNIVDEVAYHEKYPTIYHLRKKLVDSTDKADLRLIYLALAHMIKFRGHFLIEGDLNPDNSDVDKLFIQLVQTYNQLFEENPINASGVDAKAILSARLSKSRRLENLIAQLPGEKKNGLFGNLIALSLGLTPNFKSNFDLAEDAKLQLSKDTYDDDLDNLLAQIGDQYADLFLAAKNLSDAILLSDILRVNTEITKAPLSASMIKRYDEHHQDLTLLKALVRQQLPEKYKEIFFDQSKNGYAGYIDGGASQEEFYKFIKPILEKMDGTEELLVKLNREDLLRKQRTFDNGSIPHQIHLGELHAILRRQEDFYPFLKDNREKIEKILTFRIPYYVGPLARGNSRFAWMTRKSEETITPWNFEEVVDKGASAQSFIERMTNFDKNLPNEKVLPKHSLLYEYFTVYNELTKVKYVTEGMRKPAFLSGEQKKAIVDLLFKTNRKVTVKQLKEDYFKKIECFDSVEISGVEDRFNASLGTYHDLLKIIKDKDFLDNEENEDILEDIVLTLTLFEDREMIEERLKTYAHLFDDKVMKQLKRRRYTGWGRLSRKLINGIRDKQSGKTILDFLKSDGFANRNFMQLIHDDSLTFKEDIQKAQVSGQGDSLHEHIANLAGSPAIKKGILQTVKVVDELVKVMGRHKPENIVIEMARENQTTQKGQKNSRERMKRIEEGIKELGSQILKEHPVENTQLQNEKLYLYYLQNGRDMYVDQELDINRLSDYDVDHIVPQSFLKDDSIDNKVLTRSDKARGKSDNVPSEEVVKKMKNYWRQLLNAKLITQRKFDNLTKAERGGLSELDKAGFIKRQLVETRQITKHVAQILDSRMNTKYDENDKLIREVKVITLKSKLVSDFRKDFQFYKVREINNYHHAHDAYLNAVVGTALIKKYPKLESEFVYGDYKVYDVRKMIAKSEQEIGKATAKYFFYSNIMNFFKTEITLANGEIRKRPLIETNGETGEIVWDKGRDFATVRKVLSMPQVNIVKKTEVQTGGFSKESILPKRNSDKLIARKKDWDPKKYGGFDSPTVAYSVLVVAKVEKGKSKKLKSVKELLGITIMERSSFEKNPIDFLEAKGYKEVKKDLIIKLPKYSLFELENGRKRMLASAGELQKGNELALPSKYVNFLYLASHYEKLKGSPEDNEQKQLFVEQHKHYLDEIIEQISEFSKRVILADANLDKVLSAYNKHRDKPIREQAENIIHLFTLTNLGAPAAFKYFDTTIDRKRYTSTKEVLDATLIHQSITGLYETRIDLSQLGGDGGGGGGSSGGSGGTLNLEDEYRLYETSAEPEVSPGSTWLSDFPQAWAETGGMGLAVRQAPLIIPLKATSTPVSIKQYPMSQEAKLGIKPHIQRLLDQGILVPCQSPWNTPLLPVKKPGTNDYRPVQDLREVNKRVEDIHPTVPNPYNLLSGLPPSHRWYTVLDLKDAFFCLRLHPTSQPLFAFEWRDPGMGISGQLTWTRLPQGFKNSPTLFNEALHRDLADFRIQHPDLILLQYVDDILLAATSELDCQQGTRALLLTLGNLGYRASAKKAQLCQKQVKYLGYLLKEGQRWLTEARKETVMGQPTPKTPRQLREFLGKAGFCRLFIPGFAEMAAPLYPLTKPGTLFNWGPDQQKAYQEIKQALLTAPALGLPDLTKPFELFVDEKQGYAKGVLTQKLGPWRRPVAYLSKKLDPVAAGWPPCLRMVAAIAVLRKDAGKLTMGQPLVILAPHAVEALVKQPPDRWLSNARMTHYQAMLLDTDRVQFGPVVALNPATLLPLPEEGAPHDCLEILAETHGTRPDLTDQPIPDADHTWYTDGSSFLQEGQRKAGAAVTTETEVIWARALPAGTSAQRAELIALTQALKMAEGKRLNVYTDSRYAFATAHIHGEIYRRRGWLTSEGREIKNKSEILALLKALFLPKRLSIIHCLGHQKGDSAEARGNRLADQAAREAAIKTPPDTSTLLAGKRTADGSEFEKRTADGSEFESPKKKAKVE

SEQ ID NO: 1885 - protein, 2090 aa, synthetic construct
MPAAKRVKLDGGDKKYSIGLDIGTNSVGWAVITDEYKVPSKKFKVLGNTDRHSIKKNLIGALLFDSGETAEATRLKRTARRRYTRRKNRICYLQEIFSNEMAKVDDSFFHRLEESFLVEEDKKHERHPIFGNIVDEVAYHEKYPTIYHLRKKLVDSTDKADLRLIYLALAHMIKFRGHFLIEGDLNPDNSDVDKLFIQLVQTYNQLFEENPINASGVDAKAILSARLSKSRRLENLIAQLPGEKKNGLFGNLIALSLGLTPNFKSNFDLAEDAKLQLSKDTYDDDLDNLLAQIGDQYADLFLAAKNLSDAILLSDILRVNTEITKAPLSASMIKRYDEHHQDLTLLKALVRQQLPEKYKEIFFDQSKNGYAGYIDGGASQEEFYKFIKPILEKMDGTEELLVKLNREDLLRKQRTFDNGSIPHQIHLGELHAILRRQEDFYPFLKDNREKIEKILTFRIPYYVGPLARGNSRFAWMTRKSEETITPWNFEEVVDKGASAQSFIERMTNFDKNLPNEKVLPKHSLLYEYFTVYNELTKVKYVTEGMRKPAFLSGEQKKAIVDLLFKTNRKVTVKQLKEDYFKKIECFDSVEISGVEDRFNASLGTYHDLLKIIKDKDFLDNEENEDILEDIVLTLTLFEDREMIEERLKTYAHLFDDKVMKQLKRRRYTGWGRLSRKLINGIRDKQSGKTILDFLKSDGFANRNFMQLIHDDSLTFKEDIQKAQVSGQGDSLHEHIANLAGSPAIKKGILQTVKVVDELVKVMGRHKPENIVIEMARENQTTQKGQKNSRERMKRIEEGIKELGSQILKEHPVENTQLQNEKLYLYYLQNGRDMYVDQELDINRLSDYDVDHIVPQSFLKDDSIDNKVLTRSDKARGKSDNVPSEEVVKKMKNYWRQLLNAKLITQRKFDNLTKAERGGLSELDKAGFIKRQLVETRQITKHVAQILDSRMNTKYDENDKLIREVKVITLKSKLVSDFRKDFQFYKVREINNYHHAHDAYLNAVVGTALIKKYPKLESEFVYGDYKVYDVRKMIAKSEQEIGKATAKYFFYSNIMNFFKTEITLANGEIRKRPLIETNGETGEIVWDKGRDFATVRKVLSMPQVNIVKKTEVQTGGFSKESILPKRNSDKLIARKKDWDPKKYGGFDSPTVAYSVLVVAKVEKGKSKKLKSVKELLGITIMERSSFEKNPIDFLEAKGYKEVKKDLIIKLPKYSLFELENGRKRMLASAGELQKGNELALPSKYVNFLYLASHYEKLKGSPEDNEQKQLFVEQHKHYLDEIIEQISEFSKRVILADANLDKVLSAYNKHRDKPIREQAENIIHLFTLTNLGAPAAFKYFDTTIDRKRYTSTKEVLDATLIHQSITGLYETRIDLSQLGGDGGGGGGSGGTLNLEDEYRLYETSAEPEVSPGSTWLSDFPQAWAETGGMGLAVRQAPLIIPLKATSTPVSIKQYPMSQEAKLGIKPHIQRLLDQGILVPCQSPWNTPLLPVKKPGTNDYRPVQDLREVNKRVEDIHPTVPNPYNLLSGLPPSHRWYTVLDLKDAFFCLRLHPTSQPLFAFEWRDPGMGISGQLTWTRLPQGFKNSPTLFNEALHRDLADFRIQHPDLILLQYVDDILLAATSELDCQQGTRALLLTLGNLGYRASAKKAQLCQKQVKYLGYLLKEGQRWLTEARKETVMGQPTPKTPRQLREFLGKAGFCRLFIPGFAEMAAPLYPLTKPGTLFNWGPDQQKAYQEIKQALLTAPALGLPDLTKPFELFVDEKQGYAKGVLTQKLGPWRRPVAYLSKKLDPVAAGWPPCLRMVAAIAVLRKDAGKLTMGQPLVILAPHAVEALVKQPPDRWLSNARMTHYQAMLLDTDRVQFGPVVALNPATLLPLPEEGAPHDCLEILAETHGTRPDLTDQPIPDADHTWYTDGSSFLQEGQRKAGAAVTTETEVIWARALPAGTSAQRAELIALTQALKMAEGKRLNVYTDSRYAFATAHIHGEIYRRRGWLTSEGREIKNKSEILALLKALFLPKRLSIIHCLGHQKGDSAEARGNRLADQAAREAAIKTPPDTSTLLAGKRTADGSEFEKRTADGSEFESPKKKAKVE

SEQ ID NO: 1886 - protein, 2096 aa, synthetic construct
MPAAKRVKLDGGDKKYSIGLDIGTNSVGWAVITDEYKVPSKKFKVLGNTDRHSIKKNLIGALLFDSGETAEATRLKRTARRRYTRRKNRICYLQEIFSNEMAKVDDSFFHRLEESFLVEEDKKHERHPIFGNIVDEVAYHEKYPTIYHLRKKLVDSTDKADLRLIYLALAHMIKFRGHFLIEGDLNPDNSDVDKLFIQLVQTYNQLFEENPINASGVDAKAILSARLSKSRRLENLIAQLPGEKKNGLFGNLIALSLGLTPNFKSNFDLAEDAKLQLSKDTYDDDLDNLLAQIGDQYADLFLAAKNLSDAILLSDILRVNTEITKAPLSASMIKRYDEHHQDLTLLKALVRQQLPEKYKEIFFDQSKNGYAGYIDGGASQEEFYKFIKPILEKMDGTEELLVKLNREDLLRKQRTFDNGSIPHQIHLGELHAILRRQEDFYPFLKDNREKIEKILTFRIPYYVGPLARGNSRFAWMTRKSEETITPWNFEEVVDKGASAQSFIERMTNFDKNLPNEKVLPKHSLLYEYFTVYNELTKVKYVTEGMRKPAFLSGEQKKAIVDLLFKTNRKVTVKQLKEDYFKKIECFDSVEISGVEDRFNASLGTYHDLLKIIKDKDFLDNEENEDILEDIVLTLTLFEDREMIEERLKTYAHLFDDKVMKQLKRRRYTGWGRLSRKLINGIRDKQSGKTILDFLKSDGFANRNFMQLIHDDSLTFKEDIQKAQVSGQGDSLHEHIANLAGSPAIKKGILQTVKVVDELVKVMGRHKPENIVIEMARENQTTQKGQKNSRERMKRIEEGIKELGSQILKEHPVENTQLQNEKLYLYYLQNGRDMYVDQELDINRLSDYDVDHIVPQSFLKDDSIDNKVLTRSDKARGKSDNVPSEEVVKKMKNYWRQLLNAKLITQRKFDNLTKAERGGLSELDKAGFIKRQLVETRQITKHVAQILDSRMNTKYDENDKLIREVKVITLKSKLVSDFRKDFQFYKVREINNYHHAHDAYLNAVVGTALIKKYPKLESEFVYGDYKVYDVRKMIAKSEQEIGKATAKYFFYSNIMNFFKTEITLANGEIRKRPLIETNGETGEIVWDKGRDFATVRKVLSMPQVNIVKKTEVQTGGFSKESILPKRNSDKLIARKKDWDPKKYGGFDSPTVAYSVLVVAKVEKGKSKKLKSVKELLGITIMERSSFEKNPIDFLEAKGYKEVKKDLIIKLPKYSLFELENGRKRMLASAGELQKGNELALPSKYVNFLYLASHYEKLKGSPEDNEQKQLFVEQHKHYLDEIIEQISEFSKRVILADANLDKVLSAYNKHRDKPIREQAENIIHLFTLTNLGAPAAFKYFDTTIDRKRYTSTKEVLDATLIHQSITGLYETRIDLSQLGGDGGGGGEAAAKPAPGGTLNLEDEYRLYETSAEPEVSPGSTWLSDFPQAWAETGGMGLAVRQAPLIIPLKATSTPVSIKQYPMSQEAKLGIKPHIQRLLDQGILVPCQSPWNTPLLPVKKPGTNDYRPVQDLREVNKRVEDIHPTVPNPYNLLSGLPPSHRWYTVLDLKDAFFCLRLHPTSQPLFAFEWRDPGMGISGQLTWTRLPQGFKNSPTLFNEALHRDLADFRIQHPDLILLQYVDDILLAATSELDCQQGTRALLLTLGNLGYRASAKKAQLCQKQVKYLGYLLKEGQRWLTEARKETVMGQPTPKTPRQLREFLGKAGFCRLFIPGFAEMAAPLYPLTKPGTLFNWGPDQQKAYQEIKQALLTAPALGLPDLTKPFELFVDEKQGYAKGVLTQKLGPWRRPVAYLSKKLDPVAAGWPPCLRMVAAIAVLRKDAGKLTMGQPLVILAPHAVEALVKQPPDRWLSNARMTHYQAMLLDTDRVQFGPVVALNPATLLPLPEEGAPHDCLEILAETHGTRPDLTDQPIPDADHTWYTDGSSFLQEGQRKAGAAVTTETEVIWARALPAGTSAQRAELIALTQALKMAEGKRLNVYTDSRYAFATAHIHGEIYRRRGWLTSEGREIKNKSEILALLKALFLPKRLSIIHCLGHQKGDSAEARGNRLADQAAREAAIKTPPDTSTLLAGKRTADGSEFEKRTADGSEFESPKKKAKVE

SEQ ID NO: 1887 - protein, 2091 aa, synthetic construct
MPAAKRVKLDGGDKKYSIGLDIGTNSVGWAVITDEYKVPSKKFKVLGNTDRHSIKKNLIGALLFDSGETAEATRLKRTARRRYTRRKNRICYLQEIFSNEMAKVDDSFFHRLEESFLVEEDKKHERHPIFGNIVDEVAYHEKYPTIYHLRKKLVDSTDKADLRLIYLALAHMIKFRGHFLIEGDLNPDNSDVDKLFIQLVQTYNQLFEENPINASGVDAKAILSARLSKSRRLENLIAQLPGEKKNGLFGNLIALSLGLTPNFKSNFDLAEDAKLQLSKDTYDDDLDNLLAQIGDQYADLFLAAKNLSDAILLSDILRVNTEITKAPLSASMIKRYDEHHQDLTLLKALVRQQLPEKYKEIFFDQSKNGYAGYIDGGASQEEFYKFIKPILEKMDGTEELLVKLNREDLLRKQRTFDNGSIPHQIHLGELHAILRRQEDFYPFLKDNREKIEKILTFRIPYYVGPLARGNSRFAWMTRKSEETITPWNFEEVVDKGASAQSFIERMTNFDKNLPNEKVLPKHSLLYEYFTVYNELTKVKYVTEGMRKPAFLSGEQKKAIVDLLFKTNRKVTVKQLKEDYFKKIECFDSVEISGVEDRFNASLGTYHDLLKIIKDKDFLDNEENEDILEDIVLTLTLFEDREMIEERLKTYAHLFDDKVMKQLKRRRYTGWGRLSRKLINGIRDKQSGKTILDFLKSDGFANRNFMQLIHDDSLTFKEDIQKAQVSGQGDSLHEHIANLAGSPAIKKGILQTVKVVDELVKVMGRHKPENIVIEMARENQTTQKGQKNSRERMKRIEEGIKELGSQILKEHPVENTQLQNEKLYLYYLQNGRDMYVDQELDINRLSDYDVDHIVPQSFLKDDSIDNKVLTRSDKARGKSDNVPSEEVVKKMKNYWRQLLNAKLITQRKFDNLTKAERGGLSELDKAGFIKRQLVETRQITKHVAQILDSRMNTKYDENDKLIREVKVITLKSKLVSDFRKDFQFYKVREINNYHHAHDAYLNAVVGTALIKKYPKLESEFVYGDYKVYDVRKMIAKSEQEIGKATAKYFFYSNIMNFFKTEITLANGEIRKRPLIETNGETGEIVWDKGRDFATVRKVLSMPQVNIVKKTEVQTGGFSKESILPKRNSDKLIARKKDWDPKKYGGFDSPTVAYSVLVVAKVEKGKSKKLKSVKELLGITIMERSSFEKNPIDFLEAKGYKEVKKDLIIKLPKYSLFELENGRKRMLASAGELQKGNELALPSKYVNFLYLASHYEKLKGSPEDNEQKQLFVEQHKHYLDEIIEQISEFSKRVILADANLDKVLSAYNKHRDKPIREQAENIIHLFTLTNLGAPAAFKYFDTTIDRKRYTSTKEVLDATLIHQSITGLYETRIDLSQLGGDGGGSSPAPGGTLNLEDEYRLYETSAEPEVSPGSTWLSDFPQAWAETGGMGLAVRQAPLIIPLKATSTPVSIKQYPMSQEAKLGIKPHIQRLLDQGILVPCQSPWNTPLLPVKKPGTNDYRPVQDLREVNKRVEDIHPTVPNPYNLLSGLPPSHRWYTVLDLKDAFFCLRLHPTSQPLFAFEWRDPGMGISGQLTWTRLPQGFKNSPTLFNEALHRDLADFRIQHPDLILLQYVDDILLAATSELDCQQGTRALLLTLGNLGYRASAKKAQLCQKQVKYLGYLLKEGQRWLTEARKETVMGQPTPKTPRQLREFLGKAGFCRLFIPGFAEMAAPLYPLTKPGTLFNWGPDQQKAYQEIKQALLTAPALGLPDLTKPFELFVDEKQGYAKGVLTQKLGPWRRPVAYLSKKLDPVAAGWPPCLRMVAAIAVLRKDAGKLTMGQPLVILAPHAVEALVKQPPDRWLSNARMTHYQAMLLDTDRVQFGPVVALNPATLLPLPEEGAPHDCLEILAETHGTRPDLTDQPIPDADHTWYTDGSSFLQEGQRKAGAAVTTETEVIWARALPAGTSAQRAELIALTQALKMAEGKRLNVYTDSRYAFATAHIHGEIYRRRGWLTSEGREIKNKSEILALLKALFLPKRLSIIHCLGHQKGDSAEARGNRLADQAAREAAIKTPPDTSTLLAGKRTADGSEFEKRTADGSEFESPKKKAKVE

SEQ ID NO: 1888 - protein, 2093 aa, synthetic construct
MPAAKRVKLDGGDKKYSIGLDIGTNSVGWAVITDEYKVPSKKFKVLGNTDRHSIKKNLIGALLFDSGETAEATRLKRTARRRYTRRKNRICYLQEIFSNEMAKVDDSFFHRLEESFLVEEDKKHERHPIFGNIVDEVAYHEKYPTIYHLRKKLVDSTDKADLRLIYLALAHMIKFRGHFLIEGDLNPDNSDVDKLFIQLVQTYNQLFEENPINASGVDAKAILSARLSKSRRLENLIAQLPGEKKNGLFGNLIALSLGLTPNFKSNFDLAEDAKLQLSKDTYDDDLDNLLAQIGDQYADLFLAAKNLSDAILLSDILRVNTEITKAPLSASMIKRYDEHHQDLTLLKALVRQQLPEKYKEIFFDQSKNGYAGYIDGGASQEEFYKFIKPILEKMDGTEELLVKLNREDLLRKQRTFDNGSIPHQIHLGELHAILRRQEDFYPFLKDNREKIEKILTFRIPYYVGPLARGNSRFAWMTRKSEETITPWNFEEVVDKGASAQSFIERMTNFDKNLPNEKVLPKHSLLYEYFTVYNELTKVKYVTEGMRKPAFLSGEQKKAIVDLLFKTNRKVTVKQLKEDYFKKIECFDSVEISGVEDRFNASLGTYHDLLKIIKDKDFLDNEENEDILEDIVLTLTLFEDREMIEERLKTYAHLFDDKVMKQLKRRRYTGWGRLSRKLINGIRDKQSGKTILDFLKSDGFANRNFMQLIHDDSLTFKEDIQKAQVSGQGDSLHEHIANLAGSPAIKKGILQTVKVVDELVKVMGRHKPENIVIEMARENQTTQKGQKNSRERMKRIEEGIKELGSQILKEHPVENTQLQNEKLYLYYLQNGRDMYVDQELDINRLSDYDVDHIVPQSFLKDDSIDNKVLTRSDKARGKSDNVPSEEVVKKMKNYWRQLLNAKLITQRKFDNLTKAERGGLSELDKAGFIKRQLVETRQITKHVAQILDSRMNTKYDENDKLIREVKVITLKSKLVSDFRKDFQFYKVREINNYHHAHDAYLNAVVGTALIKKYPKLESEFVYGDYKVYDVRKMIAKSEQEIGKATAKYFFYSNIMNFFKTEITLANGEIRKRPLIETNGETGEIVWDKGRDFATVRKVLSMPQVNIVKKTEVQTGGFSKESILPKRNSDKLIARKKDWDPKKYGGFDSPTVAYSVLVVAKVEKGKSKKLKSVKELLGITIMERSSFEKNPIDFLEAKGYKEVKKDLIIKLPKYSLFELENGRKRMLASAGELQKGNELALPSKYVNFLYLASHYEKLKGSPEDNEQKQLFVEQHKHYLDEIIEQISEFSKRVILADANLDKVLSAYNKHRDKPIREQAENIIHLFTLTNLGAPAAFKYFDTTIDRKRYTSTKEVLDATLIHQSITGLYETRIDLSQLGGDGGEAAAKGGGGGTLNLEDEYRLYETSAEPEVSPGSTWLSDFPQAWAETGGMGLAVRQAPLIIPLKATSTPVSIKQYPMSQEAKLGIKPHIQRLLDQGILVPCQSPWNTPLLPVKKPGTNDYRPVQDLREVNKRVEDIHPTVPNPYNLLSGLPPSHRWYTVLDLKDAFFCLRLHPTSQPLFAFEWRDPGMGISGQLTWTRLPQGFKNSPTLFNEALHRDLADFRIQHPDLILLQYVDDILLAATSELDCQQGTRALLLTLGNLGYRASAKKAQLCQKQVKYLGYLLKEGQRWLTEARKETVMGQPTPKTPRQLREFLGKAGFCRLFIPGFAEMAAPLYPLTKPGTLFNWGPDQQKAYQEIKQALLTAPALGLPDLTKPFELFVDEKQGYAKGVLTQKLGPWRRPVAYLSKKLDPVAAGWPPCLRMVAAIAVLRKDAGKLTMGQPLVILAPHAVEALVKQPPDRWLSNARMTHYQAMLLDTDRVQFGPVVALNPATLLPLPEEGAPHDCLEILAETHGTRPDLTDQPIPDADHTWYTDGSSFLQEGQRKAGAAVTTETEVIWARALPAGTSAQRAELIALTQALKMAEGKRLNVYTDSRYAFATAHIHGEIYRRRGWLTSEGREIKNKSEILALLKALFLPKRLSIIHCLGHQKGDSAEARGNRLADQAAREAAIKTPPDTSTLLAGKRTADGSEFEKRTADGSEFESPKKKAKVE

SEQ ID NO: 1889 - protein, 2096 aa, synthetic construct
MPAAKRVKLDGGDKKYSIGLDIGTNSVGWAVITDEYKVPSKKFKVLGNTDRHSIKKNLIGALLFDSGETAEATRLKRTARRRYTRRKNRICYLQEIFSNEMAKVDDSFFHRLEESFLVEEDKKHERHPIFGNIVDEVAYHEKYPTIYHLRKKLVDSTDKADLRLIYLALAHMIKFRGHFLIEGDLNPDNSDVDKLFIQLVQTYNQLFEENPINASGVDAKAILSARLSKSRRLENLIAQLPGEKKNGLFGNLIALSLGLTPNFKSNFDLAEDAKLQLSKDTYDDDLDNLLAQIGDQYADLFLAAKNLSDAILLSDILRVNTEITKAPLSASMIKRYDEHHQDLTLLKALVRQQLPEKYKEIFFDQSKNGYAGYIDGGASQEEFYKFIKPILEKMDGTEELLVKLNREDLLRKQRTFDNGSIPHQIHLGELHAILRRQEDFYPFLKDNREKIEKILTFRIPYYVGPLARGNSRFAWMTRKSEETITPWNFEEVVDKGASAQSFIERMTNFDKNLPNEKVLPKHSLLYEYFTVYNELTKVKYVTEGMRKPAFLSGEQKKAIVDLLFKTNRKVTVKQLKEDYFKKIECFDSVEISGVEDRFNASLGTYHDLLKIIKDKDFLDNEENEDILEDIVLTLTLFEDREMIEERLKTYAHLFDDKVMKQLKRRRYTGWGRLSRKLINGIRDKQSGKTILDFLKSDGFANRNFMQLIHDDSLTFKEDIQKAQVSGQGDSLHEHIANLAGSPAIKKGILQTVKVVDELVKVMGRHKPENIVIEMARENQTTQKGQKNSRERMKRIEEGIKELGSQILKEHPVENTQLQNEKLYLYYLQNGRDMYVDQELDINRLSDYDVDHIVPQSFLKDDSIDNKVLTRSDKARGKSDNVPSEEVVKKMKNYWRQLLNAKLITQRKFDNLTKAERGGLSELDKAGFIKRQLVETRQITKHVAQILDSRMNTKYDENDKLIREVKVITLKSKLVSDFRKDFQFYKVREINNYHHAHDAYLNAVVGTALIKKYPKLESEFVYGDYKVYDVRKMIAKSEQEIGKATAKYFFYSNIMNFFKTEITLANGEIRKRPLIETNGETGEIVWDKGRDFATVRKVLSMPQVNIVKKTEVQTGGFSKESILPKRNSDKLIARKKDWDPKKYGGFDSPTVAYSVLVVAKVEKGKSKKLKSVKELLGITIMERSSFEKNPIDFLEAKGYKEVKKDLIIKLPKYSLFELENGRKRMLASAGELQKGNELALPSKYVNFLYLASHYEKLKGSPEDNEQKQLFVEQHKHYLDEIIEQISEFSKRVILADANLDKVLSAYNKHRDKPIREQAENIIHLFTLTNLGAPAAFKYFDTTIDRKRYTSTKEVLDATLIHQSITGLYETRIDLSQLGGDGGGGSGSSEAAAKGGTLNLEDEYRLYETSAEPEVSPGSTWLSDFPQAWAETGGMGLAVRQAPLIIPLKATSTPVSIKQYPMSQEAKLGIKPHIQRLLDQGILVPCQSPWNTPLLPVKKPGTNDYRPVQDLREVNKRVEDIHPTVPNPYNLLSGLPPSHRWYTVLDLKDAFFCLRLHPTSQPLFAFEWRDPGMGISGQLTWTRLPQGFKNSPTLFNEALHRDLADFRIQHPDLILLQYVDDILLAATSELDCQQGTRALLLTLGNLGYRASAKKAQLCQKQVKYLGYLLKEGQRWLTEARKETVMGQPTPKTPRQLREFLGKAGFCRLFIPGFAEMAAPLYPLTKPGTLFNWGPDQQKAYQEIKQALLTAPALGLPDLTKPFELFVDEKQGYAKGVLTQKLGPWRRPVAYLSKKLDPVAAGWPPCLRMVAAIAVLRKDAGKLTMGQPLVILAPHAVEALVKQPPDRWLSNARMTHYQAMLLDTDRVQFGPVVALNPATLLPLPEEGAPHDCLEILAETHGTRPDLTDQPIPDADHTWYTDGSSFLQEGQRKAGAAVTTETEVIWARALPAGTSAQRAELIALTQALKMAEGKRLNVYTDSRYAFATAHIHGEIYRRRGWLTSEGREIKNKSEILALLKALFLPKRLSIIHCLGHQKGDSAEARGNRLADQAAREAAIKTPPDTSTLLAGKRTADGSEFEKRTADGSEFESPKKKAKVE

SEQ ID NO: 1890 - protein, 2096 aa, synthetic construct
MPAAKRVKLDGGDKKYSIGLDIGTNSVGWAVITDEYKVPSKKFKVLGNTDRHSIKKNLIGALLFDSGETAEATRLKRTARRRYTRRKNRICYLQEIFSNEMAKVDDSFFHRLEESFLVEEDKKHERHPIFGNIVDEVAYHEKYPTIYHLRKKLVDSTDKADLRLIYLALAHMIKFRGHFLIEGDLNPDNSDVDKLFIQLVQTYNQLFEENPINASGVDAKAILSARLSKSRRLENLIAQLPGEKKNGLFGNLIALSLGLTPNFKSNFDLAEDAKLQLSKDTYDDDLDNLLAQIGDQYADLFLAAKNLSDAILLSDILRVNTEITKAPLSASMIKRYDEHHQDLTLLKALVRQQLPEKYKEIFFDQSKNGYAGYIDGGASQEEFYKFIKPILEKMDGTEELLVKLNREDLLRKQRTFDNGSIPHQIHLGELHAILRRQEDFYPFLKDNREKIEKILTFRIPYYVGPLARGNSRFAWMTRKSEETITPWNFEEVVDKGASAQSFIERMTNFDKNLPNEKVLPKHSLLYEYFTVYNELTKVKYVTEGMRKPAFLSGEQKKAIVDLLFKTNRKVTVKQLKEDYFKKIECFDSVEISGVEDRFNASLGTYHDLLKIIKDKDFLDNEENEDILEDIVLTLTLFEDREMIEERLKTYAHLFDDKVMKQLKRRRYTGWGRLSRKLINGIRDKQSGKTILDFLKSDGFANRNFMQLIHDDSLTFKEDIQKAQVSGQGDSLHEHIANLAGSPAIKKGILQTVKVVDELVKVMGRHKPENIVIEMARENQTTQKGQKNSRERMKRIEEGIKELGSQILKEHPVENTQLQNEKLYLYYLQNGRDMYVDQELDINRLSDYDVDHIVPQSFLKDDSIDNKVLTRSDKARGKSDNVPSEEVVKKMKNYWRQLLNAKLITQRKFDNLTKAERGGLSELDKAGFIKRQLVETRQITKHVAQILDSRMNTKYDENDKLIREVKVITLKSKLVSDFRKDFQFYKVREINNYHHAHDAYLNAVVGTALIKKYPKLESEFVYGDYKVYDVRKMIAKSEQEIGKATAKYFFYSNIMNFFKTEITLANGEIRKRPLIETNGETGEIVWDKGRDFATVRKVLSMPQVNIVKKTEVQTGGFSKESILPKRNSDKLIARKKDWDPKKYGGFDSPTVAYSVLVVAKVEKGKSKKLKSVKELLGITIMERSSFEKNPIDFLEAKGYKEVKKDLIIKLPKYSLFELENGRKRMLASAGELQKGNELALPSKYVNFLYLASHYEKLKGSPEDNEQKQLFVEQHKHYLDEIIEQISEFSKRVILADANLDKVLSAYNKHRDKPIREQAENIIHLFTLTNLGAPAAFKYFDTTIDRKRYTSTKEVLDATLIHQSITGLYETRIDLSQLGGDGGGSSPAPEAAAKGGTLNLEDEYRLYETSAEPEVSPGSTWLSDFPQAWAETGGMGLAVRQAPLIIPLKATSTPVSIKQYPMSQEAKLGIKPHIQRLLDQGILVPCQSPWNTPLLPVKKPGTNDYRPVQDLREVNKRVEDIHPTVPNPYNLLSGLPPSHRWYTVLDLKDAFFCLRLHPTSQPLFAFEWRDPGMGISGQLTWTRLPQGFKNSPTLFNEALHRDLADFRIQHPDLILLQYVDDILLAATSELDCQQGTRALLLTLGNLGYRASAKKAQLCQKQVKYLGYLLKEGQRWLTEARKETVMGQPTPKTPRQLREFLGKAGFCRLFIPGFAEMAAPLYPLTKPGTLFNWGPDQQKAYQEIKQALLTAPALGLPDLTKPFELFVDEKQGYAKGVLTQKLGPWRRPVAYLSKKLDPVAAGWPPCLRMVAAIAVLRKDAGKLTMGQPLVILAPHAVEALVKQPPDRWLSNARMTHYQAMLLDTDRVQFGPVVALNPATLLPLPEEGAPHDCLEILAETHGTRPDLTDQPIPDADHTWYTDGSSFLQEGQRKAGAAVTTETEVIWARALPAGTSAQRAELIALTQALKMAEGKRLNVYTDSRYAFATAHIHGEIYRRRGWLTSEGREIKNKSEILALLKALFLPKRLSIIHCLGHQKGDSAEARGNRLADQAAREAAIKTPPDTSTLLAGKRTADGSEFEKRTADGSEFESPKKKAKVE

SEQ ID NO: 1891 - protein, 2093 aa, synthetic construct
MPAAKRVKLDGGDKKYSIGLDIGTNSVGWAVITDEYKVPSKKFKVLGNTDRHSIKKNLIGALLFDSGETAEATRLKRTARRRYTRRKNRICYLQEIFSNEMAKVDDSFFHRLEESFLVEEDKKHERHPIFGNIVDEVAYHEKYPTIYHLRKKLVDSTDKADLRLIYLALAHMIKFRGHFLIEGDLNPDNSDVDKLFIQLVQTYNQLFEENPINASGVDAKAILSARLSKSRRLENLIAQLPGEKKNGLFGNLIALSLGLTPNFKSNFDLAEDAKLQLSKDTYDDDLDNLLAQIGDQYADLFLAAKNLSDAILLSDILRVNTEITKAPLSASMIKRYDEHHQDLTLLKALVRQQLPEKYKEIFFDQSKNGYAGYIDGGASQEEFYKFIKPILEKMDGTEELLVKLNREDLLRKQRTFDNGSIPHQIHLGELHAILRRQEDFYPFLKDNREKIEKILTFRIPYYVGPLARGNSRFAWMTRKSEETITPWNFEEVVDKGASAQSFIERMTNFDKNLPNEKVLPKHSLLYEYFTVYNELTKVKYVTEGMRKPAFLSGEQKKAIVDLLFKTNRKVTVKQLKEDYFKKIECFDSVEISGVEDRFNASLGTYHDLLKIIKDKDFLDNEENEDILEDIVLTLTLFEDREMIEERLKTYAHLFDDKVMKQLKRRRYTGWGRLSRKLINGIRDKQSGKTILDFLKSDGFANRNFMQLIHDDSLTFKEDIQKAQVSGQGDSLHEHIANLAGSPAIKKGILQTVKVVDELVKVMGRHKPENIVIEMARENQTTQKGQKNSRERMKRIEEGIKELGSQILKEHPVENTQLQNEKLYLYYLQNGRDMYVDQELDINRLSDYDVDHIVPQSFLKDDSIDNKVLTRSDKARGKSDNVPSEEVVKKMKNYWRQLLNAKLITQRKFDNLTKAERGGLSELDKAGFIKRQLVETRQITKHVAQILDSRMNTKYDENDKLIREVKVITLKSKLVSDFRKDFQFYKVREINNYHHAHDAYLNAVVGTALIKKYPKLESEFVYGDYKVYDVRKMIAKSEQEIGKATAKYFFYSNIMNFFKTEITLANGEIRKRPLIETNGETGEIVWDKGRDFATVRKVLSMPQVNIVKKTEVQTGGFSKESILPKRNSDKLIARKKDWDPKKYGGFDSPTVAYSVLVVAKVEKGKSKKLKSVKELLGITIMERSSFEKNPIDFLEAKGYKEVKKDLIIKLPKYSLFELENGRKRMLASAGELQKGNELALPSKYVNFLYLASHYEKLKGSPEDNEQKQLFVEQHKHYLDEIIEQISEFSKRVILADANLDKVLSAYNKHRDKPIREQAENIIHLFTLTNLGAPAAFKYFDTTIDRKRYTSTKEVLDATLIHQSITGLYETRIDLSQLGGDGGGSSEAAAKGGTLNLEDEYRLYETSAEPEVSPGSTWLSDFPQAWAETGGMGLAVRQAPLIIPLKATSTPVSIKQYPMSQEAKLGIKPHIQRLLDQGILVPCQSPWNTPLLPVKKPGTNDYRPVQDLREVNKRVEDIHPTVPNPYNLLSGLPPSHRWYTVLDLKDAFFCLRLHPTSQPLFAFEWRDPGMGISGQLTWTRLPQGFKNSPTLFNEALHRDLADFRIQHPDLILLQYVDDILLAATSELDCQQGTRALLLTLGNLGYRASAKKAQLCQKQVKYLGYLLKEGQRWLTEARKETVMGQPTPKTPRQLREFLGKAGFCRLFIPGFAEMAAPLYPLTKPGTLFNWGPDQQKAYQEIKQALLTAPALGLPDLTKPFELFVDEKQGYAKGVLTQKLGPWRRPVAYLSKKLDPVAAGWPPCLRMVAAIAVLRKDAGKLTMGQPLVILAPHAVEALVKQPPDRWLSNARMTHYQAMLLDTDRVQFGPVVALNPATLLPLPEEGAPHDCLEILAETHGTRPDLTDQPIPDADHTWYTDGSSFLQEGQRKAGAAVTTETEVIWARALPAGTSAQRAELIALTQALKMAEGKRLNVYTDSRYAFATAHIHGEIYRRRGWLTSEGREIKNKSEILALLKALFLPKRLSIIHCLGHQKGDSAEARGNRLADQAAREAAIKTPPDTSTLLAGKRTADGSEFEKRTADGSEFESPKKKAKVE

SEQ ID NO: 1892 - protein, 2094 aa, synthetic construct
MPAAKRVKLDGGDKKYSIGLDIGTNSVGWAVITDEYKVPSKKFKVLGNTDRHSIKKNLIGALLFDSGETAEATRLKRTARRRYTRRKNRICYLQEIFSNEMAKVDDSFFHRLEESFLVEEDKKHERHPIFGNIVDEVAYHEKYPTIYHLRKKLVDSTDKADLRLIYLALAHMIKFRGHFLIEGDLNPDNSDVDKLFIQLVQTYNQLFEENPINASGVDAKAILSARLSKSRRLENLIAQLPGEKKNGLFGNLIALSLGLTPNFKSNFDLAEDAKLQLSKDTYDDDLDNLLAQIGDQYADLFLAAKNLSDAILLSDILRVNTEITKAPLSASMIKRYDEHHQDLTLLKALVRQQLPEKYKEIFFDQSKNGYAGYIDGGASQEEFYKFIKPILEKMDGTEELLVKLNREDLLRKQRTFDNGSIPHQIHLGELHAILRRQEDFYPFLKDNREKIEKILTFRIPYYVGPLARGNSRFAWMTRKSEETITPWNFEEVVDKGASAQSFIERMTNFDKNLPNEKVLPKHSLLYEYFTVYNELTKVKYVTEGMRKPAFLSGEQKKAIVDLLFKTNRKVTVKQLKEDYFKKIECFDSVEISGVEDRFNASLGTYHDLLKIIKDKDFLDNEENEDILEDIVLTLTLFEDREMIEERLKTYAHLFDDKVMKQLKRRRYTGWGRLSRKLINGIRDKQSGKTILDFLKSDGFANRNFMQLIHDDSLTFKEDIQKAQVSGQGDSLHEHIANLAGSPAIKKGILQTVKVVDELVKVMGRHKPENIVIEMARENQTTQKGQKNSRERMKRIEEGIKELGSQILKEHPVENTQLQNEKLYLYYLQNGRDMYVDQELDINRLSDYDVDHIVPQSFLKDDSIDNKVLTRSDKARGKSDNVPSEEVVKKMKNYWRQLLNAKLITQRKFDNLTKAERGGLSELDKAGFIKRQLVETRQITKHVAQILDSRMNTKYDENDKLIREVKVITLKSKLVSDFRKDFQFYKVREINNYHHAHDAYLNAVVGTALIKKYPKLESEFVYGDYKVYDVRKMIAKSEQEIGKATAKYFFYSNIMNFFKTEITLANGEIRKRPLIETNGETGEIVWDKGRDFATVRKVLSMPQVNIVKKTEVQTGGFSKESILPKRNSDKLIARKKDWDPKKYGGFDSPTVAYSVLVVAKVEKGKSKKLKSVKELLGITIMERSSFEKNPIDFLEAKGYKEVKKDLIIKLPKYSLFELENGRKRMLASAGELQKGNELALPSKYVNFLYLASHYEKLKGSPEDNEQKQLFVEQHKHYLDEIIEQISEFSKRVILADANLDKVLSAYNKHRDKPIREQAENIIHLFTLTNLGAPAAFKYFDTTIDRKRYTSTKEVLDATLIHQSITGLYETRIDLSQLGGDGGGGGPAPGGSGGTLNLEDEYRLYETSAEPEVSPGSTWLSDFPQAWAETGGMGLAVRQAPLIIPLKATSTPVSIKQYPMSQEAKLGIKPHIQRLLDQGILVPCQSPWNTPLLPVKKPGTNDYRPVQDLREVNKRVEDIHPTVPNPYNLLSGLPPSHRWYTVLDLKDAFFCLRLHPTSQPLFAFEWRDPGMGISGQLTWTRLPQGFKNSPTLFNEALHRDLADFRIQHPDLILLQYVDDILLAATSELDCQQGTRALLLTLGNLGYRASAKKAQLCQKQVKYLGYLLKEGQRWLTEARKETVMGQPTPKTPRQLREFLGKAGFCRLFIPGFAEMAAPLYPLTKPGTLFNWGPDQQKAYQEIKQALLTAPALGLPDLTKPFELFVDEKQGYAKGVLTQKLGPWRRPVAYLSKKLDPVAAGWPPCLRMVAAIAVLRKDAGKLTMGQPLVILAPHAVEALVKQPPDRWLSNARMTHYQAMLLDTDRVQFGPVVALNPATLLPLPEEGAPHDCLEILAETHGTRPDLTDQPIPDADHTWYTDGSSFLQEGQRKAGAAVTTETEVIWARALPAGTSAQRAELIALTQALKMAEGKRLNVYTDSRYAFATAHIHGEIYRRRGWLTSEGREIKNKSEILALLKALFLPKRLSIIHCLGHQKGDSAEARGNRLADQAAREAAIKTPPDTSTLLAGKRTADGSEFEKRTADGSEFESPKKKAKVE

SEQ ID NO: 1893 - protein, 2094 aa, synthetic construct
MPAAKRVKLDGGDKKYSIGLDIGTNSVGWAVITDEYKVPSKKFKVLGNTDRHSIKKNLIGALLFDSGETAEATRLKRTARRRYTRRKNRICYLQEIFSNEMAKVDDSFFHRLEESFLVEEDKKHERHPIFGNIVDEVAYHEKYPTIYHLRKKLVDSTDKADLRLIYLALAHMIKFRGHFLIEGDLNPDNSDVDKLFIQLVQTYNQLFEENPINASGVDAKAILSARLSKSRRLENLIAQLPGEKKNGLFGNLIALSLGLTPNFKSNFDLAEDAKLQLSKDTYDDDLDNLLAQIGDQYADLFLAAKNLSDAILLSDILRVNTEITKAPLSASMIKRYDEHHQDLTLLKALVRQQLPEKYKEIFFDQSKNGYAGYIDGGASQEEFYKFIKPILEKMDGTEELLVKLNREDLLRKQRTFDNGSIPHQIHLGELHAILRRQEDFYPFLKDNREKIEKILTFRIPYYVGPLARGNSRFAWMTRKSEETITPWNFEEVVDKGASAQSFIERMTNFDKNLPNEKVLPKHSLLYEYFTVYNELTKVKYVTEGMRKPAFLSGEQKKAIVDLLFKTNRKVTVKQLKEDYFKKIECFDSVEISGVEDRFNASLGTYHDLLKIIKDKDFLDNEENEDILEDIVLTLTLFEDREMIEERLKTYAHLFDDKVMKQLKRRRYTGWGRLSRKLINGIRDKQSGKTILDFLKSDGFANRNFMQLIHDDSLTFKEDIQKAQVSGQGDSLHEHIANLAGSPAIKKGILQTVKVVDELVKVMGRHKPENIVIEMARENQTTQKGQKNSRERMKRIEEGIKELGSQILKEHPVENTQLQNEKLYLYYLQNGRDMYVDQELDINRLSDYDVDHIVPQSFLKDDSIDNKVLTRSDKARGKSDNVPSEEVVKKMKNYWRQLLNAKLITQRKFDNLTKAERGGLSELDKAGFIKRQLVETRQITKHVAQILDSRMNTKYDENDKLIREVKVITLKSKLVSDFRKDFQFYKVREINNYHHAHDAYLNAVVGTALIKKYPKLESEFVYGDYKVYDVRKMIAKSEQEIGKATAKYFFYSNIMNFFKTEITLANGEIRKRPLIETNGETGEIVWDKGRDFATVRKVLSMPQVNIVKKTEVQTGGFSKESILPKRNSDKLIARKKDWDPKKYGGFDSPTVAYSVLVVAKVEKGKSKKLKSVKELLGITIMERSSFEKNPIDFLEAKGYKEVKKDLIIKLPKYSLFELENGRKRMLASAGELQKGNELALPSKYVNFLYLASHYEKLKGSPEDNEQKQLFVEQHKHYLDEIIEQISEFSKRVILADANLDKVLSAYNKHRDKPIREQAENIIHLFTLTNLGAPAAFKYFDTTIDRKRYTSTKEVLDATLIHQSITGLYETRIDLSQLGGDGGPAPGGGGSSGGTLNLEDEYRLYETSAEPEVSPGSTWLSDFPQAWAETGGMGLAVRQAPLIIPLKATSTPVSIKQYPMSQEAKLGIKPHIQRLLDQGILVPCQSPWNTPLLPVKKPGTNDYRPVQDLREVNKRVEDIHPTVPNPYNLLSGLPPSHRWYTVLDLKDAFFCLRLHPTSQPLFAFEWRDPGMGISGQLTWTRLPQGFKNSPTLFNEALHRDLADFRIQHPDLILLQYVDDILLAATSELDCQQGTRALLLTLGNLGYRASAKKAQLCQKQVKYLGYLLKEGQRWLTEARKETVMGQPTPKTPRQLREFLGKAGFCRLFIPGFAEMAAPLYPLTKPGTLFNWGPDQQKAYQEIKQALLTAPALGLPDLTKPFELFVDEKQGYAKGVLTQKLGPWRRPVAYLSKKLDPVAAGWPPCLRMVAAIAVLRKDAGKLTMGQPLVILAPHAVEALVKQPPDRWLSNARMTHYQAMLLDTDRVQFGPVVALNPATLLPLPEEGAPHDCLEILAETHGTRPDLTDQPIPDADHTWYTDGSSFLQEGQRKAGAAVTTETEVIWARALPAGTSAQRAELIALTQALKMAEGKRLNVYTDSRYAFATAHIHGEIYRRRGWLTSEGREIKNKSEILALLKALFLPKRLSIIHCLGHQKGDSAEARGNRLADQAAREAAIKTPPDTSTLLAGKRTADGSEFEKRTADGSEFESPKKKAKVE

SEQ ID NO: 1894 - protein, 2094 aa, synthetic construct
MPAAKRVKLDGGDKKYSIGLDIGTNSVGWAVITDEYKVPSKKFKVLGNTDRHSIKKNLIGALLFDSGETAEATRLKRTARRRYTRRKNRICYLQEIFSNEMAKVDDSFFHRLEESFLVEEDKKHERHPIFGNIVDEVAYHEKYPTIYHLRKKLVDSTDKADLRLIYLALAHMIKFRGHFLIEGDLNPDNSDVDKLFIQLVQTYNQLFEENPINASGVDAKAILSARLSKSRRLENLIAQLPGEKKNGLFGNLIALSLGLTPNFKSNFDLAEDAKLQLSKDTYDDDLDNLLAQIGDQYADLFLAAKNLSDAILLSDILRVNTEITKAPLSASMIKRYDEHHQDLTLLKALVRQQLPEKYKEIFFDQSKNGYAGYIDGGASQEEFYKFIKPILEKMDGTEELLVKLNREDLLRKQRTFDNGSIPHQIHLGELHAILRRQEDFYPFLKDNREKIEKILTFRIPYYVGPLARGNSRFAWMTRKSEETITPWNFEEVVDKGASAQSFIERMTNFDKNLPNEKVLPKHSLLYEYFTVYNELTKVKYVTEGMRKPAFLSGEQKKAIVDLLFKTNRKVTVKQLKEDYFKKIECFDSVEISGVEDRFNASLGTYHDLLKIIKDKDFLDNEENEDILEDIVLTLTLFEDREMIEERLKTYAHLFDDKVMKQLKRRRYTGWGRLSRKLINGIRDKQSGKTILDFLKSDGFANRNFMQLIHDDSLTFKEDIQKAQVSGQGDSLHEHIANLAGSPAIKKGILQTVKVVDELVKVMGRHKPENIVIEMARENQTTQKGQKNSRERMKRIEEGIKELGSQILKEHPVENTQLQNEKLYLYYLQNGRDMYVDQELDINRLSDYDVDHIVPQSFLKDDSIDNKVLTRSDKARGKSDNVPSEEVVKKMKNYWRQLLNAKLITQRKFDNLTKAERGGLSELDKAGFIKRQLVETRQITKHVAQILDSRMNTKYDENDKLIREVKVITLKSKLVSDFRKDFQFYKVREINNYHHAHDAYLNAVVGTALIKKYPKLESEFVYGDYKVYDVRKMIAKSEQEIGKATAKYFFYSNIMNFFKTEITLANGEIRKRPLIETNGETGEIVWDKGRDFATVRKVLSMPQVNIVKKTEVQTGGFSKESILPKRNSDKLIARKKDWDPKKYGGFDSPTVAYSVLVVAKVEKGKSKKLKSVKELLGITIMERSSFEKNPIDFLEAKGYKEVKKDLIIKLPKYSLFELENGRKRMLASAGELQKGNELALPSKYVNFLYLASHYEKLKGSPEDNEQKQLFVEQHKHYLDEIIEQISEFSKRVILADANLDKVLSAYNKHRDKPIREQAENIIHLFTLTNLGAPAAFKYFDTTIDRKRYTSTKEVLDATLIHQSITGLYETRIDLSQLGGDGGGGGGGSGSSGGTLNLEDEYRLYETSAEPEVSPGSTWLSDFPQAWAETGGMGLAVRQAPLIIPLKATSTPVSIKQYPMSQEAKLGIKPHIQRLLDQGILVPCQSPWNTPLLPVKKPGTNDYRPVQDLREVNKRVEDIHPTVPNPYNLLSGLPPSHRWYTVLDLKDAFFCLRLHPTSQPLFAFEWRDPGMGISGQLTWTRLPQGFKNSPTLFNEALHRDLADFRIQHPDLILLQYVDDILLAATSELDCQQGTRALLLTLGNLGYRASAKKAQLCQKQVKYLGYLLKEGQRWLTEARKETVMGQPTPKTPRQLREFLGKAGFCRLFIPGFAEMAAPLYPLTKPGTLFNWGPDQQKAYQEIKQALLTAPALGLPDLTKPFELFVDEKQGYAKGVLTQKLGPWRRPVAYLSKKLDPVAAGWPPCLRMVAAIAVLRKDAGKLTMGQPLVILAPHAVEALVKQPPDRWLSNARMTHYQAMLLDTDRVQFGPVVALNPATLLPLPEEGAPHDCLEILAETHGTRPDLTDQPIPDADHTWYTDGSSFLQEGQRKAGAAVTTETEVIWARALPAGTSAQRAELIALTQALKMAEGKRLNVYTDSRYAFATAHIHGEIYRRRGWLTSEGREIKNKSEILALLKALFLPKRLSIIHCLGHQKGDSAEARGNRLADQAAREAAIKTPPDTSTLLAGKRTADGSEFEKRTADGSEFESPKKKAKVE

SEQ ID NO: 1895 - protein, 2091 aa, synthetic construct
MPAAKRVKLDGGDKKYSIGLDIGTNSVGWAVITDEYKVPSKKFKVLGNTDRHSIKKNLIGALLFDSGETAEATRLKRTARRRYTRRKNRICYLQEIFSNEMAKVDDSFFHRLEESFLVEEDKKHERHPIFGNIVDEVAYHEKYPTIYHLRKKLVDSTDKADLRLIYLALAHMIKFRGHFLIEGDLNPDNSDVDKLFIQLVQTYNQLFEENPINASGVDAKAILSARLSKSRRLENLIAQLPGEKKNGLFGNLIALSLGLTPNFKSNFDLAEDAKLQLSKDTYDDDLDNLLAQIGDQYADLFLAAKNLSDAILLSDILRVNTEITKAPLSASMIKRYDEHHQDLTLLKALVRQQLPEKYKEIFFDQSKNGYAGYIDGGASQEEFYKFIKPILEKMDGTEELLVKLNREDLLRKQRTFDNGSIPHQIHLGELHAILRRQEDFYPFLKDNREKIEKILTFRIPYYVGPLARGNSRFAWMTRKSEETITPWNFEEVVDKGASAQSFIERMTNFDKNLPNEKVLPKHSLLYEYFTVYNELTKVKYVTEGMRKPAFLSGEQKKAIVDLLFKTNRKVTVKQLKEDYFKKIECFDSVEISGVEDRFNASLGTYHDLLKIIKDKDFLDNEENEDILEDIVLTLTLFEDREMIEERLKTYAHLFDDKVMKQLKRRRYTGWGRLSRKLINGIRDKQSGKTILDFLKSDGFANRNFMQLIHDDSLTFKEDIQKAQVSGQGDSLHEHIANLAGSPAIKKGILQTVKVVDELVKVMGRHKPENIVIEMARENQTTQKGQKNSRERMKRIEEGIKELGSQILKEHPVENTQLQNEKLYLYYLQNGRDMYVDQELDINRLSDYDVDHIVPQSFLKDDSIDNKVLTRSDKARGKSDNVPSEEVVKKMKNYWRQLLNAKLITQRKFDNLTKAERGGLSELDKAGFIKRQLVETRQITKHVAQILDSRMNTKYDENDKLIREVKVITLKSKLVSDFRKDFQFYKVREINNYHHAHDAYLNAVVGTALIKKYPKLESEFVYGDYKVYDVRKMIAKSEQEIGKATAKYFFYSNIMNFFKTEITLANGEIRKRPLIETNGETGEIVWDKGRDFATVRKVLSMPQVNIVKKTEVQTGGFSKESILPKRNSDKLIARKKDWDPKKYGGFDSPTVAYSVLVVAKVEKGKSKKLKSVKELLGITIMERSSFEKNPIDFLEAKGYKEVKKDLIIKLPKYSLFELENGRKRMLASAGELQKGNELALPSKYVNFLYLASHYEKLKGSPEDNEQKQLFVEQHKHYLDEIIEQISEFSKRVILADANLDKVLSAYNKHRDKPIREQAENIIHLFTLTNLGAPAAFKYFDTTIDRKRYTSTKEVLDATLIHQSITGLYETRIDLSQLGGDGGPAPGGGGGTLNLEDEYRLYETSAEPEVSPGSTWLSDFPQAWAETGGMGLAVRQAPLIIPLKATSTPVSIKQYPMSQEAKLGIKPHIQRLLDQGILVPCQSPWNTPLLPVKKPGTNDYRPVQDLREVNKRVEDIHPTVPNPYNLLSGLPPSHRWYTVLDLKDAFFCLRLHPTSQPLFAFEWRDPGMGISGQLTWTRLPQGFKNSPTLFNEALHRDLADFRIQHPDLILLQYVDDILLAATSELDCQQGTRALLLTLGNLGYRASAKKAQLCQKQVKYLGYLLKEGQRWLTEARKETVMGQPTPKTPRQLREFLGKAGFCRLFIPGFAEMAAPLYPLTKPGTLFNWGPDQQKAYQEIKQALLTAPALGLPDLTKPFELFVDEKQGYAKGVLTQKLGPWRRPVAYLSKKLDPVAAGWPPCLRMVAAIAVLRKDAGKLTMGQPLVILAPHAVEALVKQPPDRWLSNARMTHYQAMLLDTDRVQFGPVVALNPATLLPLPEEGAPHDCLEILAETHGTRPDLTDQPIPDADHTWYTDGSSFLQEGQRKAGAAVTTETEVIWARALPAGTSAQRAELIALTQALKMAEGKRLNVYTDSRYAFATAHIHGEIYRRRGWLTSEGREIKNKSEILALLKALFLPKRLSIIHCLGHQKGDSAEARGNRLADQAAREAAIKTPPDTSTLLAGKRTADGSEFEKRTADGSEFESPKKKAKVE

SEQ ID NO: 1896 - protein, 2115 aa, synthetic construct
MPAAKRVKLDGGDKKYSIGLDIGTNSVGWAVITDEYKVPSKKFKVLGNTDRHSIKKNLIGALLFDSGETAEATRLKRTARRRYTRRKNRICYLQEIFSNEMAKVDDSFFHRLEESFLVEEDKKHERHPIFGNIVDEVAYHEKYPTIYHLRKKLVDSTDKADLRLIYLALAHMIKFRGHFLIEGDLNPDNSDVDKLFIQLVQTYNQLFEENPINASGVDAKAILSARLSKSRRLENLIAQLPGEKKNGLFGNLIALSLGLTPNFKSNFDLAEDAKLQLSKDTYDDDLDNLLAQIGDQYADLFLAAKNLSDAILLSDILRVNTEITKAPLSASMIKRYDEHHQDLTLLKALVRQQLPEKYKEIFFDQSKNGYAGYIDGGASQEEFYKFIKPILEKMDGTEELLVKLNREDLLRKQRTFDNGSIPHQIHLGELHAILRRQEDFYPFLKDNREKIEKILTFRIPYYVGPLARGNSRFAWMTRKSEETITPWNFEEVVDKGASAQSFIERMTNFDKNLPNEKVLPKHSLLYEYFTVYNELTKVKYVTEGMRKPAFLSGEQKKAIVDLLFKTNRKVTVKQLKEDYFKKIECFDSVEISGVEDRFNASLGTYHDLLKIIKDKDFLDNEENEDILEDIVLTLTLFEDREMIEERLKTYAHLFDDKVMKQLKRRRYTGWGRLSRKLINGIRDKQSGKTILDFLKSDGFANRNFMQLIHDDSLTFKEDIQKAQVSGQGDSLHEHIANLAGSPAIKKGILQTVKVVDELVKVMGRHKPENIVIEMARENQTTQKGQKNSRERMKRIEEGIKELGSQILKEHPVENTQLQNEKLYLYYLQNGRDMYVDQELDINRLSDYDVDHIVPQSFLKDDSIDNKVLTRSDKARGKSDNVPSEEVVKKMKNYWRQLLNAKLITQRKFDNLTKAERGGLSELDKAGFIKRQLVETRQITKHVAQILDSRMNTKYDENDKLIREVKVITLKSKLVSDFRKDFQFYKVREINNYHHAHDAYLNAVVGTALIKKYPKLESEFVYGDYKVYDVRKMIAKSEQEIGKATAKYFFYSNIMNFFKTEITLANGEIRKRPLIETNGETGEIVWDKGRDFATVRKVLSMPQVNIVKKTEVQTGGFSKESILPKRNSDKLIARKKDWDPKKYGGFDSPTVAYSVLVVAKVEKGKSKKLKSVKELLGITIMERSSFEKNPIDFLEAKGYKEVKKDLIIKLPKYSLFELENGRKRMLASAGELQKGNELALPSKYVNFLYLASHYEKLKGSPEDNEQKQLFVEQHKHYLDEIIEQISEFSKRVILADANLDKVLSAYNKHRDKPIREQAENIIHLFTLTNLGAPAAFKYFDTTIDRKRYTSTKEVLDATLIHQSITGLYETRIDLSQLGGDGGEAAAKEAAAKEAAAKEAAAKEAAAKEAAAKGGTLNLEDEYRLYETSAEPEVSPGSTWLSDFPQAWAETGGMGLAVRQAPLIIPLKATSTPVSIKQYPMSQEAKLGIKPHIQRLLDQGILVPCQSPWNTPLLPVKKPGTNDYRPVQDLREVNKRVEDIHPTVPNPYNLLSGLPPSHRWYTVLDLKDAFFCLRLHPTSQPLFAFEWRDPGMGISGQLTWTRLPQGFKNSPTLFNEALHRDLADFRIQHPDLILLQYVDDILLAATSELDCQQGTRALLLTLGNLGYRASAKKAQLCQKQVKYLGYLLKEGQRWLTEARKETVMGQPTPKTPRQLREFLGKAGFCRLFIPGFAEMAAPLYPLTKPGTLFNWGPDQQKAYQEIKQALLTAPALGLPDLTKPFELFVDEKQGYAKGVLTQKLGPWRRPVAYLSKKLDPVAAGWPPCLRMVAAIAVLRKDAGKLTMGQPLVILAPHAVEALVKQPPDRWLSNARMTHYQAMLLDTDRVQFGPVVALNPATLLPLPEEGAPHDCLEILAETHGTRPDLTDQPIPDADHTWYTDGSSFLQEGQRKAGAAVTTETEVIWARALPAGTSAQRAELIALTQALKMAEGKRLNVYTDSRYAFATAHIHGEIYRRRGWLTSEGREIKNKSEILALLKALFLPKRLSIIHCLGHQKGDSAEARGNRLADQAAREAAIKTPPDTSTLLAGKRTADGSEFEKRTADGSEFESPKKKAKVE

SEQ ID NO: 1897 - protein, 2091 aa, synthetic construct
MPAAKRVKLDGGDKKYSIGLDIGTNSVGWAVITDEYKVPSKKFKVLGNTDRHSIKKNLIGALLFDSGETAEATRLKRTARRRYTRRKNRICYLQEIFSNEMAKVDDSFFHRLEESFLVEEDKKHERHPIFGNIVDEVAYHEKYPTIYHLRKKLVDSTDKADLRLIYLALAHMIKFRGHFLIEGDLNPDNSDVDKLFIQLVQTYNQLFEENPINASGVDAKAILSARLSKSRRLENLIAQLPGEKKNGLFGNLIALSLGLTPNFKSNFDLAEDAKLQLSKDTYDDDLDNLLAQIGDQYADLFLAAKNLSDAILLSDILRVNTEITKAPLSASMIKRYDEHHQDLTLLKALVRQQLPEKYKEIFFDQSKNGYAGYIDGGASQEEFYKFIKPILEKMDGTEELLVKLNREDLLRKQRTFDNGSIPHQIHLGELHAILRRQEDFYPFLKDNREKIEKILTFRIPYYVGPLARGNSRFAWMTRKSEETITPWNFEEVVDKGASAQSFIERMTNFDKNLPNEKVLPKHSLLYEYFTVYNELTKVKYVTEGMRKPAFLSGEQKKAIVDLLFKTNRKVTVKQLKEDYFKKIECFDSVEISGVEDRFNASLGTYHDLLKIIKDKDFLDNEENEDILEDIVLTLTLFEDREMIEERLKTYAHLFDDKVMKQLKRRRYTGWGRLSRKLINGIRDKQSGKTILDFLKSDGFANRNFMQLIHDDSLTFKEDIQKAQVSGQGDSLHEHIANLAGSPAIKKGILQTVKVVDELVKVMGRHKPENIVIEMARENQTTQKGQKNSRERMKRIEEGIKELGSQILKEHPVENTQLQNEKLYLYYLQNGRDMYVDQELDINRLSDYDVDHIVPQSFLKDDSIDNKVLTRSDKARGKSDNVPSEEVVKKMKNYWRQLLNAKLITQRKFDNLTKAERGGLSELDKAGFIKRQLVETRQITKHVAQILDSRMNTKYDENDKLIREVKVITLKSKLVSDFRKDFQFYKVREINNYHHAHDAYLNAVVGTALIKKYPKLESEFVYGDYKVYDVRKMIAKSEQEIGKATAKYFFYSNIMNFFKTEITLANGEIRKRPLIETNGETGEIVWDKGRDFATVRKVLSMPQVNIVKKTEVQTGGFSKESILPKRNSDKLIARKKDWDPKKYGGFDSPTVAYSVLVVAKVEKGKSKKLKSVKELLGITIMERSSFEKNPIDFLEAKGYKEVKKDLIIKLPKYSLFELENGRKRMLASAGELQKGNELALPSKYVNFLYLASHYEKLKGSPEDNEQKQLFVEQHKHYLDEIIEQISEFSKRVILADANLDKVLSAYNKHRDKPIREQAENIIHLFTLTNLGAPAAFKYFDTTIDRKRYTSTKEVLDATLIHQSITGLYETRIDLSQLGGDGGGGSGGSGGTLNLEDEYRLYETSAEPEVSPGSTWLSDFPQAWAETGGMGLAVRQAPLIIPLKATSTPVSIKQYPMSQEAKLGIKPHIQRLLDQGILVPCQSPWNTPLLPVKKPGTNDYRPVQDLREVNKRVEDIHPTVPNPYNLLSGLPPSHRWYTVLDLKDAFFCLRLHPTSQPLFAFEWRDPGMGISGQLTWTRLPQGFKNSPTLFNEALHRDLADFRIQHPDLILLQYVDDILLAATSELDCQQGTRALLLTLGNLGYRASAKKAQLCQKQVKYLGYLLKEGQRWLTEARKETVMGQPTPKTPRQLREFLGKAGFCRLFIPGFAEMAAPLYPLTKPGTLFNWGPDQQKAYQEIKQALLTAPALGLPDLTKPFELFVDEKQGYAKGVLTQKLGPWRRPVAYLSKKLDPVAAGWPPCLRMVAAIAVLRKDAGKLTMGQPLVILAPHAVEALVKQPPDRWLSNARMTHYQAMLLDTDRVQFGPVVALNPATLLPLPEEGAPHDCLEILAETHGTRPDLTDQPIPDADHTWYTDGSSFLQEGQRKAGAAVTTETEVIWARALPAGTSAQRAELIALTQALKMAEGKRLNVYTDSRYAFATAHIHGEIYRRRGWLTSEGREIKNKSEILALLKALFLPKRLSIIHCLGHQKGDSAEARGNRLADQAAREAAIKTPPDTSTLLAGKRTADGSEFEKRTADGSEFESPKKKAKVE

SEQ ID NO: 1898 - protein, 2093 aa, synthetic construct
MPAAKRVKLDGGDKKYSIGLDIGTNSVGWAVITDEYKVPSKKFKVLGNTDRHSIKKNLIGALLFDSGETAEATRLKRTARRRYTRRKNRICYLQEIFSNEMAKVDDSFFHRLEESFLVEEDKKHERHPIFGNIVDEVAYHEKYPTIYHLRKKLVDSTDKADLRLIYLALAHMIKFRGHFLIEGDLNPDNSDVDKLFIQLVQTYNQLFEENPINASGVDAKAILSARLSKSRRLENLIAQLPGEKKNGLFGNLIALSLGLTPNFKSNFDLAEDAKLQLSKDTYDDDLDNLLAQIGDQYADLFLAAKNLSDAILLSDILRVNTEITKAPLSASMIKRYDEHHQDLTLLKALVRQQLPEKYKEIFFDQSKNGYAGYIDGGASQEEFYKFIKPILEKMDGTEELLVKLNREDLLRKQRTFDNGSIPHQIHLGELHAILRRQEDFYPFLKDNREKIEKILTFRIPYYVGPLARGNSRFAWMTRKSEETITPWNFEEVVDKGASAQSFIERMTNFDKNLPNEKVLPKHSLLYEYFTVYNELTKVKYVTEGMRKPAFLSGEQKKAIVDLLFKTNRKVTVKQLKEDYFKKIECFDSVEISGVEDRFNASLGTYHDLLKIIKDKDFLDNEENEDILEDIVLTLTLFEDREMIEERLKTYAHLFDDKVMKQLKRRRYTGWGRLSRKLINGIRDKQSGKTILDFLKSDGFANRNFMQLIHDDSLTFKEDIQKAQVSGQGDSLHEHIANLAGSPAIKKGILQTVKVVDELVKVMGRHKPENIVIEMARENQTTQKGQKNSRERMKRIEEGIKELGSQILKEHPVENTQLQNEKLYLYYLQNGRDMYVDQELDINRLSDYDVDHIVPQSFLKDDSIDNKVLTRSDKARGKSDNVPSEEVVKKMKNYWRQLLNAKLITQRKFDNLTKAERGGLSELDKAGFIKRQLVETRQITKHVAQILDSRMNTKYDENDKLIREVKVITLKSKLVSDFRKDFQFYKVREINNYHHAHDAYLNAVVGTALIKKYPKLESEFVYGDYKVYDVRKMIAKSEQEIGKATAKYFFYSNIMNFFKTEITLANGEIRKRPLIETNGETGEIVWDKGRDFATVRKVLSMPQVNIVKKTEVQTGGFSKESILPKRNSDKLIARKKDWDPKKYGGFDSPTVAYSVLVVAKVEKGKSKKLKSVKELLGITIMERSSFEKNPIDFLEAKGYKEVKKDLIIKLPKYSLFELENGRKRMLASAGELQKGNELALPSKYVNFLYLASHYEKLKGSPEDNEQKQLFVEQHKHYLDEIIEQISEFSKRVILADANLDKVLSAYNKHRDKPIREQAENIIHLFTLTNLGAPAAFKYFDTTIDRKRYTSTKEVLDATLIHQSITGLYETRIDLSQLGGDGGEAAAKGSSGGTLNLEDEYRLYETSAEPEVSPGSTWLSDFPQAWAETGGMGLAVRQAPLIIPLKATSTPVSIKQYPMSQEAKLGIKPHIQRLLDQGILVPCQSPWNTPLLPVKKPGTNDYRPVQDLREVNKRVEDIHPTVPNPYNLLSGLPPSHRWYTVLDLKDAFFCLRLHPTSQPLFAFEWRDPGMGISGQLTWTRLPQGFKNSPTLFNEALHRDLADFRIQHPDLILLQYVDDILLAATSELDCQQGTRALLLTLGNLGYRASAKKAQLCQKQVKYLGYLLKEGQRWLTEARKETVMGQPTPKTPRQLREFLGKAGFCRLFIPGFAEMAAPLYPLTKPGTLFNWGPDQQKAYQEIKQALLTAPALGLPDLTKPFELFVDEKQGYAKGVLTQKLGPWRRPVAYLSKKLDPVAAGWPPCLRMVAAIAVLRKDAGKLTMGQPLVILAPHAVEALVKQPPDRWLSNARMTHYQAMLLDTDRVQFGPVVALNPATLLPLPEEGAPHDCLEILAETHGTRPDLTDQPIPDADHTWYTDGSSFLQEGQRKAGAAVTTETEVIWARALPAGTSAQRAELIALTQALKMAEGKRLNVYTDSRYAFATAHIHGEIYRRRGWLTSEGREIKNKSEILALLKALFLPKRLSIIHCLGHQKGDSAEARGNRLADQAAREAAIKTPPDTSTLLAGKRTADGSEFEKRTADGSEFESPKKKAKVE

SEQ ID NO: 1899 - protein, 2094 aa, synthetic construct
MPAAKRVKLDGGDKKYSIGLDIGTNSVGWAVITDEYKVPSKKFKVLGNTDRHSIKKNLIGALLFDSGETAEATRLKRTARRRYTRRKNRICYLQEIFSNEMAKVDDSFFHRLEESFLVEEDKKHERHPIFGNIVDEVAYHEKYPTIYHLRKKLVDSTDKADLRLIYLALAHMIKFRGHFLIEGDLNPDNSDVDKLFIQLVQTYNQLFEENPINASGVDAKAILSARLSKSRRLENLIAQLPGEKKNGLFGNLIALSLGLTPNFKSNFDLAEDAKLQLSKDTYDDDLDNLLAQIGDQYADLFLAAKNLSDAILLSDILRVNTEITKAPLSASMIKRYDEHHQDLTLLKALVRQQLPEKYKEIFFDQSKNGYAGYIDGGASQEEFYKFIKPILEKMDGTEELLVKLNREDLLRKQRTFDNGSIPHQIHLGELHAILRRQEDFYPFLKDNREKIEKILTFRIPYYVGPLARGNSRFAWMTRKSEETITPWNFEEVVDKGASAQSFIERMTNFDKNLPNEKVLPKHSLLYEYFTVYNELTKVKYVTEGMRKPAFLSGEQKKAIVDLLFKTNRKVTVKQLKEDYFKKIECFDSVEISGVEDRFNASLGTYHDLLKIIKDKDFLDNEENEDILEDIVLTLTLFEDREMIEERLKTYAHLFDDKVMKQLKRRRYTGWGRLSRKLINGIRDKQSGKTILDFLKSDGFANRNFMQLIHDDSLTFKEDIQKAQVSGQGDSLHEHIANLAGSPAIKKGILQTVKVVDELVKVMGRHKPENIVIEMARENQTTQKGQKNSRERMKRIEEGIKELGSQILKEHPVENTQLQNEKLYLYYLQNGRDMYVDQELDINRLSDYDVDHIVPQSFLKDDSIDNKVLTRSDKARGKSDNVPSEEVVKKMKNYWRQLLNAKLITQRKFDNLTKAERGGLSELDKAGFIKRQLVETRQITKHVAQILDSRMNTKYDENDKLIREVKVITLKSKLVSDFRKDFQFYKVREINNYHHAHDAYLNAVVGTALIKKYPKLESEFVYGDYKVYDVRKMIAKSEQEIGKATAKYFFYSNIMNFFKTEITLANGEIRKRPLIETNGETGEIVWDKGRDFATVRKVLSMPQVNIVKKTEVQTGGFSKESILPKRNSDKLIARKKDWDPKKYGGFDSPTVAYSVLVVAKVEKGKSKKLKSVKELLGITIMERSSFEKNPIDFLEAKGYKEVKKDLIIKLPKYSLFELENGRKRMLASAGELQKGNELALPSKYVNFLYLASHYEKLKGSPEDNEQKQLFVEQHKHYLDEIIEQISEFSKRVILADANLDKVLSAYNKHRDKPIREQAENIIHLFTLTNLGAPAAFKYFDTTIDRKRYTSTKEVLDATLIHQSITGLYETRIDLSQLGGDGGGGSPAPGGGGGTLNLEDEYRLYETSAEPEVSPGSTWLSDFPQAWAETGGMGLAVRQAPLIIPLKATSTPVSIKQYPMSQEAKLGIKPHIQRLLDQGILVPCQSPWNTPLLPVKKPGTNDYRPVQDLREVNKRVEDIHPTVPNPYNLLSGLPPSHRWYTVLDLKDAFFCLRLHPTSQPLFAFEWRDPGMGISGQLTWTRLPQGFKNSPTLFNEALHRDLADFRIQHPDLILLQYVDDILLAATSELDCQQGTRALLLTLGNLGYRASAKKAQLCQKQVKYLGYLLKEGQRWLTEARKETVMGQPTPKTPRQLREFLGKAGFCRLFIPGFAEMAAPLYPLTKPGTLFNWGPDQQKAYQEIKQALLTAPALGLPDLTKPFELFVDEKQGYAKGVLTQKLGPWRRPVAYLSKKLDPVAAGWPPCLRMVAAIAVLRKDAGKLTMGQPLVILAPHAVEALVKQPPDRWLSNARMTHYQAMLLDTDRVQFGPVVALNPATLLPLPEEGAPHDCLEILAETHGTRPDLTDQPIPDADHTWYTDGSSFLQEGQRKAGAAVTTETEVIWARALPAGTSAQRAELIALTQALKMAEGKRLNVYTDSRYAFATAHIHGEIYRRRGWLTSEGREIKNKSEILALLKALFLPKRLSIIHCLGHQKGDSAEARGNRLADQAAREAAIKTPPDTSTLLAGKRTADGSEFEKRTADGSEFESPKKKAKVE

SEQ ID NO: 1900 - protein, 2091 aa, synthetic construct
MPAAKRVKLDGGDKKYSIGLDIGTNSVGWAVITDEYKVPSKKFKVLGNTDRHSIKKNLIGALLFDSGETAEATRLKRTARRRYTRRKNRICYLQEIFSNEMAKVDDSFFHRLEESFLVEEDKKHERHPIFGNIVDEVAYHEKYPTIYHLRKKLVDSTDKADLRLIYLALAHMIKFRGHFLIEGDLNPDNSDVDKLFIQLVQTYNQLFEENPINASGVDAKAILSARLSKSRRLENLIAQLPGEKKNGLFGNLIALSLGLTPNFKSNFDLAEDAKLQLSKDTYDDDLDNLLAQIGDQYADLFLAAKNLSDAILLSDILRVNTEITKAPLSASMIKRYDEHHQDLTLLKALVRQQLPEKYKEIFFDQSKNGYAGYIDGGASQEEFYKFIKPILEKMDGTEELLVKLNREDLLRKQRTFDNGSIPHQIHLGELHAILRRQEDFYPFLKDNREKIEKILTFRIPYYVGPLARGNSRFAWMTRKSEETITPWNFEEVVDKGASAQSFIERMTNFDKNLPNEKVLPKHSLLYEYFTVYNELTKVKYVTEGMRKPAFLSGEQKKAIVDLLFKTNRKVTVKQLKEDYFKKIECFDSVEISGVEDRFNASLGTYHDLLKIIKDKDFLDNEENEDILEDIVLTLTLFEDREMIEERLKTYAHLFDDKVMKQLKRRRYTGWGRLSRKLINGIRDKQSGKTILDFLKSDGFANRNFMQLIHDDSLTFKEDIQKAQVSGQGDSLHEHIANLAGSPAIKKGILQTVKVVDELVKVMGRHKPENIVIEMARENQTTQKGQKNSRERMKRIEEGIKELGSQILKEHPVENTQLQNEKLYLYYLQNGRDMYVDQELDINRLSDYDVDHIVPQSFLKDDSIDNKVLTRSDKARGKSDNVPSEEVVKKMKNYWRQLLNAKLITQRKFDNLTKAERGGLSELDKAGFIKRQLVETRQITKHVAQILDSRMNTKYDENDKLIREVKVITLKSKLVSDFRKDFQFYKVREINNYHHAHDAYLNAVVGTALIKKYPKLESEFVYGDYKVYDVRKMIAKSEQEIGKATAKYFFYSNIMNFFKTEITLANGEIRKRPLIETNGETGEIVWDKGRDFATVRKVLSMPQVNIVKKTEVQTGGFSKESILPKRNSDKLIARKKDWDPKKYGGFDSPTVAYSVLVVAKVEKGKSKKLKSVKELLGITIMERSSFEKNPIDFLEAKGYKEVKKDLIIKLPKYSLFELENGRKRMLASAGELQKGNELALPSKYVNFLYLASHYEKLKGSPEDNEQKQLFVEQHKHYLDEIIEQISEFSKRVILADANLDKVLSAYNKHRDKPIREQAENIIHLFTLTNLGAPAAFKYFDTTIDRKRYTSTKEVLDATLIHQSITGLYETRIDLSQLGGDGGPAPGSSGGTLNLEDEYRLYETSAEPEVSPGSTWLSDFPQAWAETGGMGLAVRQAPLIIPLKATSTPVSIKQYPMSQEAKLGIKPHIQRLLDQGILVPCQSPWNTPLLPVKKPGTNDYRPVQDLREVNKRVEDIHPTVPNPYNLLSGLPPSHRWYTVLDLKDAFFCLRLHPTSQPLFAFEWRDPGMGISGQLTWTRLPQGFKNSPTLFNEALHRDLADFRIQHPDLILLQYVDDILLAATSELDCQQGTRALLLTLGNLGYRASAKKAQLCQKQVKYLGYLLKEGQRWLTEARKETVMGQPTPKTPRQLREFLGKAGFCRLFIPGFAEMAAPLYPLTKPGTLFNWGPDQQKAYQEIKQALLTAPALGLPDLTKPFELFVDEKQGYAKGVLTQKLGPWRRPVAYLSKKLDPVAAGWPPCLRMVAAIAVLRKDAGKLTMGQPLVILAPHAVEALVKQPPDRWLSNARMTHYQAMLLDTDRVQFGPVVALNPATLLPLPEEGAPHDCLEILAETHGTRPDLTDQPIPDADHTWYTDGSSFLQEGQRKAGAAVTTETEVIWARALPAGTSAQRAELIALTQALKMAEGKRLNVYTDSRYAFATAHIHGEIYRRRGWLTSEGREIKNKSEILALLKALFLPKRLSIIHCLGHQKGDSAEARGNRLADQAAREAAIKTPPDTSTLLAGKRTADGSEFEKRTADGSEFESPKKKAKVE

SEQ ID NO: 1901 - protein, 2096 aa, synthetic construct
MPAAKRVKLDGGDKKYSIGLDIGTNSVGWAVITDEYKVPSKKFKVLGNTDRHSIKKNLIGALLFDSGETAEATRLKRTARRRYTRRKNRICYLQEIFSNEMAKVDDSFFHRLEESFLVEEDKKHERHPIFGNIVDEVAYHEKYPTIYHLRKKLVDSTDKADLRLIYLALAHMIKFRGHFLIEGDLNPDNSDVDKLFIQLVQTYNQLFEENPINASGVDAKAILSARLSKSRRLENLIAQLPGEKKNGLFGNLIALSLGLTPNFKSNFDLAEDAKLQLSKDTYDDDLDNLLAQIGDQYADLFLAAKNLSDAILLSDILRVNTEITKAPLSASMIKRYDEHHQDLTLLKALVRQQLPEKYKEIFFDQSKNGYAGYIDGGASQEEFYKFIKPILEKMDGTEELLVKLNREDLLRKQRTFDNGSIPHQIHLGELHAILRRQEDFYPFLKDNREKIEKILTFRIPYYVGPLARGNSRFAWMTRKSEETITPWNFEEVVDKGASAQSFIERMTNFDKNLPNEKVLPKHSLLYEYFTVYNELTKVKYVTEGMRKPAFLSGEQKKAIVDLLFKTNRKVTVKQLKEDYFKKIECFDSVEISGVEDRFNASLGTYHDLLKIIKDKDFLDNEENEDILEDIVLTLTLFEDREMIEERLKTYAHLFDDKVMKQLKRRRYTGWGRLSRKLINGIRDKQSGKTILDFLKSDGFANRNFMQLIHDDSLTFKEDIQKAQVSGQGDSLHEHIANLAGSPAIKKGILQTVKVVDELVKVMGRHKPENIVIEMARENQTTQKGQKNSRERMKRIEEGIKELGSQILKEHPVENTQLQNEKLYLYYLQNGRDMYVDQELDINRLSDYDVDHIVPQSFLKDDSIDNKVLTRSDKARGKSDNVPSEEVVKKMKNYWRQLLNAKLITQRKFDNLTKAERGGLSELDKAGFIKRQLVETRQITKHVAQILDSRMNTKYDENDKLIREVKVITLKSKLVSDFRKDFQFYKVREINNYHHAHDAYLNAVVGTALIKKYPKLESEFVYGDYKVYDVRKMIAKSEQEIGKATAKYFFYSNIMNFFKTEITLANGEIRKRPLIETNGETGEIVWDKGRDFATVRKVLSMPQVNIVKKTEVQTGGFSKESILPKRNSDKLIARKKDWDPKKYGGFDSPTVAYSVLVVAKVEKGKSKKLKSVKELLGITIMERSSFEKNPIDFLEAKGYKEVKKDLIIKLPKYSLFELENGRKRMLASAGELQKGNELALPSKYVNFLYLASHYEKLKGSPEDNEQKQLFVEQHKHYLDEIIEQISEFSKRVILADANLDKVLSAYNKHRDKPIREQAENIIHLFTLTNLGAPAAFKYFDTTIDRKRYTSTKEVLDATLIHQSITGLYETRIDLSQLGGDGGGSSGGSEAAAKGGTLNLEDEYRLYETSAEPEVSPGSTWLSDFPQAWAETGGMGLAVRQAPLIIPLKATSTPVSIKQYPMSQEAKLGIKPHIQRLLDQGILVPCQSPWNTPLLPVKKPGTNDYRPVQDLREVNKRVEDIHPTVPNPYNLLSGLPPSHRWYTVLDLKDAFFCLRLHPTSQPLFAFEWRDPGMGISGQLTWTRLPQGFKNSPTLFNEALHRDLADFRIQHPDLILLQYVDDILLAATSELDCQQGTRALLLTLGNLGYRASAKKAQLCQKQVKYLGYLLKEGQRWLTEARKETVMGQPTPKTPRQLREFLGKAGFCRLFIPGFAEMAAPLYPLTKPGTLFNWGPDQQKAYQEIKQALLTAPALGLPDLTKPFELFVDEKQGYAKGVLTQKLGPWRRPVAYLSKKLDPVAAGWPPCLRMVAAIAVLRKDAGKLTMGQPLVILAPHAVEALVKQPPDRWLSNARMTHYQAMLLDTDRVQFGPVVALNPATLLPLPEEGAPHDCLEILAETHGTRPDLTDQPIPDADHTWYTDGSSFLQEGQRKAGAAVTTETEVIWARALPAGTSAQRAELIALTQALKMAEGKRLNVYTDSRYAFATAHIHGEIYRRRGWLTSEGREIKNKSEILALLKALFLPKRLSIIHCLGHQKGDSAEARGNRLADQAAREAAIKTPPDTSTLLAGKRTADGSEFEKRTADGSEFESPKKKAKVE

SEQ ID NO: 1902 - protein, 2094 aa, synthetic construct
MPAAKRVKLDGGDKKYSIGLDIGTNSVGWAVITDEYKVPSKKFKVLGNTDRHSIKKNLIGALLFDSGETAEATRLKRTARRRYTRRKNRICYLQEIFSNEMAKVDDSFFHRLEESFLVEEDKKHERHPIFGNIVDEVAYHEKYPTIYHLRKKLVDSTDKADLRLIYLALAHMIKFRGHFLIEGDLNPDNSDVDKLFIQLVQTYNQLFEENPINASGVDAKAILSARLSKSRRLENLIAQLPGEKKNGLFGNLIALSLGLTPNFKSNFDLAEDAKLQLSKDTYDDDLDNLLAQIGDQYADLFLAAKNLSDAILLSDILRVNTEITKAPLSASMIKRYDEHHQDLTLLKALVRQQLPEKYKEIFFDQSKNGYAGYIDGGASQEEFYKFIKPILEKMDGTEELLVKLNREDLLRKQRTFDNGSIPHQIHLGELHAILRRQEDFYPFLKDNREKIEKILTFRIPYYVGPLARGNSRFAWMTRKSEETITPWNFEEVVDKGASAQSFIERMTNFDKNLPNEKVLPKHSLLYEYFTVYNELTKVKYVTEGMRKPAFLSGEQKKAIVDLLFKTNRKVTVKQLKEDYFKKIECFDSVEISGVEDRFNASLGTYHDLLKIIKDKDFLDNEENEDILEDIVLTLTLFEDREMIEERLKTYAHLFDDKVMKQLKRRRYTGWGRLSRKLINGIRDKQSGKTILDFLKSDGFANRNFMQLIHDDSLTFKEDIQKAQVSGQGDSLHEHIANLAGSPAIKKGILQTVKVVDELVKVMGRHKPENIVIEMARENQTTQKGQKNSRERMKRIEEGIKELGSQILKEHPVENTQLQNEKLYLYYLQNGRDMYVDQELDINRLSDYDVDHIVPQSFLKDDSIDNKVLTRSDKARGKSDNVPSEEVVKKMKNYWRQLLNAKLITQRKFDNLTKAERGGLSELDKAGFIKRQLVETRQITKHVAQILDSRMNTKYDENDKLIREVKVITLKSKLVSDFRKDFQFYKVREINNYHHAHDAYLNAVVGTALIKKYPKLESEFVYGDYKVYDVRKMIAKSEQEIGKATAKYFFYSNIMNFFKTEITLANGEIRKRPLIETNGETGEIVWDKGRDFATVRKVLSMPQVNIVKKTEVQTGGFSKESILPKRNSDKLIARKKDWDPKKYGGFDSPTVAYSVLVVAKVEKGKSKKLKSVKELLGITIMERSSFEKNPIDFLEAKGYKEVKKDLIIKLPKYSLFELENGRKRMLASAGELQKGNELALPSKYVNFLYLASHYEKLKGSPEDNEQKQLFVEQHKHYLDEIIEQISEFSKRVILADANLDKVLSAYNKHRDKPIREQAENIIHLFTLTNLGAPAAFKYFDTTIDRKRYTSTKEVLDATLIHQSITGLYETRIDLSQLGGDGGPAPGGSGSSGGTLNLEDEYRLYETSAEPEVSPGSTWLSDFPQAWAETGGMGLAVRQAPLIIPLKATSTPVSIKQYPMSQEAKLGIKPHIQRLLDQGILVPCQSPWNTPLLPVKKPGTNDYRPVQDLREVNKRVEDIHPTVPNPYNLLSGLPPSHRWYTVLDLKDAFFCLRLHPTSQPLFAFEWRDPGMGISGQLTWTRLPQGFKNSPTLFNEALHRDLADFRIQHPDLILLQYVDDILLAATSELDCQQGTRALLLTLGNLGYRASAKKAQLCQKQVKYLGYLLKEGQRWLTEARKETVMGQPTPKTPRQLREFLGKAGFCRLFIPGFAEMAAPLYPLTKPGTLFNWGPDQQKAYQEIKQALLTAPALGLPDLTKPFELFVDEKQGYAKGVLTQKLGPWRRPVAYLSKKLDPVAAGWPPCLRMVAAIAVLRKDAGKLTMGQPLVILAPHAVEALVKQPPDRWLSNARMTHYQAMLLDTDRVQFGPVVALNPATLLPLPEEGAPHDCLEILAETHGTRPDLTDQPIPDADHTWYTDGSSFLQEGQRKAGAAVTTETEVIWARALPAGTSAQRAELIALTQALKMAEGKRLNVYTDSRYAFATAHIHGEIYRRRGWLTSEGREIKNKSEILALLKALFLPKRLSIIHCLGHQKGDSAEARGNRLADQAAREAAIKTPPDTSTLLAGKRTADGSEFEKRTADGSEFESPKKKAKVE

SEQ ID NO: 1903 - protein, 2094 aa, synthetic construct
MPAAKRVKLDGGDKKYSIGLDIGTNSVGWAVITDEYKVPSKKFKVLGNTDRHSIKKNLIGALLFDSGETAEATRLKRTARRRYTRRKNRICYLQEIFSNEMAKVDDSFFHRLEESFLVEEDKKHERHPIFGNIVDEVAYHEKYPTIYHLRKKLVDSTDKADLRLIYLALAHMIKFRGHFLIEGDLNPDNSDVDKLFIQLVQTYNQLFEENPINASGVDAKAILSARLSKSRRLENLIAQLPGEKKNGLFGNLIALSLGLTPNFKSNFDLAEDAKLQLSKDTYDDDLDNLLAQIGDQYADLFLAAKNLSDAILLSDILRVNTEITKAPLSASMIKRYDEHHQDLTLLKALVRQQLPEKYKEIFFDQSKNGYAGYIDGGASQEEFYKFIKPILEKMDGTEELLVKLNREDLLRKQRTFDNGSIPHQIHLGELHAILRRQEDFYPFLKDNREKIEKILTFRIPYYVGPLARGNSRFAWMTRKSEETITPWNFEEVVDKGASAQSFIERMTNFDKNLPNEKVLPKHSLLYEYFTVYNELTKVKYVTEGMRKPAFLSGEQKKAIVDLLFKTNRKVTVKQLKEDYFKKIECFDSVEISGVEDRFNASLGTYHDLLKIIKDKDFLDNEENEDILEDIVLTLTLFEDREMIEERLKTYAHLFDDKVMKQLKRRRYTGWGRLSRKLINGIRDKQSGKTILDFLKSDGFANRNFMQLIHDDSLTFKEDIQKAQVSGQGDSLHEHIANLAGSPAIKKGILQTVKVVDELVKVMGRHKPENIVIEMARENQTTQKGQKNSRERMKRIEEGIKELGSQILKEHPVENTQLQNEKLYLYYLQNGRDMYVDQELDINRLSDYDVDHIVPQSFLKDDSIDNKVLTRSDKARGKSDNVPSEEVVKKMKNYWRQLLNAKLITQRKFDNLTKAERGGLSELDKAGFIKRQLVETRQITKHVAQILDSRMNTKYDENDKLIREVKVITLKSKLVSDFRKDFQFYKVREINNYHHAHDAYLNAVVGTALIKKYPKLESEFVYGDYKVYDVRKMIAKSEQEIGKATAKYFFYSNIMNFFKTEITLANGEIRKRPLIETNGETGEIVWDKGRDFATVRKVLSMPQVNIVKKTEVQTGGFSKESILPKRNSDKLIARKKDWDPKKYGGFDSPTVAYSVLVVAKVEKGKSKKLKSVKELLGITIMERSSFEKNPIDFLEAKGYKEVKKDLIIKLPKYSLFELENGRKRMLASAGELQKGNELALPSKYVNFLYLASHYEKLKGSPEDNEQKQLFVEQHKHYLDEIIEQISEFSKRVILADANLDKVLSAYNKHRDKPIREQAENIIHLFTLTNLGAPAAFKYFDTTIDRKRYTSTKEVLDATLIHQSITGLYETRIDLSQLGGDGGGGSPAPGSSGGTLNLEDEYRLYETSAEPEVSPGSTWLSDFPQAWAETGGMGLAVRQAPLIIPLKATSTPVSIKQYPMSQEAKLGIKPHIQRLLDQGILVPCQSPWNTPLLPVKKPGTNDYRPVQDLREVNKRVEDIHPTVPNPYNLLSGLPPSHRWYTVLDLKDAFFCLRLHPTSQPLFAFEWRDPGMGISGQLTWTRLPQGFKNSPTLFNEALHRDLADFRIQHPDLILLQYVDDILLAATSELDCQQGTRALLLTLGNLGYRASAKKAQLCQKQVKYLGYLLKEGQRWLTEARKETVMGQPTPKTPRQLREFLGKAGFCRLFIPGFAEMAAPLYPLTKPGTLFNWGPDQQKAYQEIKQALLTAPALGLPDLTKPFELFVDEKQGYAKGVLTQKLGPWRRPVAYLSKKLDPVAAGWPPCLRMVAAIAVLRKDAGKLTMGQPLVILAPHAVEALVKQPPDRWLSNARMTHYQAMLLDTDRVQFGPVVALNPATLLPLPEEGAPHDCLEILAETHGTRPDLTDQPIPDADHTWYTDGSSFLQEGQRKAGAAVTTETEVIWARALPAGTSAQRAELIALTQALKMAEGKRLNVYTDSRYAFATAHIHGEIYRRRGWLTSEGREIKNKSEILALLKALFLPKRLSIIHCLGHQKGDSAEARGNRLADQAAREAAIKTPPDTSTLLAGKRTADGSEFEKRTADGSEFESPKKKAKVE

SEQ ID NO: 1904 - protein, 2091 aa, synthetic construct
MPAAKRVKLDGGDKKYSIGLDIGTNSVGWAVITDEYKVPSKKFKVLGNTDRHSIKKNLIGALLFDSGETAEATRLKRTARRRYTRRKNRICYLQEIFSNEMAKVDDSFFHRLEESFLVEEDKKHERHPIFGNIVDEVAYHEKYPTIYHLRKKLVDSTDKADLRLIYLALAHMIKFRGHFLIEGDLNPDNSDVDKLFIQLVQTYNQLFEENPINASGVDAKAILSARLSKSRRLENLIAQLPGEKKNGLFGNLIALSLGLTPNFKSNFDLAEDAKLQLSKDTYDDDLDNLLAQIGDQYADLFLAAKNLSDAILLSDILRVNTEITKAPLSASMIKRYDEHHQDLTLLKALVRQQLPEKYKEIFFDQSKNGYAGYIDGGASQEEFYKFIKPILEKMDGTEELLVKLNREDLLRKQRTFDNGSIPHQIHLGELHAILRRQEDFYPFLKDNREKIEKILTFRIPYYVGPLARGNSRFAWMTRKSEETITPWNFEEVVDKGASAQSFIERMTNFDKNLPNEKVLPKHSLLYEYFTVYNELTKVKYVTEGMRKPAFLSGEQKKAIVDLLFKTNRKVTVKQLKEDYFKKIECFDSVEISGVEDRFNASLGTYHDLLKIIKDKDFLDNEENEDILEDIVLTLTLFEDREMIEERLKTYAHLFDDKVMKQLKRRRYTGWGRLSRKLINGIRDKQSGKTILDFLKSDGFANRNFMQLIHDDSLTFKEDIQKAQVSGQGDSLHEHIANLAGSPAIKKGILQTVKVVDELVKVMGRHKPENIVIEMARENQTTQKGQKNSRERMKRIEEGIKELGSQILKEHPVENTQLQNEKLYLYYLQNGRDMYVDQELDINRLSDYDVDHIVPQSFLKDDSIDNKVLTRSDKARGKSDNVPSEEVVKKMKNYWRQLLNAKLITQRKFDNLTKAERGGLSELDKAGFIKRQLVETRQITKHVAQILDSRMNTKYDENDKLIREVKVITLKSKLVSDFRKDFQFYKVREINNYHHAHDAYLNAVVGTALIKKYPKLESEFVYGDYKVYDVRKMIAKSEQEIGKATAKYFFYSNIMNFFKTEITLANGEIRKRPLIETNGETGEIVWDKGRDFATVRKVLSMPQVNIVKKTEVQTGGFSKESILPKRNSDKLIARKKDWDPKKYGGFDSPTVAYSVLVVAKVEKGKSKKLKSVKELLGITIMERSSFEKNPIDFLEAKGYKEVKKDLIIKLPKYSLFELENGRKRMLASAGELQKGNELALPSKYVNFLYLASHYEKLKGSPEDNEQKQLFVEQHKHYLDEIIEQISEFSKRVILADANLDKVLSAYNKHRDKPIREQAENIIHLFTLTNLGAPAAFKYFDTTIDRKRYTSTKEVLDATLIHQSITGLYETRIDLSQLGGDGGGSSGGGGGTLNLEDEYRLYETSAEPEVSPGSTWLSDFPQAWAETGGMGLAVRQAPLIIPLKATSTPVSIKQYPMSQEAKLGIKPHIQRLLDQGILVPCQSPWNTPLLPVKKPGTNDYRPVQDLREVNKRVEDIHPTVPNPYNLLSGLPPSHRWYTVLDLKDAFFCLRLHPTSQPLFAFEWRDPGMGISGQLTWTRLPQGFKNSPTLFNEALHRDLADFRIQHPDLILLQYVDDILLAATSELDCQQGTRALLLTLGNLGYRASAKKAQLCQKQVKYLGYLLKEGQRWLTEARKETVMGQPTPKTPRQLREFLGKAGFCRLFIPGFAEMAAPLYPLTKPGTLFNWGPDQQKAYQEIKQALLTAPALGLPDLTKPFELFVDEKQGYAKGVLTQKLGPWRRPVAYLSKKLDPVAAGWPPCLRMVAAIAVLRKDAGKLTMGQPLVILAPHAVEALVKQPPDRWLSNARMTHYQAMLLDTDRVQFGPVVALNPATLLPLPEEGAPHDCLEILAETHGTRPDLTDQPIPDADHTWYTDGSSFLQEGQRKAGAAVTTETEVIWARALPAGTSAQRAELIALTQALKMAEGKRLNVYTDSRYAFATAHIHGEIYRRRGWLTSEGREIKNKSEILALLKALFLPKRLSIIHCLGHQKGDSAEARGNRLADQAAREAAIKTPPDTSTLLAGKRTADGSEFEKRTADGSEFESPKKKAKVE

SEQ ID NO: 1905 - protein, 2094 aa, synthetic construct
MPAAKRVKLDGGDKKYSIGLDIGTNSVGWAVITDEYKVPSKKFKVLGNTDRHSIKKNLIGALLFDSGETAEATRLKRTARRRYTRRKNRICYLQEIFSNEMAKVDDSFFHRLEESFLVEEDKKHERHPIFGNIVDEVAYHEKYPTIYHLRKKLVDSTDKADLRLIYLALAHMIKFRGHFLIEGDLNPDNSDVDKLFIQLVQTYNQLFEENPINASGVDAKAILSARLSKSRRLENLIAQLPGEKKNGLFGNLIALSLGLTPNFKSNFDLAEDAKLQLSKDTYDDDLDNLLAQIGDQYADLFLAAKNLSDAILLSDILRVNTEITKAPLSASMIKRYDEHHQDLTLLKALVRQQLPEKYKEIFFDQSKNGYAGYIDGGASQEEFYKFIKPILEKMDGTEELLVKLNREDLLRKQRTFDNGSIPHQIHLGELHAILRRQEDFYPFLKDNREKIEKILTFRIPYYVGPLARGNSRFAWMTRKSEETITPWNFEEVVDKGASAQSFIERMTNFDKNLPNEKVLPKHSLLYEYFTVYNELTKVKYVTEGMRKPAFLSGEQKKAIVDLLFKTNRKVTVKQLKEDYFKKIECFDSVEISGVEDRFNASLGTYHDLLKIIKDKDFLDNEENEDILEDIVLTLTLFEDREMIEERLKTYAHLFDDKVMKQLKRRRYTGWGRLSRKLINGIRDKQSGKTILDFLKSDGFANRNFMQLIHDDSLTFKEDIQKAQVSGQGDSLHEHIANLAGSPAIKKGILQTVKVVDELVKVMGRHKPENIVIEMARENQTTQKGQKNSRERMKRIEEGIKELGSQILKEHPVENTQLQNEKLYLYYLQNGRDMYVDQELDINRLSDYDVDHIVPQSFLKDDSIDNKVLTRSDKARGKSDNVPSEEVVKKMKNYWRQLLNAKLITQRKFDNLTKAERGGLSELDKAGFIKRQLVETRQITKHVAQILDSRMNTKYDENDKLIREVKVITLKSKLVSDFRKDFQFYKVREINNYHHAHDAYLNAVVGTALIKKYPKLESEFVYGDYKVYDVRKMIAKSEQEIGKATAKYFFYSNIMNFFKTEITLANGEIRKRPLIETNGETGEIVWDKGRDFATVRKVLSMPQVNIVKKTEVQTGGFSKESILPKRNSDKLIARKKDWDPKKYGGFDSPTVAYSVLVVAKVEKGKSKKLKSVKELLGITIMERSSFEKNPIDFLEAKGYKEVKKDLIIKLPKYSLFELENGRKRMLASAGELQKGNELALPSKYVNFLYLASHYEKLKGSPEDNEQKQLFVEQHKHYLDEIIEQISEFSKRVILADANLDKVLSAYNKHRDKPIREQAENIIHLFTLTNLGAPAAFKYFDTTIDRKRYTSTKEVLDATLIHQSITGLYETRIDLSQLGGDGGGGGGSSPAPGGTLNLEDEYRLYETSAEPEVSPGSTWLSDFPQAWAETGGMGLAVRQAPLIIPLKATSTPVSIKQYPMSQEAKLGIKPHIQRLLDQGILVPCQSPWNTPLLPVKKPGTNDYRPVQDLREVNKRVEDIHPTVPNPYNLLSGLPPSHRWYTVLDLKDAFFCLRLHPTSQPLFAFEWRDPGMGISGQLTWTRLPQGFKNSPTLFNEALHRDLADFRIQHPDLILLQYVDDILLAATSELDCQQGTRALLLTLGNLGYRASAKKAQLCQKQVKYLGYLLKEGQRWLTEARKETVMGQPTPKTPRQLREFLGKAGFCRLFIPGFAEMAAPLYPLTKPGTLFNWGPDQQKAYQEIKQALLTAPALGLPDLTKPFELFVDEKQGYAKGVLTQKLGPWRRPVAYLSKKLDPVAAGWPPCLRMVAAIAVLRKDAGKLTMGQPLVILAPHAVEALVKQPPDRWLSNARMTHYQAMLLDTDRVQFGPVVALNPATLLPLPEEGAPHDCLEILAETHGTRPDLTDQPIPDADHTWYTDGSSFLQEGQRKAGAAVTTETEVIWARALPAGTSAQRAELIALTQALKMAEGKRLNVYTDSRYAFATAHIHGEIYRRRGWLTSEGREIKNKSEILALLKALFLPKRLSIIHCLGHQKGDSAEARGNRLADQAAREAAIKTPPDTSTLLAGKRTADGSEFEKRTADGSEFESPKKKAKVE

SEQ ID NO: 1906 - protein, 2096 aa, synthetic construct
MPAAKRVKLDGGDKKYSIGLDIGTNSVGWAVITDEYKVPSKKFKVLGNTDRHSIKKNLIGALLFDSGETAEATRLKRTARRRYTRRKNRICYLQEIFSNEMAKVDDSFFHRLEESFLVEEDKKHERHPIFGNIVDEVAYHEKYPTIYHLRKKLVDSTDKADLRLIYLALAHMIKFRGHFLIEGDLNPDNSDVDKLFIQLVQTYNQLFEENPINASGVDAKAILSARLSKSRRLENLIAQLPGEKKNGLFGNLIALSLGLTPNFKSNFDLAEDAKLQLSKDTYDDDLDNLLAQIGDQYADLFLAAKNLSDAILLSDILRVNTEITKAPLSASMIKRYDEHHQDLTLLKALVRQQLPEKYKEIFFDQSKNGYAGYIDGGASQEEFYKFIKPILEKMDGTEELLVKLNREDLLRKQRTFDNGSIPHQIHLGELHAILRRQEDFYPFLKDNREKIEKILTFRIPYYVGPLARGNSRFAWMTRKSEETITPWNFEEVVDKGASAQSFIERMTNFDKNLPNEKVLPKHSLLYEYFTVYNELTKVKYVTEGMRKPAFLSGEQKKAIVDLLFKTNRKVTVKQLKEDYFKKIECFDSVEISGVEDRFNASLGTYHDLLKIIKDKDFLDNEENEDILEDIVLTLTLFEDREMIEERLKTYAHLFDDKVMKQLKRRRYTGWGRLSRKLINGIRDKQSGKTILDFLKSDGFANRNFMQLIHDDSLTFKEDIQKAQVSGQGDSLHEHIANLAGSPAIKKGILQTVKVVDELVKVMGRHKPENIVIEMARENQTTQKGQKNSRERMKRIEEGIKELGSQILKEHPVENTQLQNEKLYLYYLQNGRDMYVDQELDINRLSDYDVDHIVPQSFLKDDSIDNKVLTRSDKARGKSDNVPSEEVVKKMKNYWRQLLNAKLITQRKFDNLTKAERGGLSELDKAGFIKRQLVETRQITKHVAQILDSRMNTKYDENDKLIREVKVITLKSKLVSDFRKDFQFYKVREINNYHHAHDAYLNAVVGTALIKKYPKLESEFVYGDYKVYDVRKMIAKSEQEIGKATAKYFFYSNIMNFFKTEITLANGEIRKRPLIETNGETGEIVWDKGRDFATVRKVLSMPQVNIVKKTEVQTGGFSKESILPKRNSDKLIARKKDWDPKKYGGFDSPTVAYSVLVVAKVEKGKSKKLKSVKELLGITIMERSSFEKNPIDFLEAKGYKEVKKDLIIKLPKYSLFELENGRKRMLASAGELQKGNELALPSKYVNFLYLASHYEKLKGSPEDNEQKQLFVEQHKHYLDEIIEQISEFSKRVILADANLDKVLSAYNKHRDKPIREQAENIIHLFTLTNLGAPAAFKYFDTTIDRKRYTSTKEVLDATLIHQSITGLYETRIDLSQLGGDGGGGGGGSEAAAKGGTLNLEDEYRLYETSAEPEVSPGSTWLSDFPQAWAETGGMGLAVRQAPLIIPLKATSTPVSIKQYPMSQEAKLGIKPHIQRLLDQGILVPCQSPWNTPLLPVKKPGTNDYRPVQDLREVNKRVEDIHPTVPNPYNLLSGLPPSHRWYTVLDLKDAFFCLRLHPTSQPLFAFEWRDPGMGISGQLTWTRLPQGFKNSPTLFNEALHRDLADFRIQHPDLILLQYVDDILLAATSELDCQQGTRALLLTLGNLGYRASAKKAQLCQKQVKYLGYLLKEGQRWLTEARKETVMGQPTPKTPRQLREFLGKAGFCRLFIPGFAEMAAPLYPLTKPGTLFNWGPDQQKAYQEIKQALLTAPALGLPDLTKPFELFVDEKQGYAKGVLTQKLGPWRRPVAYLSKKLDPVAAGWPPCLRMVAAIAVLRKDAGKLTMGQPLVILAPHAVEALVKQPPDRWLSNARMTHYQAMLLDTDRVQFGPVVALNPATLLPLPEEGAPHDCLEILAETHGTRPDLTDQPIPDADHTWYTDGSSFLQEGQRKAGAAVTTETEVIWARALPAGTSAQRAELIALTQALKMAEGKRLNVYTDSRYAFATAHIHGEIYRRRGWLTSEGREIKNKSEILALLKALFLPKRLSIIHCLGHQKGDSAEARGNRLADQAAREAAIKTPPDTSTLLAGKRTADGSEFEKRTADGSEFESPKKKAKVE

SEQ ID NO: 1907 - protein, 2096 aa, synthetic construct
MPAAKRVKLDGGDKKYSIGLDIGTNSVGWAVITDEYKVPSKKFKVLGNTDRHSIKKNLIGALLFDSGETAEATRLKRTARRRYTRRKNRICYLQEIFSNEMAKVDDSFFHRLEESFLVEEDKKHERHPIFGNIVDEVAYHEKYPTIYHLRKKLVDSTDKADLRLIYLALAHMIKFRGHFLIEGDLNPDNSDVDKLFIQLVQTYNQLFEENPINASGVDAKAILSARLSKSRRLENLIAQLPGEKKNGLFGNLIALSLGLTPNFKSNFDLAEDAKLQLSKDTYDDDLDNLLAQIGDQYADLFLAAKNLSDAILLSDILRVNTEITKAPLSASMIKRYDEHHQDLTLLKALVRQQLPEKYKEIFFDQSKNGYAGYIDGGASQEEFYKFIKPILEKMDGTEELLVKLNREDLLRKQRTFDNGSIPHQIHLGELHAILRRQEDFYPFLKDNREKIEKILTFRIPYYVGPLARGNSRFAWMTRKSEETITPWNFEEVVDKGASAQSFIERMTNFDKNLPNEKVLPKHSLLYEYFTVYNELTKVKYVTEGMRKPAFLSGEQKKAIVDLLFKTNRKVTVKQLKEDYFKKIECFDSVEISGVEDRFNASLGTYHDLLKIIKDKDFLDNEENEDILEDIVLTLTLFEDREMIEERLKTYAHLFDDKVMKQLKRRRYTGWGRLSRKLINGIRDKQSGKTILDFLKSDGFANRNFMQLIHDDSLTFKEDIQKAQVSGQGDSLHEHIANLAGSPAIKKGILQTVKVVDELVKVMGRHKPENIVIEMARENQTTQKGQKNSRERMKRIEEGIKELGSQILKEHPVENTQLQNEKLYLYYLQNGRDMYVDQELDINRLSDYDVDHIVPQSFLKDDSIDNKVLTRSDKARGKSDNVPSEEVVKKMKNYWRQLLNAKLITQRKFDNLTKAERGGLSELDKAGFIKRQLVETRQITKHVAQILDSRMNTKYDENDKLIREVKVITLKSKLVSDFRKDFQFYKVREINNYHHAHDAYLNAVVGTALIKKYPKLESEFVYGDYKVYDVRKMIAKSEQEIGKATAKYFFYSNIMNFFKTEITLANGEIRKRPLIETNGETGEIVWDKGRDFATVRKVLSMPQVNIVKKTEVQTGGFSKESILPKRNSDKLIARKKDWDPKKYGGFDSPTVAYSVLVVAKVEKGKSKKLKSVKELLGITIMERSSFEKNPIDFLEAKGYKEVKKDLIIKLPKYSLFELENGRKRMLASAGELQKGNELALPSKYVNFLYLASHYEKLKGSPEDNEQKQLFVEQHKHYLDEIIEQISEFSKRVILADANLDKVLSAYNKHRDKPIREQAENIIHLFTLTNLGAPAAFKYFDTTIDRKRYTSTKEVLDATLIHQSITGLYETRIDLSQLGGDGGEAAAKGGSGGGGGTLNLEDEYRLYETSAEPEVSPGSTWLSDFPQAWAETGGMGLAVRQAPLIIPLKATSTPVSIKQYPMSQEAKLGIKPHIQRLLDQGILVPCQSPWNTPLLPVKKPGTNDYRPVQDLREVNKRVEDIHPTVPNPYNLLSGLPPSHRWYTVLDLKDAFFCLRLHPTSQPLFAFEWRDPGMGISGQLTWTRLPQGFKNSPTLFNEALHRDLADFRIQHPDLILLQYVDDILLAATSELDCQQGTRALLLTLGNLGYRASAKKAQLCQKQVKYLGYLLKEGQRWLTEARKETVMGQPTPKTPRQLREFLGKAGFCRLFIPGFAEMAAPLYPLTKPGTLFNWGPDQQKAYQEIKQALLTAPALGLPDLTKPFELFVDEKQGYAKGVLTQKLGPWRRPVAYLSKKLDPVAAGWPPCLRMVAAIAVLRKDAGKLTMGQPLVILAPHAVEALVKQPPDRWLSNARMTHYQAMLLDTDRVQFGPVVALNPATLLPLPEEGAPHDCLEILAETHGTRPDLTDQPIPDADHTWYTDGSSFLQEGQRKAGAAVTTETEVIWARALPAGTSAQRAELIALTQALKMAEGKRLNVYTDSRYAFATAHIHGEIYRRRGWLTSEGREIKNKSEILALLKALFLPKRLSIIHCLGHQKGDSAEARGNRLADQAAREAAIKTPPDTSTLLAGKRTADGSEFEKRTADGSEFESPKKKAKVE

SEQ ID NO: 1908 - protein, 2096 aa, synthetic construct
MPAAKRVKLDGGDKKYSIGLDIGTNSVGWAVITDEYKVPSKKFKVLGNTDRHSIKKNLIGALLFDSGETAEATRLKRTARRRYTRRKNRICYLQEIFSNEMAKVDDSFFHRLEESFLVEEDKKHERHPIFGNIVDEVAYHEKYPTIYHLRKKLVDSTDKADLRLIYLALAHMIKFRGHFLIEGDLNPDNSDVDKLFIQLVQTYNQLFEENPINASGVDAKAILSARLSKSRRLENLIAQLPGEKKNGLFGNLIALSLGLTPNFKSNFDLAEDAKLQLSKDTYDDDLDNLLAQIGDQYADLFLAAKNLSDAILLSDILRVNTEITKAPLSASMIKRYDEHHQDLTLLKALVRQQLPEKYKEIFFDQSKNGYAGYIDGGASQEEFYKFIKPILEKMDGTEELLVKLNREDLLRKQRTFDNGSIPHQIHLGELHAILRRQEDFYPFLKDNREKIEKILTFRIPYYVGPLARGNSRFAWMTRKSEETITPWNFEEVVDKGASAQSFIERMTNFDKNLPNEKVLPKHSLLYEYFTVYNELTKVKYVTEGMRKPAFLSGEQKKAIVDLLFKTNRKVTVKQLKEDYFKKIECFDSVEISGVEDRFNASLGTYHDLLKIIKDKDFLDNEENEDILEDIVLTLTLFEDREMIEERLKTYAHLFDDKVMKQLKRRRYTGWGRLSRKLINGIRDKQSGKTILDFLKSDGFANRNFMQLIHDDSLTFKEDIQKAQVSGQGDSLHEHIANLAGSPAIKKGILQTVKVVDELVKVMGRHKPENIVIEMARENQTTQKGQKNSRERMKRIEEGIKELGSQILKEHPVENTQLQNEKLYLYYLQNGRDMYVDQELDINRLSDYDVDHIVPQSFLKDDSIDNKVLTRSDKARGKSDNVPSEEVVKKMKNYWRQLLNAKLITQRKFDNLTKAERGGLSELDKAGFIKRQLVETRQITKHVAQILDSRMNTKYDENDKLIREVKVITLKSKLVSDFRKDFQFYKVREINNYHHAHDAYLNAVVGTALIKKYPKLESEFVYGDYKVYDVRKMIAKSEQEIGKATAKYFFYSNIMNFFKTEITLANGEIRKRPLIETNGETGEIVWDKGRDFATVRKVLSMPQVNIVKKTEVQTGGFSKESILPKRNSDKLIARKKDWDPKKYGGFDSPTVAYSVLVVAKVEKGKSKKLKSVKELLGITIMERSSFEKNPIDFLEAKGYKEVKKDLIIKLPKYSLFELENGRKRMLASAGELQKGNELALPSKYVNFLYLASHYEKLKGSPEDNEQKQLFVEQHKHYLDEIIEQISEFSKRVILADANLDKVLSAYNKHRDKPIREQAENIIHLFTLTNLGAPAAFKYFDTTIDRKRYTSTKEVLDATLIHQSITGLYETRIDLSQLGGDGGGGSPAPEAAAKGGTLNLEDEYRLYETSAEPEVSPGSTWLSDFPQAWAETGGMGLAVRQAPLIIPLKATSTPVSIKQYPMSQEAKLGIKPHIQRLLDQGILVPCQSPWNTPLLPVKKPGTNDYRPVQDLREVNKRVEDIHPTVPNPYNLLSGLPPSHRWYTVLDLKDAFFCLRLHPTSQPLFAFEWRDPGMGISGQLTWTRLPQGFKNSPTLFNEALHRDLADFRIQHPDLILLQYVDDILLAATSELDCQQGTRALLLTLGNLGYRASAKKAQLCQKQVKYLGYLLKEGQRWLTEARKETVMGQPTPKTPRQLREFLGKAGFCRLFIPGFAEMAAPLYPLTKPGTLFNWGPDQQKAYQEIKQALLTAPALGLPDLTKPFELFVDEKQGYAKGVLTQKLGPWRRPVAYLSKKLDPVAAGWPPCLRMVAAIAVLRKDAGKLTMGQPLVILAPHAVEALVKQPPDRWLSNARMTHYQAMLLDTDRVQFGPVVALNPATLLPLPEEGAPHDCLEILAETHGTRPDLTDQPIPDADHTWYTDGSSFLQEGQRKAGAAVTTETEVIWARALPAGTSAQRAELIALTQALKMAEGKRLNVYTDSRYAFATAHIHGEIYRRRGWLTSEGREIKNKSEILALLKALFLPKRLSIIHCLGHQKGDSAEARGNRLADQAAREAAIKTPPDTSTLLAGKRTADGSEFEKRTADGSEFESPKKKAKVE

SEQ ID NO: 1909 - protein, 2094 aa, synthetic construct
MPAAKRVKLDGGDKKYSIGLDIGTNSVGWAVITDEYKVPSKKFKVLGNTDRHSIKKNLIGALLFDSGETAEATRLKRTARRRYTRRKNRICYLQEIFSNEMAKVDDSFFHRLEESFLVEEDKKHERHPIFGNIVDEVAYHEKYPTIYHLRKKLVDSTDKADLRLIYLALAHMIKFRGHFLIEGDLNPDNSDVDKLFIQLVQTYNQLFEENPINASGVDAKAILSARLSKSRRLENLIAQLPGEKKNGLFGNLIALSLGLTPNFKSNFDLAEDAKLQLSKDTYDDDLDNLLAQIGDQYADLFLAAKNLSDAILLSDILRVNTEITKAPLSASMIKRYDEHHQDLTLLKALVRQQLPEKYKEIFFDQSKNGYAGYIDGGASQEEFYKFIKPILEKMDGTEELLVKLNREDLLRKQRTFDNGSIPHQIHLGELHAILRRQEDFYPFLKDNREKIEKILTFRIPYYVGPLARGNSRFAWMTRKSEETITPWNFEEVVDKGASAQSFIERMTNFDKNLPNEKVLPKHSLLYEYFTVYNELTKVKYVTEGMRKPAFLSGEQKKAIVDLLFKTNRKVTVKQLKEDYFKKIECFDSVEISGVEDRFNASLGTYHDLLKIIKDKDFLDNEENEDILEDIVLTLTLFEDREMIEERLKTYAHLFDDKVMKQLKRRRYTGWGRLSRKLINGIRDKQSGKTILDFLKSDGFANRNFMQLIHDDSLTFKEDIQKAQVSGQGDSLHEHIANLAGSPAIKKGILQTVKVVDELVKVMGRHKPENIVIEMARENQTTQKGQKNSRERMKRIEEGIKELGSQILKEHPVENTQLQNEKLYLYYLQNGRDMYVDQELDINRLSDYDVDHIVPQSFLKDDSIDNKVLTRSDKARGKSDNVPSEEVVKKMKNYWRQLLNAKLITQRKFDNLTKAERGGLSELDKAGFIKRQLVETRQITKHVAQILDSRMNTKYDENDKLIREVKVITLKSKLVSDFRKDFQFYKVREINNYHHAHDAYLNAVVGTALIKKYPKLESEFVYGDYKVYDVRKMIAKSEQEIGKATAKYFFYSNIMNFFKTEITLANGEIRKRPLIETNGETGEIVWDKGRDFATVRKVLSMPQVNIVKKTEVQTGGFSKESILPKRNSDKLIARKKDWDPKKYGGFDSPTVAYSVLVVAKVEKGKSKKLKSVKELLGITIMERSSFEKNPIDFLEAKGYKEVKKDLIIKLPKYSLFELENGRKRMLASAGELQKGNELALPSKYVNFLYLASHYEKLKGSPEDNEQKQLFVEQHKHYLDEIIEQISEFSKRVILADANLDKVLSAYNKHRDKPIREQAENIIHLFTLTNLGAPAAFKYFDTTIDRKRYTSTKEVLDATLIHQSITGLYETRIDLSQLGGDGGGSSGGGGGSGGTLNLEDEYRLYETSAEPEVSPGSTWLSDFPQAWAETGGMGLAVRQAPLIIPLKATSTPVSIKQYPMSQEAKLGIKPHIQRLLDQGILVPCQSPWNTPLLPVKKPGTNDYRPVQDLREVNKRVEDIHPTVPNPYNLLSGLPPSHRWYTVLDLKDAFFCLRLHPTSQPLFAFEWRDPGMGISGQLTWTRLPQGFKNSPTLFNEALHRDLADFRIQHPDLILLQYVDDILLAATSELDCQQGTRALLLTLGNLGYRASAKKAQLCQKQVKYLGYLLKEGQRWLTEARKETVMGQPTPKTPRQLREFLGKAGFCRLFIPGFAEMAAPLYPLTKPGTLFNWGPDQQKAYQEIKQALLTAPALGLPDLTKPFELFVDEKQGYAKGVLTQKLGPWRRPVAYLSKKLDPVAAGWPPCLRMVAAIAVLRKDAGKLTMGQPLVILAPHAVEALVKQPPDRWLSNARMTHYQAMLLDTDRVQFGPVVALNPATLLPLPEEGAPHDCLEILAETHGTRPDLTDQPIPDADHTWYTDGSSFLQEGQRKAGAAVTTETEVIWARALPAGTSAQRAELIALTQALKMAEGKRLNVYTDSRYAFATAHIHGEIYRRRGWLTSEGREIKNKSEILALLKALFLPKRLSIIHCLGHQKGDSAEARGNRLADQAAREAAIKTPPDTSTLLAGKRTADGSEFEKRTADGSEFESPKKKAKVE

SEQ ID NO: 1910 - protein, 2096 aa, synthetic construct
MPAAKRVKLDGGDKKYSIGLDIGTNSVGWAVITDEYKVPSKKFKVLGNTDRHSIKKNLIGALLFDSGETAEATRLKRTARRRYTRRKNRICYLQEIFSNEMAKVDDSFFHRLEESFLVEEDKKHERHPIFGNIVDEVAYHEKYPTIYHLRKKLVDSTDKADLRLIYLALAHMIKFRGHFLIEGDLNPDNSDVDKLFIQLVQTYNQLFEENPINASGVDAKAILSARLSKSRRLENLIAQLPGEKKNGLFGNLIALSLGLTPNFKSNFDLAEDAKLQLSKDTYDDDLDNLLAQIGDQYADLFLAAKNLSDAILLSDILRVNTEITKAPLSASMIKRYDEHHQDLTLLKALVRQQLPEKYKEIFFDQSKNGYAGYIDGGASQEEFYKFIKPILEKMDGTEELLVKLNREDLLRKQRTFDNGSIPHQIHLGELHAILRRQEDFYPFLKDNREKIEKILTFRIPYYVGPLARGNSRFAWMTRKSEETITPWNFEEVVDKGASAQSFIERMTNFDKNLPNEKVLPKHSLLYEYFTVYNELTKVKYVTEGMRKPAFLSGEQKKAIVDLLFKTNRKVTVKQLKEDYFKKIECFDSVEISGVEDRFNASLGTYHDLLKIIKDKDFLDNEENEDILEDIVLTLTLFEDREMIEERLKTYAHLFDDKVMKQLKRRRYTGWGRLSRKLINGIRDKQSGKTILDFLKSDGFANRNFMQLIHDDSLTFKEDIQKAQVSGQGDSLHEHIANLAGSPAIKKGILQTVKVVDELVKVMGRHKPENIVIEMARENQTTQKGQKNSRERMKRIEEGIKELGSQILKEHPVENTQLQNEKLYLYYLQNGRDMYVDQELDINRLSDYDVDHIVPQSFLKDDSIDNKVLTRSDKARGKSDNVPSEEVVKKMKNYWRQLLNAKLITQRKFDNLTKAERGGLSELDKAGFIKRQLVETRQITKHVAQILDSRMNTKYDENDKLIREVKVITLKSKLVSDFRKDFQFYKVREINNYHHAHDAYLNAVVGTALIKKYPKLESEFVYGDYKVYDVRKMIAKSEQEIGKATAKYFFYSNIMNFFKTEITLANGEIRKRPLIETNGETGEIVWDKGRDFATVRKVLSMPQVNIVKKTEVQTGGFSKESILPKRNSDKLIARKKDWDPKKYGGFDSPTVAYSVLVVAKVEKGKSKKLKSVKELLGITIMERSSFEKNPIDFLEAKGYKEVKKDLIIKLPKYSLFELENGRKRMLASAGELQKGNELALPSKYVNFLYLASHYEKLKGSPEDNEQKQLFVEQHKHYLDEIIEQISEFSKRVILADANLDKVLSAYNKHRDKPIREQAENIIHLFTLTNLGAPAAFKYFDTTIDRKRYTSTKEVLDATLIHQSITGLYETRIDLSQLGGDGGGSSEAAAKGGSGGTLNLEDEYRLYETSAEPEVSPGSTWLSDFPQAWAETGGMGLAVRQAPLIIPLKATSTPVSIKQYPMSQEAKLGIKPHIQRLLDQGILVPCQSPWNTPLLPVKKPGTNDYRPVQDLREVNKRVEDIHPTVPNPYNLLSGLPPSHRWYTVLDLKDAFFCLRLHPTSQPLFAFEWRDPGMGISGQLTWTRLPQGFKNSPTLFNEALHRDLADFRIQHPDLILLQYVDDILLAATSELDCQQGTRALLLTLGNLGYRASAKKAQLCQKQVKYLGYLLKEGQRWLTEARKETVMGQPTPKTPRQLREFLGKAGFCRLFIPGFAEMAAPLYPLTKPGTLFNWGPDQQKAYQEIKQALLTAPALGLPDLTKPFELFVDEKQGYAKGVLTQKLGPWRRPVAYLSKKLDPVAAGWPPCLRMVAAIAVLRKDAGKLTMGQPLVILAPHAVEALVKQPPDRWLSNARMTHYQAMLLDTDRVQFGPVVALNPATLLPLPEEGAPHDCLEILAETHGTRPDLTDQPIPDADHTWYTDGSSFLQEGQRKAGAAVTTETEVIWARALPAGTSAQRAELIALTQALKMAEGKRLNVYTDSRYAFATAHIHGEIYRRRGWLTSEGREIKNKSEILALLKALFLPKRLSIIHCLGHQKGDSAEARGNRLADQAAREAAIKTPPDTSTLLAGKRTADGSEFEKRTADGSEFESPKKKAKVE

SEQ ID NO: 1911 - protein, 2091 aa, synthetic construct
MPAAKRVKLDGGDKKYSIGLDIGTNSVGWAVITDEYKVPSKKFKVLGNTDRHSIKKNLIGALLFDSGETAEATRLKRTARRRYTRRKNRICYLQEIFSNEMAKVDDSFFHRLEESFLVEEDKKHERHPIFGNIVDEVAYHEKYPTIYHLRKKLVDSTDKADLRLIYLALAHMIKFRGHFLIEGDLNPDNSDVDKLFIQLVQTYNQLFEENPINASGVDAKAILSARLSKSRRLENLIAQLPGEKKNGLFGNLIALSLGLTPNFKSNFDLAEDAKLQLSKDTYDDDLDNLLAQIGDQYADLFLAAKNLSDAILLSDILRVNTEITKAPLSASMIKRYDEHHQDLTLLKALVRQQLPEKYKEIFFDQSKNGYAGYIDGGASQEEFYKFIKPILEKMDGTEELLVKLNREDLLRKQRTFDNGSIPHQIHLGELHAILRRQEDFYPFLKDNREKIEKILTFRIPYYVGPLARGNSRFAWMTRKSEETITPWNFEEVVDKGASAQSFIERMTNFDKNLPNEKVLPKHSLLYEYFTVYNELTKVKYVTEGMRKPAFLSGEQKKAIVDLLFKTNRKVTVKQLKEDYFKKIECFDSVEISGVEDRFNASLGTYHDLLKIIKDKDFLDNEENEDILEDIVLTLTLFEDREMIEERLKTYAHLFDDKVMKQLKRRRYTGWGRLSRKLINGIRDKQSGKTILDFLKSDGFANRNFMQLIHDDSLTFKEDIQKAQVSGQGDSLHEHIANLAGSPAIKKGILQTVKVVDELVKVMGRHKPENIVIEMARENQTTQKGQKNSRERMKRIEEGIKELGSQILKEHPVENTQLQNEKLYLYYLQNGRDMYVDQELDINRLSDYDVDHIVPQSFLKDDSIDNKVLTRSDKARGKSDNVPSEEVVKKMKNYWRQLLNAKLITQRKFDNLTKAERGGLSELDKAGFIKRQLVETRQITKHVAQILDSRMNTKYDENDKLIREVKVITLKSKLVSDFRKDFQFYKVREINNYHHAHDAYLNAVVGTALIKKYPKLESEFVYGDYKVYDVRKMIAKSEQEIGKATAKYFFYSNIMNFFKTEITLANGEIRKRPLIETNGETGEIVWDKGRDFATVRKVLSMPQVNIVKKTEVQTGGFSKESILPKRNSDKLIARKKDWDPKKYGGFDSPTVAYSVLVVAKVEKGKSKKLKSVKELLGITIMERSSFEKNPIDFLEAKGYKEVKKDLIIKLPKYSLFELENGRKRMLASAGELQKGNELALPSKYVNFLYLASHYEKLKGSPEDNEQKQLFVEQHKHYLDEIIEQISEFSKRVILADANLDKVLSAYNKHRDKPIREQAENIIHLFTLTNLGAPAAFKYFDTTIDRKRYTSTKEVLDATLIHQSITGLYETRIDLSQLGGDGGGGSGSSGGTLNLEDEYRLYETSAEPEVSPGSTWLSDFPQAWAETGGMGLAVRQAPLIIPLKATSTPVSIKQYPMSQEAKLGIKPHIQRLLDQGILVPCQSPWNTPLLPVKKPGTNDYRPVQDLREVNKRVEDIHPTVPNPYNLLSGLPPSHRWYTVLDLKDAFFCLRLHPTSQPLFAFEWRDPGMGISGQLTWTRLPQGFKNSPTLFNEALHRDLADFRIQHPDLILLQYVDDILLAATSELDCQQGTRALLLTLGNLGYRASAKKAQLCQKQVKYLGYLLKEGQRWLTEARKETVMGQPTPKTPRQLREFLGKAGFCRLFIPGFAEMAAPLYPLTKPGTLFNWGPDQQKAYQEIKQALLTAPALGLPDLTKPFELFVDEKQGYAKGVLTQKLGPWRRPVAYLSKKLDPVAAGWPPCLRMVAAIAVLRKDAGKLTMGQPLVILAPHAVEALVKQPPDRWLSNARMTHYQAMLLDTDRVQFGPVVALNPATLLPLPEEGAPHDCLEILAETHGTRPDLTDQPIPDADHTWYTDGSSFLQEGQRKAGAAVTTETEVIWARALPAGTSAQRAELIALTQALKMAEGKRLNVYTDSRYAFATAHIHGEIYRRRGWLTSEGREIKNKSEILALLKALFLPKRLSIIHCLGHQKGDSAEARGNRLADQAAREAAIKTPPDTSTLLAGKRTADGSEFEKRTADGSEFESPKKKAKVE

SEQ ID NO: 1912 - protein, 2096 aa, synthetic construct
MPAAKRVKLDGGDKKYSIGLDIGTNSVGWAVITDEYKVPSKKFKVLGNTDRHSIKKNLIGALLFDSGETAEATRLKRTARRRYTRRKNRICYLQEIFSNEMAKVDDSFFHRLEESFLVEEDKKHERHPIFGNIVDEVAYHEKYPTIYHLRKKLVDSTDKADLRLIYLALAHMIKFRGHFLIEGDLNPDNSDVDKLFIQLVQTYNQLFEENPINASGVDAKAILSARLSKSRRLENLIAQLPGEKKNGLFGNLIALSLGLTPNFKSNFDLAEDAKLQLSKDTYDDDLDNLLAQIGDQYADLFLAAKNLSDAILLSDILRVNTEITKAPLSASMIKRYDEHHQDLTLLKALVRQQLPEKYKEIFFDQSKNGYAGYIDGGASQEEFYKFIKPILEKMDGTEELLVKLNREDLLRKQRTFDNGSIPHQIHLGELHAILRRQEDFYPFLKDNREKIEKILTFRIPYYVGPLARGNSRFAWMTRKSEETITPWNFEEVVDKGASAQSFIERMTNFDKNLPNEKVLPKHSLLYEYFTVYNELTKVKYVTEGMRKPAFLSGEQKKAIVDLLFKTNRKVTVKQLKEDYFKKIECFDSVEISGVEDRFNASLGTYHDLLKIIKDKDFLDNEENEDILEDIVLTLTLFEDREMIEERLKTYAHLFDDKVMKQLKRRRYTGWGRLSRKLINGIRDKQSGKTILDFLKSDGFANRNFMQLIHDDSLTFKEDIQKAQVSGQGDSLHEHIANLAGSPAIKKGILQTVKVVDELVKVMGRHKPENIVIEMARENQTTQKGQKNSRERMKRIEEGIKELGSQILKEHPVENTQLQNEKLYLYYLQNGRDMYVDQELDINRLSDYDVDHIVPQSFLKDDSIDNKVLTRSDKARGKSDNVPSEEVVKKMKNYWRQLLNAKLITQRKFDNLTKAERGGLSELDKAGFIKRQLVETRQITKHVAQILDSRMNTKYDENDKLIREVKVITLKSKLVSDFRKDFQFYKVREINNYHHAHDAYLNAVVGTALIKKYPKLESEFVYGDYKVYDVRKMIAKSEQEIGKATAKYFFYSNIMNFFKTEITLANGEIRKRPLIETNGETGEIVWDKGRDFATVRKVLSMPQVNIVKKTEVQTGGFSKESILPKRNSDKLIARKKDWDPKKYGGFDSPTVAYSVLVVAKVEKGKSKKLKSVKELLGITIMERSSFEKNPIDFLEAKGYKEVKKDLIIKLPKYSLFELENGRKRMLASAGELQKGNELALPSKYVNFLYLASHYEKLKGSPEDNEQKQLFVEQHKHYLDEIIEQISEFSKRVILADANLDKVLSAYNKHRDKPIREQAENIIHLFTLTNLGAPAAFKYFDTTIDRKRYTSTKEVLDATLIHQSITGLYETRIDLSQLGGDGGPAPGSSEAAAKGGTLNLEDEYRLYETSAEPEVSPGSTWLSDFPQAWAETGGMGLAVRQAPLIIPLKATSTPVSIKQYPMSQEAKLGIKPHIQRLLDQGILVPCQSPWNTPLLPVKKPGTNDYRPVQDLREVNKRVEDIHPTVPNPYNLLSGLPPSHRWYTVLDLKDAFFCLRLHPTSQPLFAFEWRDPGMGISGQLTWTRLPQGFKNSPTLFNEALHRDLADFRIQHPDLILLQYVDDILLAATSELDCQQGTRALLLTLGNLGYRASAKKAQLCQKQVKYLGYLLKEGQRWLTEARKETVMGQPTPKTPRQLREFLGKAGFCRLFIPGFAEMAAPLYPLTKPGTLFNWGPDQQKAYQEIKQALLTAPALGLPDLTKPFELFVDEKQGYAKGVLTQKLGPWRRPVAYLSKKLDPVAAGWPPCLRMVAAIAVLRKDAGKLTMGQPLVILAPHAVEALVKQPPDRWLSNARMTHYQAMLLDTDRVQFGPVVALNPATLLPLPEEGAPHDCLEILAETHGTRPDLTDQPIPDADHTWYTDGSSFLQEGQRKAGAAVTTETEVIWARALPAGTSAQRAELIALTQALKMAEGKRLNVYTDSRYAFATAHIHGEIYRRRGWLTSEGREIKNKSEILALLKALFLPKRLSIIHCLGHQKGDSAEARGNRLADQAAREAAIKTPPDTSTLLAGKRTADGSEFEKRTADGSEFESPKKKAKVE

SEQ ID NO: 1913 - protein, 2096 aa, synthetic construct
MPAAKRVKLDGGDKKYSIGLDIGTNSVGWAVITDEYKVPSKKFKVLGNTDRHSIKKNLIGALLFDSGETAEATRLKRTARRRYTRRKNRICYLQEIFSNEMAKVDDSFFHRLEESFLVEEDKKHERHPIFGNIVDEVAYHEKYPTIYHLRKKLVDSTDKADLRLIYLALAHMIKFRGHFLIEGDLNPDNSDVDKLFIQLVQTYNQLFEENPINASGVDAKAILSARLSKSRRLENLIAQLPGEKKNGLFGNLIALSLGLTPNFKSNFDLAEDAKLQLSKDTYDDDLDNLLAQIGDQYADLFLAAKNLSDAILLSDILRVNTEITKAPLSASMIKRYDEHHQDLTLLKALVRQQLPEKYKEIFFDQSKNGYAGYIDGGASQEEFYKFIKPILEKMDGTEELLVKLNREDLLRKQRTFDNGSIPHQIHLGELHAILRRQEDFYPFLKDNREKIEKILTFRIPYYVGPLARGNSRFAWMTRKSEETITPWNFEEVVDKGASAQSFIERMTNFDKNLPNEKVLPKHSLLYEYFTVYNELTKVKYVTEGMRKPAFLSGEQKKAIVDLLFKTNRKVTVKQLKEDYFKKIECFDSVEISGVEDRFNASLGTYHDLLKIIKDKDFLDNEENEDILEDIVLTLTLFEDREMIEERLKTYAHLFDDKVMKQLKRRRYTGWGRLSRKLINGIRDKQSGKTILDFLKSDGFANRNFMQLIHDDSLTFKEDIQKAQVSGQGDSLHEHIANLAGSPAIKKGILQTVKVVDELVKVMGRHKPENIVIEMARENQTTQKGQKNSRERMKRIEEGIKELGSQILKEHPVENTQLQNEKLYLYYLQNGRDMYVDQELDINRLSDYDVDHIVPQSFLKDDSIDNKVLTRSDKARGKSDNVPSEEVVKKMKNYWRQLLNAKLITQRKFDNLTKAERGGLSELDKAGFIKRQLVETRQITKHVAQILDSRMNTKYDENDKLIREVKVITLKSKLVSDFRKDFQFYKVREINNYHHAHDAYLNAVVGTALIKKYPKLESEFVYGDYKVYDVRKMIAKSEQEIGKATAKYFFYSNIMNFFKTEITLANGEIRKRPLIETNGETGEIVWDKGRDFATVRKVLSMPQVNIVKKTEVQTGGFSKESILPKRNSDKLIARKKDWDPKKYGGFDSPTVAYSVLVVAKVEKGKSKKLKSVKELLGITIMERSSFEKNPIDFLEAKGYKEVKKDLIIKLPKYSLFELENGRKRMLASAGELQKGNELALPSKYVNFLYLASHYEKLKGSPEDNEQKQLFVEQHKHYLDEIIEQISEFSKRVILADANLDKVLSAYNKHRDKPIREQAENIIHLFTLTNLGAPAAFKYFDTTIDRKRYTSTKEVLDATLIHQSITGLYETRIDLSQLGGDGGEAAAKGSSGGSGGTLNLEDEYRLYETSAEPEVSPGSTWLSDFPQAWAETGGMGLAVRQAPLIIPLKATSTPVSIKQYPMSQEAKLGIKPHIQRLLDQGILVPCQSPWNTPLLPVKKPGTNDYRPVQDLREVNKRVEDIHPTVPNPYNLLSGLPPSHRWYTVLDLKDAFFCLRLHPTSQPLFAFEWRDPGMGISGQLTWTRLPQGFKNSPTLFNEALHRDLADFRIQHPDLILLQYVDDILLAATSELDCQQGTRALLLTLGNLGYRASAKKAQLCQKQVKYLGYLLKEGQRWLTEARKETVMGQPTPKTPRQLREFLGKAGFCRLFIPGFAEMAAPLYPLTKPGTLFNWGPDQQKAYQEIKQALLTAPALGLPDLTKPFELFVDEKQGYAKGVLTQKLGPWRRPVAYLSKKLDPVAAGWPPCLRMVAAIAVLRKDAGKLTMGQPLVILAPHAVEALVKQPPDRWLSNARMTHYQAMLLDTDRVQFGPVVALNPATLLPLPEEGAPHDCLEILAETHGTRPDLTDQPIPDADHTWYTDGSSFLQEGQRKAGAAVTTETEVIWARALPAGTSAQRAELIALTQALKMAEGKRLNVYTDSRYAFATAHIHGEIYRRRGWLTSEGREIKNKSEILALLKALFLPKRLSIIHCLGHQKGDSAEARGNRLADQAAREAAIKTPPDTSTLLAGKRTADGSEFEKRTADGSEFESPKKKAKVE

SEQ ID NO: 1914 - protein, 2091 aa, synthetic construct
MPAAKRVKLDGGDKKYSIGLDIGTNSVGWAVITDEYKVPSKKFKVLGNTDRHSIKKNLIGALLFDSGETAEATRLKRTARRRYTRRKNRICYLQEIFSNEMAKVDDSFFHRLEESFLVEEDKKHERHPIFGNIVDEVAYHEKYPTIYHLRKKLVDSTDKADLRLIYLALAHMIKFRGHFLIEGDLNPDNSDVDKLFIQLVQTYNQLFEENPINASGVDAKAILSARLSKSRRLENLIAQLPGEKKNGLFGNLIALSLGLTPNFKSNFDLAEDAKLQLSKDTYDDDLDNLLAQIGDQYADLFLAAKNLSDAILLSDILRVNTEITKAPLSASMIKRYDEHHQDLTLLKALVRQQLPEKYKEIFFDQSKNGYAGYIDGGASQEEFYKFIKPILEKMDGTEELLVKLNREDLLRKQRTFDNGSIPHQIHLGELHAILRRQEDFYPFLKDNREKIEKILTFRIPYYVGPLARGNSRFAWMTRKSEETITPWNFEEVVDKGASAQSFIERMTNFDKNLPNEKVLPKHSLLYEYFTVYNELTKVKYVTEGMRKPAFLSGEQKKAIVDLLFKTNRKVTVKQLKEDYFKKIECFDSVEISGVEDRFNASLGTYHDLLKIIKDKDFLDNEENEDILEDIVLTLTLFEDREMIEERLKTYAHLFDDKVMKQLKRRRYTGWGRLSRKLINGIRDKQSGKTILDFLKSDGFANRNFMQLIHDDSLTFKEDIQKAQVSGQGDSLHEHIANLAGSPAIKKGILQTVKVVDELVKVMGRHKPENIVIEMARENQTTQKGQKNSRERMKRIEEGIKELGSQILKEHPVENTQLQNEKLYLYYLQNGRDMYVDQELDINRLSDYDVDHIVPQSFLKDDSIDNKVLTRSDKARGKSDNVPSEEVVKKMKNYWRQLLNAKLITQRKFDNLTKAERGGLSELDKAGFIKRQLVETRQITKHVAQILDSRMNTKYDENDKLIREVKVITLKSKLVSDFRKDFQFYKVREINNYHHAHDAYLNAVVGTALIKKYPKLESEFVYGDYKVYDVRKMIAKSEQEIGKATAKYFFYSNIMNFFKTEITLANGEIRKRPLIETNGETGEIVWDKGRDFATVRKVLSMPQVNIVKKTEVQTGGFSKESILPKRNSDKLIARKKDWDPKKYGGFDSPTVAYSVLVVAKVEKGKSKKLKSVKELLGITIMERSSFEKNPIDFLEAKGYKEVKKDLIIKLPKYSLFELENGRKRMLASAGELQKGNELALPSKYVNFLYLASHYEKLKGSPEDNEQKQLFVEQHKHYLDEIIEQISEFSKRVILADANLDKVLSAYNKHRDKPIREQAENIIHLFTLTNLGAPAAFKYFDTTIDRKRYTSTKEVLDATLIHQSITGLYETRIDLSQLGGDGGGGSPAPGGTLNLEDEYRLYETSAEPEVSPGSTWLSDFPQAWAETGGMGLAVRQAPLIIPLKATSTPVSIKQYPMSQEAKLGIKPHIQRLLDQGILVPCQSPWNTPLLPVKKPGTNDYRPVQDLREVNKRVEDIHPTVPNPYNLLSGLPPSHRWYTVLDLKDAFFCLRLHPTSQPLFAFEWRDPGMGISGQLTWTRLPQGFKNSPTLFNEALHRDLADFRIQHPDLILLQYVDDILLAATSELDCQQGTRALLLTLGNLGYRASAKKAQLCQKQVKYLGYLLKEGQRWLTEARKETVMGQPTPKTPRQLREFLGKAGFCRLFIPGFAEMAAPLYPLTKPGTLFNWGPDQQKAYQEIKQALLTAPALGLPDLTKPFELFVDEKQGYAKGVLTQKLGPWRRPVAYLSKKLDPVAAGWPPCLRMVAAIAVLRKDAGKLTMGQPLVILAPHAVEALVKQPPDRWLSNARMTHYQAMLLDTDRVQFGPVVALNPATLLPLPEEGAPHDCLEILAETHGTRPDLTDQPIPDADHTWYTDGSSFLQEGQRKAGAAVTTETEVIWARALPAGTSAQRAELIALTQALKMAEGKRLNVYTDSRYAFATAHIHGEIYRRRGWLTSEGREIKNKSEILALLKALFLPKRLSIIHCLGHQKGDSAEARGNRLADQAAREAAIKTPPDTSTLLAGKRTADGSEFEKRTADGSEFESPKKKAKVE

SEQ ID NO: 1915 - protein, 2096 aa, synthetic construct
MPAAKRVKLDGGDKKYSIGLDIGTNSVGWAVITDEYKVPSKKFKVLGNTDRHSIKKNLIGALLFDSGETAEATRLKRTARRRYTRRKNRICYLQEIFSNEMAKVDDSFFHRLEESFLVEEDKKHERHPIFGNIVDEVAYHEKYPTIYHLRKKLVDSTDKADLRLIYLALAHMIKFRGHFLIEGDLNPDNSDVDKLFIQLVQTYNQLFEENPINASGVDAKAILSARLSKSRRLENLIAQLPGEKKNGLFGNLIALSLGLTPNFKSNFDLAEDAKLQLSKDTYDDDLDNLLAQIGDQYADLFLAAKNLSDAILLSDILRVNTEITKAPLSASMIKRYDEHHQDLTLLKALVRQQLPEKYKEIFFDQSKNGYAGYIDGGASQEEFYKFIKPILEKMDGTEELLVKLNREDLLRKQRTFDNGSIPHQIHLGELHAILRRQEDFYPFLKDNREKIEKILTFRIPYYVGPLARGNSRFAWMTRKSEETITPWNFEEVVDKGASAQSFIERMTNFDKNLPNEKVLPKHSLLYEYFTVYNELTKVKYVTEGMRKPAFLSGEQKKAIVDLLFKTNRKVTVKQLKEDYFKKIECFDSVEISGVEDRFNASLGTYHDLLKIIKDKDFLDNEENEDILEDIVLTLTLFEDREMIEERLKTYAHLFDDKVMKQLKRRRYTGWGRLSRKLINGIRDKQSGKTILDFLKSDGFANRNFMQLIHDDSLTFKEDIQKAQVSGQGDSLHEHIANLAGSPAIKKGILQTVKVVDELVKVMGRHKPENIVIEMARENQTTQKGQKNSRERMKRIEEGIKELGSQILKEHPVENTQLQNEKLYLYYLQNGRDMYVDQELDINRLSDYDVDHIVPQSFLKDDSIDNKVLTRSDKARGKSDNVPSEEVVKKMKNYWRQLLNAKLITQRKFDNLTKAERGGLSELDKAGFIKRQLVETRQITKHVAQILDSRMNTKYDENDKLIREVKVITLKSKLVSDFRKDFQFYKVREINNYHHAHDAYLNAVVGTALIKKYPKLESEFVYGDYKVYDVRKMIAKSEQEIGKATAKYFFYSNIMNFFKTEITLANGEIRKRPLIETNGETGEIVWDKGRDFATVRKVLSMPQVNIVKKTEVQTGGFSKESILPKRNSDKLIARKKDWDPKKYGGFDSPTVAYSVLVVAKVEKGKSKKLKSVKELLGITIMERSSFEKNPIDFLEAKGYKEVKKDLIIKLPKYSLFELENGRKRMLASAGELQKGNELALPSKYVNFLYLASHYEKLKGSPEDNEQKQLFVEQHKHYLDEIIEQISEFSKRVILADANLDKVLSAYNKHRDKPIREQAENIIHLFTLTNLGAPAAFKYFDTTIDRKRYTSTKEVLDATLIHQSITGLYETRIDLSQLGGDGGGGSEAAAKGGGGGTLNLEDEYRLYETSAEPEVSPGSTWLSDFPQAWAETGGMGLAVRQAPLIIPLKATSTPVSIKQYPMSQEAKLGIKPHIQRLLDQGILVPCQSPWNTPLLPVKKPGTNDYRPVQDLREVNKRVEDIHPTVPNPYNLLSGLPPSHRWYTVLDLKDAFFCLRLHPTSQPLFAFEWRDPGMGISGQLTWTRLPQGFKNSPTLFNEALHRDLADFRIQHPDLILLQYVDDILLAATSELDCQQGTRALLLTLGNLGYRASAKKAQLCQKQVKYLGYLLKEGQRWLTEARKETVMGQPTPKTPRQLREFLGKAGFCRLFIPGFAEMAAPLYPLTKPGTLFNWGPDQQKAYQEIKQALLTAPALGLPDLTKPFELFVDEKQGYAKGVLTQKLGPWRRPVAYLSKKLDPVAAGWPPCLRMVAAIAVLRKDAGKLTMGQPLVILAPHAVEALVKQPPDRWLSNARMTHYQAMLLDTDRVQFGPVVALNPATLLPLPEEGAPHDCLEILAETHGTRPDLTDQPIPDADHTWYTDGSSFLQEGQRKAGAAVTTETEVIWARALPAGTSAQRAELIALTQALKMAEGKRLNVYTDSRYAFATAHIHGEIYRRRGWLTSEGREIKNKSEILALLKALFLPKRLSIIHCLGHQKGDSAEARGNRLADQAAREAAIKTPPDTSTLLAGKRTADGSEFEKRTADGSEFESPKKKAKVE

SEQ ID NO: 1916 - protein, 2097 aa, synthetic construct
MPAAKRVKLDGGDKKYSIGLDIGTNSVGWAVITDEYKVPSKKFKVLGNTDRHSIKKNLIGALLFDSGETAEATRLKRTARRRYTRRKNRICYLQEIFSNEMAKVDDSFFHRLEESFLVEEDKKHERHPIFGNIVDEVAYHEKYPTIYHLRKKLVDSTDKADLRLIYLALAHMIKFRGHFLIEGDLNPDNSDVDKLFIQLVQTYNQLFEENPINASGVDAKAILSARLSKSRRLENLIAQLPGEKKNGLFGNLIALSLGLTPNFKSNFDLAEDAKLQLSKDTYDDDLDNLLAQIGDQYADLFLAAKNLSDAILLSDILRVNTEITKAPLSASMIKRYDEHHQDLTLLKALVRQQLPEKYKEIFFDQSKNGYAGYIDGGASQEEFYKFIKPILEKMDGTEELLVKLNREDLLRKQRTFDNGSIPHQIHLGELHAILRRQEDFYPFLKDNREKIEKILTFRIPYYVGPLARGNSRFAWMTRKSEETITPWNFEEVVDKGASAQSFIERMTNFDKNLPNEKVLPKHSLLYEYFTVYNELTKVKYVTEGMRKPAFLSGEQKKAIVDLLFKTNRKVTVKQLKEDYFKKIECFDSVEISGVEDRFNASLGTYHDLLKIIKDKDFLDNEENEDILEDIVLTLTLFEDREMIEERLKTYAHLFDDKVMKQLKRRRYTGWGRLSRKLINGIRDKQSGKTILDFLKSDGFANRNFMQLIHDDSLTFKEDIQKAQVSGQGDSLHEHIANLAGSPAIKKGILQTVKVVDELVKVMGRHKPENIVIEMARENQTTQKGQKNSRERMKRIEEGIKELGSQILKEHPVENTQLQNEKLYLYYLQNGRDMYVDQELDINRLSDYDVDHIVPQSFLKDDSIDNKVLTRSDKARGKSDNVPSEEVVKKMKNYWRQLLNAKLITQRKFDNLTKAERGGLSELDKAGFIKRQLVETRQITKHVAQILDSRMNTKYDENDKLIREVKVITLKSKLVSDFRKDFQFYKVREINNYHHAHDAYLNAVVGTALIKKYPKLESEFVYGDYKVYDVRKMIAKSEQEIGKATAKYFFYSNIMNFFKTEITLANGEIRKRPLIETNGETGEIVWDKGRDFATVRKVLSMPQVNIVKKTEVQTGGFSKESILPKRNSDKLIARKKDWDPKKYGGFDSPTVAYSVLVVAKVEKGKSKKLKSVKELLGITIMERSSFEKNPIDFLEAKGYKEVKKDLIIKLPKYSLFELENGRKRMLASAGELQKGNELALPSKYVNFLYLASHYEKLKGSPEDNEQKQLFVEQHKHYLDEIIEQISEFSKRVILADANLDKVLSAYNKHRDKPIREQAENIIHLFTLTNLGAPAAFKYFDTTIDRKRYTSTKEVLDATLIHQSITGLYETRIDLSQLGGDGGGGSGGSGGSGGSGGTLNLEDEYRLYETSAEPEVSPGSTWLSDFPQAWAETGGMGLAVRQAPLIIPLKATSTPVSIKQYPMSQEAKLGIKPHIQRLLDQGILVPCQSPWNTPLLPVKKPGTNDYRPVQDLREVNKRVEDIHPTVPNPYNLLSGLPPSHRWYTVLDLKDAFFCLRLHPTSQPLFAFEWRDPGMGISGQLTWTRLPQGFKNSPTLFNEALHRDLADFRIQHPDLILLQYVDDILLAATSELDCQQGTRALLLTLGNLGYRASAKKAQLCQKQVKYLGYLLKEGQRWLTEARKETVMGQPTPKTPRQLREFLGKAGFCRLFIPGFAEMAAPLYPLTKPGTLFNWGPDQQKAYQEIKQALLTAPALGLPDLTKPFELFVDEKQGYAKGVLTQKLGPWRRPVAYLSKKLDPVAAGWPPCLRMVAAIAVLRKDAGKLTMGQPLVILAPHAVEALVKQPPDRWLSNARMTHYQAMLLDTDRVQFGPVVALNPATLLPLPEEGAPHDCLEILAETHGTRPDLTDQPIPDADHTWYTDGSSFLQEGQRKAGAAVTTETEVIWARALPAGTSAQRAELIALTQALKMAEGKRLNVYTDSRYAFATAHIHGEIYRRRGWLTSEGREIKNKSEILALLKALFLPKRLSIIHCLGHQKGDSAEARGNRLADQAAREAAIKTPPDTSTLLAGKRTADGSEFEKRTADGSEFESPKKKAKVE

SEQ ID NO: 1917 - protein, 2090 aa, synthetic construct
MPAAKRVKLDGGDKKYSIGLDIGTNSVGWAVITDEYKVPSKKFKVLGNTDRHSIKKNLIGALLFDSGETAEATRLKRTARRRYTRRKNRICYLQEIFSNEMAKVDDSFFHRLEESFLVEEDKKHERHPIFGNIVDEVAYHEKYPTIYHLRKKLVDSTDKADLRLIYLALAHMIKFRGHFLIEGDLNPDNSDVDKLFIQLVQTYNQLFEENPINASGVDAKAILSARLSKSRRLENLIAQLPGEKKNGLFGNLIALSLGLTPNFKSNFDLAEDAKLQLSKDTYDDDLDNLLAQIGDQYADLFLAAKNLSDAILLSDILRVNTEITKAPLSASMIKRYDEHHQDLTLLKALVRQQLPEKYKEIFFDQSKNGYAGYIDGGASQEEFYKFIKPILEKMDGTEELLVKLNREDLLRKQRTFDNGSIPHQIHLGELHAILRRQEDFYPFLKDNREKIEKILTFRIPYYVGPLARGNSRFAWMTRKSEETITPWNFEEVVDKGASAQSFIERMTNFDKNLPNEKVLPKHSLLYEYFTVYNELTKVKYVTEGMRKPAFLSGEQKKAIVDLLFKTNRKVTVKQLKEDYFKKIECFDSVEISGVEDRFNASLGTYHDLLKIIKDKDFLDNEENEDILEDIVLTLTLFEDREMIEERLKTYAHLFDDKVMKQLKRRRYTGWGRLSRKLINGIRDKQSGKTILDFLKSDGFANRNFMQLIHDDSLTFKEDIQKAQVSGQGDSLHEHIANLAGSPAIKKGILQTVKVVDELVKVMGRHKPENIVIEMARENQTTQKGQKNSRERMKRIEEGIKELGSQILKEHPVENTQLQNEKLYLYYLQNGRDMYVDQELDINRLSDYDVDHIVPQSFLKDDSIDNKVLTRSDKARGKSDNVPSEEVVKKMKNYWRQLLNAKLITQRKFDNLTKAERGGLSELDKAGFIKRQLVETRQITKHVAQILDSRMNTKYDENDKLIREVKVITLKSKLVSDFRKDFQFYKVREINNYHHAHDAYLNAVVGTALIKKYPKLESEFVYGDYKVYDVRKMIAKSEQEIGKATAKYFFYSNIMNFFKTEITLANGEIRKRPLIETNGETGEIVWDKGRDFATVRKVLSMPQVNIVKKTEVQTGGFSKESILPKRNSDKLIARKKDWDPKKYGGFDSPTVAYSVLVVAKVEKGKSKKLKSVKELLGITIMERSSFEKNPIDFLEAKGYKEVKKDLIIKLPKYSLFELENGRKRMLASAGELQKGNELALPSKYVNFLYLASHYEKLKGSPEDNEQKQLFVEQHKHYLDEIIEQISEFSKRVILADANLDKVLSAYNKHRDKPIREQAENIIHLFTLTNLGAPAAFKYFDTTIDRKRYTSTKEVLDATLIHQSITGLYETRIDLSQLGGDGGGGGGGGGTLNLEDEYRLYETSAEPEVSPGSTWLSDFPQAWAETGGMGLAVRQAPLIIPLKATSTPVSIKQYPMSQEAKLGIKPHIQRLLDQGILVPCQSPWNTPLLPVKKPGTNDYRPVQDLREVNKRVEDIHPTVPNPYNLLSGLPPSHRWYTVLDLKDAFFCLRLHPTSQPLFAFEWRDPGMGISGQLTWTRLPQGFKNSPTLFNEALHRDLADFRIQHPDLILLQYVDDILLAATSELDCQQGTRALLLTLGNLGYRASAKKAQLCQKQVKYLGYLLKEGQRWLTEARKETVMGQPTPKTPRQLREFLGKAGFCRLFIPGFAEMAAPLYPLTKPGTLFNWGPDQQKAYQEIKQALLTAPALGLPDLTKPFELFVDEKQGYAKGVLTQKLGPWRRPVAYLSKKLDPVAAGWPPCLRMVAAIAVLRKDAGKLTMGQPLVILAPHAVEALVKQPPDRWLSNARMTHYQAMLLDTDRVQFGPVVALNPATLLPLPEEGAPHDCLEILAETHGTRPDLTDQPIPDADHTWYTDGSSFLQEGQRKAGAAVTTETEVIWARALPAGTSAQRAELIALTQALKMAEGKRLNVYTDSRYAFATAHIHGEIYRRRGWLTSEGREIKNKSEILALLKALFLPKRLSIIHCLGHQKGDSAEARGNRLADQAAREAAIKTPPDTSTLLAGKRTADGSEFEKRTADGSEFESPKKKAKVE

SEQ ID NO: 1918 - protein, 2131 aa, synthetic construct
MPAAKRVKLDGGDKKYSIGLDIGTNSVGWAVITDEYKVPSKKFKVLGNTDRHSIKKNLIGALLFDSGETAEATRLKRTARRRYTRRKNRICYLQEIFSNEMAKVDDSFFHRLEESFLVEEDKKHERHPIFGNIVDEVAYHEKYPTIYHLRKKLVDSTDKADLRLIYLALAHMIKFRGHFLIEGDLNPDNSDVDKLFIQLVQTYNQLFEENPINASGVDAKAILSARLSKSRRLENLIAQLPGEKKNGLFGNLIALSLGLTPNFKSNFDLAEDAKLQLSKDTYDDDLDNLLAQIGDQYADLFLAAKNLSDAILLSDILRVNTEITKAPLSASMIKRYDEHHQDLTLLKALVRQQLPEKYKEIFFDQSKNGYAGYIDGGASQEEFYKFIKPILEKMDGTEELLVKLNREDLLRKQRTFDNGSIPHQIHLGELHAILRRQEDFYPFLKDNREKIEKILTFRIPYYVGPLARGNSRFAWMTRKSEETITPWNFEEVVDKGASAQSFIERMTNFDKNLPNEKVLPKHSLLYEYFTVYNELTKVKYVTEGMRKPAFLSGEQKKAIVDLLFKTNRKVTVKQLKEDYFKKIECFDSVEISGVEDRFNASLGTYHDLLKIIKDKDFLDNEENEDILEDIVLTLTLFEDREMIEERLKTYAHLFDDKVMKQLKRRRYTGWGRLSRKLINGIRDKQSGKTILDFLKSDGFANRNFMQLIHDDSLTFKEDIQKAQVSGQGDSLHEHIANLAGSPAIKKGILQTVKVVDELVKVMGRHKPENIVIEMARENQTTQKGQKNSRERMKRIEEGIKELGSQILKEHPVENTQLQNEKLYLYYLQNGRDMYVDQELDINRLSDYDVDHIVPQSFLKDDSIDNKVLTRSDKARGKSDNVPSEEVVKKMKNYWRQLLNAKLITQRKFDNLTKAERGGLSELDKAGFIKRQLVETRQITKHVAQILDSRMNTKYDENDKLIREVKVITLKSKLVSDFRKDFQFYKVREINNYHHAHDAYLNAVVGTALIKKYPKLESEFVYGDYKVYDVRKMIAKSEQEIGKATAKYFFYSNIMNFFKTEITLANGEIRKRPLIETNGETGEIVWDKGRDFATVRKVLSMPQVNIVKKTEVQTGGFSKESILPKRNSDKLIARKKDWDPKKYGGFDSPTVAYSVLVVAKVEKGKSKKLKSVKELLGITIMERSSFEKNPIDFLEAKGYKEVKKDLIIKLPKYSLFELENGRKRMLASAGELQKGNELALPSKYVNFLYLASHYEKLKGSPEDNEQKQLFVEQHKHYLDEIIEQISEFSKRVILADANLDKVLSAYNKHRDKPIREQAENIIHLFTLTNLGAPAAFKYFDTTIDRKRYTSTKEVLDATLIHQSITGLYETRIDLSQLGGDGGAEAAAKEAAAKEAAAKEAAAKALEAEAAAKEAAAKEAAAKEAAAKAGGTLNLEDEYRLYETSAEPEVSPGSTWLSDFPQAWAETGGMGLAVRQAPLIIPLKATSTPVSIKQYPMSQEAKLGIKPHIQRLLDQGILVPCQSPWNTPLLPVKKPGTNDYRPVQDLREVNKRVEDIHPTVPNPYNLLSGLPPSHRWYTVLDLKDAFFCLRLHPTSQPLFAFEWRDPGMGISGQLTWTRLPQGFKNSPTLFNEALHRDLADFRIQHPDLILLQYVDDILLAATSELDCQQGTRALLLTLGNLGYRASAKKAQLCQKQVKYLGYLLKEGQRWLTEARKETVMGQPTPKTPRQLREFLGKAGFCRLFIPGFAEMAAPLYPLTKPGTLFNWGPDQQKAYQEIKQALLTAPALGLPDLTKPFELFVDEKQGYAKGVLTQKLGPWRRPVAYLSKKLDPVAAGWPPCLRMVAAIAVLRKDAGKLTMGQPLVILAPHAVEALVKQPPDRWLSNARMTHYQAMLLDTDRVQFGPVVALNPATLLPLPEEGAPHDCLEILAETHGTRPDLTDQPIPDADHTWYTDGSSFLQEGQRKAGAAVTTETEVIWARALPAGTSAQRAELIALTQALKMAEGKRLNVYTDSRYAFATAHIHGEIYRRRGWLTSEGREIKNKSEILALLKALFLPKRLSIIHCLGHQKGDSAEARGNRLADQAAREAAIKTPPDTSTLLAGKRTADGSEFEKRTADGSEFESPKKKAKVE

SEQ ID NO: 1919 - protein, 2096 aa, synthetic construct
MPAAKRVKLDGGDKKYSIGLDIGTNSVGWAVITDEYKVPSKKFKVLGNTDRHSIKKNLIGALLFDSGETAEATRLKRTARRRYTRRKNRICYLQEIFSNEMAKVDDSFFHRLEESFLVEEDKKHERHPIFGNIVDEVAYHEKYPTIYHLRKKLVDSTDKADLRLIYLALAHMIKFRGHFLIEGDLNPDNSDVDKLFIQLVQTYNQLFEENPINASGVDAKAILSARLSKSRRLENLIAQLPGEKKNGLFGNLIALSLGLTPNFKSNFDLAEDAKLQLSKDTYDDDLDNLLAQIGDQYADLFLAAKNLSDAILLSDILRVNTEITKAPLSASMIKRYDEHHQDLTLLKALVRQQLPEKYKEIFFDQSKNGYAGYIDGGASQEEFYKFIKPILEKMDGTEELLVKLNREDLLRKQRTFDNGSIPHQIHLGELHAILRRQEDFYPFLKDNREKIEKILTFRIPYYVGPLARGNSRFAWMTRKSEETITPWNFEEVVDKGASAQSFIERMTNFDKNLPNEKVLPKHSLLYEYFTVYNELTKVKYVTEGMRKPAFLSGEQKKAIVDLLFKTNRKVTVKQLKEDYFKKIECFDSVEISGVEDRFNASLGTYHDLLKIIKDKDFLDNEENEDILEDIVLTLTLFEDREMIEERLKTYAHLFDDKVMKQLKRRRYTGWGRLSRKLINGIRDKQSGKTILDFLKSDGFANRNFMQLIHDDSLTFKEDIQKAQVSGQGDSLHEHIANLAGSPAIKKGILQTVKVVDELVKVMGRHKPENIVIEMARENQTTQKGQKNSRERMKRIEEGIKELGSQILKEHPVENTQLQNEKLYLYYLQNGRDMYVDQELDINRLSDYDVDHIVPQSFLKDDSIDNKVLTRSDKARGKSDNVPSEEVVKKMKNYWRQLLNAKLITQRKFDNLTKAERGGLSELDKAGFIKRQLVETRQITKHVAQILDSRMNTKYDENDKLIREVKVITLKSKLVSDFRKDFQFYKVREINNYHHAHDAYLNAVVGTALIKKYPKLESEFVYGDYKVYDVRKMIAKSEQEIGKATAKYFFYSNIMNFFKTEITLANGEIRKRPLIETNGETGEIVWDKGRDFATVRKVLSMPQVNIVKKTEVQTGGFSKESILPKRNSDKLIARKKDWDPKKYGGFDSPTVAYSVLVVAKVEKGKSKKLKSVKELLGITIMERSSFEKNPIDFLEAKGYKEVKKDLIIKLPKYSLFELENGRKRMLASAGELQKGNELALPSKYVNFLYLASHYEKLKGSPEDNEQKQLFVEQHKHYLDEIIEQISEFSKRVILADANLDKVLSAYNKHRDKPIREQAENIIHLFTLTNLGAPAAFKYFDTTIDRKRYTSTKEVLDATLIHQSITGLYETRIDLSQLGGDGGPAPEAAAKGSSGGTLNLEDEYRLYETSAEPEVSPGSTWLSDFPQAWAETGGMGLAVRQAPLIIPLKATSTPVSIKQYPMSQEAKLGIKPHIQRLLDQGILVPCQSPWNTPLLPVKKPGTNDYRPVQDLREVNKRVEDIHPTVPNPYNLLSGLPPSHRWYTVLDLKDAFFCLRLHPTSQPLFAFEWRDPGMGISGQLTWTRLPQGFKNSPTLFNEALHRDLADFRIQHPDLILLQYVDDILLAATSELDCQQGTRALLLTLGNLGYRASAKKAQLCQKQVKYLGYLLKEGQRWLTEARKETVMGQPTPKTPRQLREFLGKAGFCRLFIPGFAEMAAPLYPLTKPGTLFNWGPDQQKAYQEIKQALLTAPALGLPDLTKPFELFVDEKQGYAKGVLTQKLGPWRRPVAYLSKKLDPVAAGWPPCLRMVAAIAVLRKDAGKLTMGQPLVILAPHAVEALVKQPPDRWLSNARMTHYQAMLLDTDRVQFGPVVALNPATLLPLPEEGAPHDCLEILAETHGTRPDLTDQPIPDADHTWYTDGSSFLQEGQRKAGAAVTTETEVIWARALPAGTSAQRAELIALTQALKMAEGKRLNVYTDSRYAFATAHIHGEIYRRRGWLTSEGREIKNKSEILALLKALFLPKRLSIIHCLGHQKGDSAEARGNRLADQAAREAAIKTPPDTSTLLAGKRTADGSEFEKRTADGSEFESPKKKAKVE

SEQ ID NO: 1920 - protein, 2096 aa, synthetic construct
MPAAKRVKLDGGDKKYSIGLDIGTNSVGWAVITDEYKVPSKKFKVLGNTDRHSIKKNLIGALLFDSGETAEATRLKRTARRRYTRRKNRICYLQEIFSNEMAKVDDSFFHRLEESFLVEEDKKHERHPIFGNIVDEVAYHEKYPTIYHLRKKLVDSTDKADLRLIYLALAHMIKFRGHFLIEGDLNPDNSDVDKLFIQLVQTYNQLFEENPINASGVDAKAILSARLSKSRRLENLIAQLPGEKKNGLFGNLIALSLGLTPNFKSNFDLAEDAKLQLSKDTYDDDLDNLLAQIGDQYADLFLAAKNLSDAILLSDILRVNTEITKAPLSASMIKRYDEHHQDLTLLKALVRQQLPEKYKEIFFDQSKNGYAGYIDGGASQEEFYKFIKPILEKMDGTEELLVKLNREDLLRKQRTFDNGSIPHQIHLGELHAILRRQEDFYPFLKDNREKIEKILTFRIPYYVGPLARGNSRFAWMTRKSEETITPWNFEEVVDKGASAQSFIERMTNFDKNLPNEKVLPKHSLLYEYFTVYNELTKVKYVTEGMRKPAFLSGEQKKAIVDLLFKTNRKVTVKQLKEDYFKKIECFDSVEISGVEDRFNASLGTYHDLLKIIKDKDFLDNEENEDILEDIVLTLTLFEDREMIEERLKTYAHLFDDKVMKQLKRRRYTGWGRLSRKLINGIRDKQSGKTILDFLKSDGFANRNFMQLIHDDSLTFKEDIQKAQVSGQGDSLHEHIANLAGSPAIKKGILQTVKVVDELVKVMGRHKPENIVIEMARENQTTQKGQKNSRERMKRIEEGIKELGSQILKEHPVENTQLQNEKLYLYYLQNGRDMYVDQELDINRLSDYDVDHIVPQSFLKDDSIDNKVLTRSDKARGKSDNVPSEEVVKKMKNYWRQLLNAKLITQRKFDNLTKAERGGLSELDKAGFIKRQLVETRQITKHVAQILDSRMNTKYDENDKLIREVKVITLKSKLVSDFRKDFQFYKVREINNYHHAHDAYLNAVVGTALIKKYPKLESEFVYGDYKVYDVRKMIAKSEQEIGKATAKYFFYSNIMNFFKTEITLANGEIRKRPLIETNGETGEIVWDKGRDFATVRKVLSMPQVNIVKKTEVQTGGFSKESILPKRNSDKLIARKKDWDPKKYGGFDSPTVAYSVLVVAKVEKGKSKKLKSVKELLGITIMERSSFEKNPIDFLEAKGYKEVKKDLIIKLPKYSLFELENGRKRMLASAGELQKGNELALPSKYVNFLYLASHYEKLKGSPEDNEQKQLFVEQHKHYLDEIIEQISEFSKRVILADANLDKVLSAYNKHRDKPIREQAENIIHLFTLTNLGAPAAFKYFDTTIDRKRYTSTKEVLDATLIHQSITGLYETRIDLSQLGGDGGGGGEAAAKGGSGGTLNLEDEYRLYETSAEPEVSPGSTWLSDFPQAWAETGGMGLAVRQAPLIIPLKATSTPVSIKQYPMSQEAKLGIKPHIQRLLDQGILVPCQSPWNTPLLPVKKPGTNDYRPVQDLREVNKRVEDIHPTVPNPYNLLSGLPPSHRWYTVLDLKDAFFCLRLHPTSQPLFAFEWRDPGMGISGQLTWTRLPQGFKNSPTLFNEALHRDLADFRIQHPDLILLQYVDDILLAATSELDCQQGTRALLLTLGNLGYRASAKKAQLCQKQVKYLGYLLKEGQRWLTEARKETVMGQPTPKTPRQLREFLGKAGFCRLFIPGFAEMAAPLYPLTKPGTLFNWGPDQQKAYQEIKQALLTAPALGLPDLTKPFELFVDEKQGYAKGVLTQKLGPWRRPVAYLSKKLDPVAAGWPPCLRMVAAIAVLRKDAGKLTMGQPLVILAPHAVEALVKQPPDRWLSNARMTHYQAMLLDTDRVQFGPVVALNPATLLPLPEEGAPHDCLEILAETHGTRPDLTDQPIPDADHTWYTDGSSFLQEGQRKAGAAVTTETEVIWARALPAGTSAQRAELIALTQALKMAEGKRLNVYTDSRYAFATAHIHGEIYRRRGWLTSEGREIKNKSEILALLKALFLPKRLSIIHCLGHQKGDSAEARGNRLADQAAREAAIKTPPDTSTLLAGKRTADGSEFEKRTADGSEFESPKKKAKVE

SEQ ID NO: 1921 - protein, 2096 aa, synthetic construct
MPAAKRVKLDGGDKKYSIGLDIGTNSVGWAVITDEYKVPSKKFKVLGNTDRHSIKKNLIGALLFDSGETAEATRLKRTARRRYTRRKNRICYLQEIFSNEMAKVDDSFFHRLEESFLVEEDKKHERHPIFGNIVDEVAYHEKYPTIYHLRKKLVDSTDKADLRLIYLALAHMIKFRGHFLIEGDLNPDNSDVDKLFIQLVQTYNQLFEENPINASGVDAKAILSARLSKSRRLENLIAQLPGEKKNGLFGNLIALSLGLTPNFKSNFDLAEDAKLQLSKDTYDDDLDNLLAQIGDQYADLFLAAKNLSDAILLSDILRVNTEITKAPLSASMIKRYDEHHQDLTLLKALVRQQLPEKYKEIFFDQSKNGYAGYIDGGASQEEFYKFIKPILEKMDGTEELLVKLNREDLLRKQRTFDNGSIPHQIHLGELHAILRRQEDFYPFLKDNREKIEKILTFRIPYYVGPLARGNSRFAWMTRKSEETITPWNFEEVVDKGASAQSFIERMTNFDKNLPNEKVLPKHSLLYEYFTVYNELTKVKYVTEGMRKPAFLSGEQKKAIVDLLFKTNRKVTVKQLKEDYFKKIECFDSVEISGVEDRFNASLGTYHDLLKIIKDKDFLDNEENEDILEDIVLTLTLFEDREMIEERLKTYAHLFDDKVMKQLKRRRYTGWGRLSRKLINGIRDKQSGKTILDFLKSDGFANRNFMQLIHDDSLTFKEDIQKAQVSGQGDSLHEHIANLAGSPAIKKGILQTVKVVDELVKVMGRHKPENIVIEMARENQTTQKGQKNSRERMKRIEEGIKELGSQILKEHPVENTQLQNEKLYLYYLQNGRDMYVDQELDINRLSDYDVDHIVPQSFLKDDSIDNKVLTRSDKARGKSDNVPSEEVVKKMKNYWRQLLNAKLITQRKFDNLTKAERGGLSELDKAGFIKRQLVETRQITKHVAQILDSRMNTKYDENDKLIREVKVITLKSKLVSDFRKDFQFYKVREINNYHHAHDAYLNAVVGTALIKKYPKLESEFVYGDYKVYDVRKMIAKSEQEIGKATAKYFFYSNIMNFFKTEITLANGEIRKRPLIETNGETGEIVWDKGRDFATVRKVLSMPQVNIVKKTEVQTGGFSKESILPKRNSDKLIARKKDWDPKKYGGFDSPTVAYSVLVVAKVEKGKSKKLKSVKELLGITIMERSSFEKNPIDFLEAKGYKEVKKDLIIKLPKYSLFELENGRKRMLASAGELQKGNELALPSKYVNFLYLASHYEKLKGSPEDNEQKQLFVEQHKHYLDEIIEQISEFSKRVILADANLDKVLSAYNKHRDKPIREQAENIIHLFTLTNLGAPAAFKYFDTTIDRKRYTSTKEVLDATLIHQSITGLYETRIDLSQLGGDGGEAAAKGSSGGGGGTLNLEDEYRLYETSAEPEVSPGSTWLSDFPQAWAETGGMGLAVRQAPLIIPLKATSTPVSIKQYPMSQEAKLGIKPHIQRLLDQGILVPCQSPWNTPLLPVKKPGTNDYRPVQDLREVNKRVEDIHPTVPNPYNLLSGLPPSHRWYTVLDLKDAFFCLRLHPTSQPLFAFEWRDPGMGISGQLTWTRLPQGFKNSPTLFNEALHRDLADFRIQHPDLILLQYVDDILLAATSELDCQQGTRALLLTLGNLGYRASAKKAQLCQKQVKYLGYLLKEGQRWLTEARKETVMGQPTPKTPRQLREFLGKAGFCRLFIPGFAEMAAPLYPLTKPGTLFNWGPDQQKAYQEIKQALLTAPALGLPDLTKPFELFVDEKQGYAKGVLTQKLGPWRRPVAYLSKKLDPVAAGWPPCLRMVAAIAVLRKDAGKLTMGQPLVILAPHAVEALVKQPPDRWLSNARMTHYQAMLLDTDRVQFGPVVALNPATLLPLPEEGAPHDCLEILAETHGTRPDLTDQPIPDADHTWYTDGSSFLQEGQRKAGAAVTTETEVIWARALPAGTSAQRAELIALTQALKMAEGKRLNVYTDSRYAFATAHIHGEIYRRRGWLTSEGREIKNKSEILALLKALFLPKRLSIIHCLGHQKGDSAEARGNRLADQAAREAAIKTPPDTSTLLAGKRTADGSEFEKRTADGSEFESPKKKAKVE

SEQ ID NO: 1922 - protein, 2093 aa, synthetic construct
MPAAKRVKLDGGDKKYSIGLDIGTNSVGWAVITDEYKVPSKKFKVLGNTDRHSIKKNLIGALLFDSGETAEATRLKRTARRRYTRRKNRICYLQEIFSNEMAKVDDSFFHRLEESFLVEEDKKHERHPIFGNIVDEVAYHEKYPTIYHLRKKLVDSTDKADLRLIYLALAHMIKFRGHFLIEGDLNPDNSDVDKLFIQLVQTYNQLFEENPINASGVDAKAILSARLSKSRRLENLIAQLPGEKKNGLFGNLIALSLGLTPNFKSNFDLAEDAKLQLSKDTYDDDLDNLLAQIGDQYADLFLAAKNLSDAILLSDILRVNTEITKAPLSASMIKRYDEHHQDLTLLKALVRQQLPEKYKEIFFDQSKNGYAGYIDGGASQEEFYKFIKPILEKMDGTEELLVKLNREDLLRKQRTFDNGSIPHQIHLGELHAILRRQEDFYPFLKDNREKIEKILTFRIPYYVGPLARGNSRFAWMTRKSEETITPWNFEEVVDKGASAQSFIERMTNFDKNLPNEKVLPKHSLLYEYFTVYNELTKVKYVTEGMRKPAFLSGEQKKAIVDLLFKTNRKVTVKQLKEDYFKKIECFDSVEISGVEDRFNASLGTYHDLLKIIKDKDFLDNEENEDILEDIVLTLTLFEDREMIEERLKTYAHLFDDKVMKQLKRRRYTGWGRLSRKLINGIRDKQSGKTILDFLKSDGFANRNFMQLIHDDSLTFKEDIQKAQVSGQGDSLHEHIANLAGSPAIKKGILQTVKVVDELVKVMGRHKPENIVIEMARENQTTQKGQKNSRERMKRIEEGIKELGSQILKEHPVENTQLQNEKLYLYYLQNGRDMYVDQELDINRLSDYDVDHIVPQSFLKDDSIDNKVLTRSDKARGKSDNVPSEEVVKKMKNYWRQLLNAKLITQRKFDNLTKAERGGLSELDKAGFIKRQLVETRQITKHVAQILDSRMNTKYDENDKLIREVKVITLKSKLVSDFRKDFQFYKVREINNYHHAHDAYLNAVVGTALIKKYPKLESEFVYGDYKVYDVRKMIAKSEQEIGKATAKYFFYSNIMNFFKTEITLANGEIRKRPLIETNGETGEIVWDKGRDFATVRKVLSMPQVNIVKKTEVQTGGFSKESILPKRNSDKLIARKKDWDPKKYGGFDSPTVAYSVLVVAKVEKGKSKKLKSVKELLGITIMERSSFEKNPIDFLEAKGYKEVKKDLIIKLPKYSLFELENGRKRMLASAGELQKGNELALPSKYVNFLYLASHYEKLKGSPEDNEQKQLFVEQHKHYLDEIIEQISEFSKRVILADANLDKVLSAYNKHRDKPIREQAENIIHLFTLTNLGAPAAFKYFDTTIDRKRYTSTKEVLDATLIHQSITGLYETRIDLSQLGGDGGGGSEAAAKGGTLNLEDEYRLYETSAEPEVSPGSTWLSDFPQAWAETGGMGLAVRQAPLIIPLKATSTPVSIKQYPMSQEAKLGIKPHIQRLLDQGILVPCQSPWNTPLLPVKKPGTNDYRPVQDLREVNKRVEDIHPTVPNPYNLLSGLPPSHRWYTVLDLKDAFFCLRLHPTSQPLFAFEWRDPGMGISGQLTWTRLPQGFKNSPTLFNEALHRDLADFRIQHPDLILLQYVDDILLAATSELDCQQGTRALLLTLGNLGYRASAKKAQLCQKQVKYLGYLLKEGQRWLTEARKETVMGQPTPKTPRQLREFLGKAGFCRLFIPGFAEMAAPLYPLTKPGTLFNWGPDQQKAYQEIKQALLTAPALGLPDLTKPFELFVDEKQGYAKGVLTQKLGPWRRPVAYLSKKLDPVAAGWPPCLRMVAAIAVLRKDAGKLTMGQPLVILAPHAVEALVKQPPDRWLSNARMTHYQAMLLDTDRVQFGPVVALNPATLLPLPEEGAPHDCLEILAETHGTRPDLTDQPIPDADHTWYTDGSSFLQEGQRKAGAAVTTETEVIWARALPAGTSAQRAELIALTQALKMAEGKRLNVYTDSRYAFATAHIHGEIYRRRGWLTSEGREIKNKSEILALLKALFLPKRLSIIHCLGHQKGDSAEARGNRLADQAAREAAIKTPPDTSTLLAGKRTADGSEFEKRTADGSEFESPKKKAKVE

SEQ ID NO: 1923 - protein, 2100 aa, synthetic construct
MPAAKRVKLDGGDKKYSIGLDIGTNSVGWAVITDEYKVPSKKFKVLGNTDRHSIKKNLIGALLFDSGETAEATRLKRTARRRYTRRKNRICYLQEIFSNEMAKVDDSFFHRLEESFLVEEDKKHERHPIFGNIVDEVAYHEKYPTIYHLRKKLVDSTDKADLRLIYLALAHMIKFRGHFLIEGDLNPDNSDVDKLFIQLVQTYNQLFEENPINASGVDAKAILSARLSKSRRLENLIAQLPGEKKNGLFGNLIALSLGLTPNFKSNFDLAEDAKLQLSKDTYDDDLDNLLAQIGDQYADLFLAAKNLSDAILLSDILRVNTEITKAPLSASMIKRYDEHHQDLTLLKALVRQQLPEKYKEIFFDQSKNGYAGYIDGGASQEEFYKFIKPILEKMDGTEELLVKLNREDLLRKQRTFDNGSIPHQIHLGELHAILRRQEDFYPFLKDNREKIEKILTFRIPYYVGPLARGNSRFAWMTRKSEETITPWNFEEVVDKGASAQSFIERMTNFDKNLPNEKVLPKHSLLYEYFTVYNELTKVKYVTEGMRKPAFLSGEQKKAIVDLLFKTNRKVTVKQLKEDYFKKIECFDSVEISGVEDRFNASLGTYHDLLKIIKDKDFLDNEENEDILEDIVLTLTLFEDREMIEERLKTYAHLFDDKVMKQLKRRRYTGWGRLSRKLINGIRDKQSGKTILDFLKSDGFANRNFMQLIHDDSLTFKEDIQKAQVSGQGDSLHEHIANLAGSPAIKKGILQTVKVVDELVKVMGRHKPENIVIEMARENQTTQKGQKNSRERMKRIEEGIKELGSQILKEHPVENTQLQNEKLYLYYLQNGRDMYVDQELDINRLSDYDVDHIVPQSFLKDDSIDNKVLTRSDKARGKSDNVPSEEVVKKMKNYWRQLLNAKLITQRKFDNLTKAERGGLSELDKAGFIKRQLVETRQITKHVAQILDSRMNTKYDENDKLIREVKVITLKSKLVSDFRKDFQFYKVREINNYHHAHDAYLNAVVGTALIKKYPKLESEFVYGDYKVYDVRKMIAKSEQEIGKATAKYFFYSNIMNFFKTEITLANGEIRKRPLIETNGETGEIVWDKGRDFATVRKVLSMPQVNIVKKTEVQTGGFSKESILPKRNSDKLIARKKDWDPKKYGGFDSPTVAYSVLVVAKVEKGKSKKLKSVKELLGITIMERSSFEKNPIDFLEAKGYKEVKKDLIIKLPKYSLFELENGRKRMLASAGELQKGNELALPSKYVNFLYLASHYEKLKGSPEDNEQKQLFVEQHKHYLDEIIEQISEFSKRVILADANLDKVLSAYNKHRDKPIREQAENIIHLFTLTNLGAPAAFKYFDTTIDRKRYTSTKEVLDATLIHQSITGLYETRIDLSQLGGDGGGSSGSSGSSGSSGSSGGTLNLEDEYRLYETSAEPEVSPGSTWLSDFPQAWAETGGMGLAVRQAPLIIPLKATSTPVSIKQYPMSQEAKLGIKPHIQRLLDQGILVPCQSPWNTPLLPVKKPGTNDYRPVQDLREVNKRVEDIHPTVPNPYNLLSGLPPSHRWYTVLDLKDAFFCLRLHPTSQPLFAFEWRDPGMGISGQLTWTRLPQGFKNSPTLFNEALHRDLADFRIQHPDLILLQYVDDILLAATSELDCQQGTRALLLTLGNLGYRASAKKAQLCQKQVKYLGYLLKEGQRWLTEARKETVMGQPTPKTPRQLREFLGKAGFCRLFIPGFAEMAAPLYPLTKPGTLFNWGPDQQKAYQEIKQALLTAPALGLPDLTKPFELFVDEKQGYAKGVLTQKLGPWRRPVAYLSKKLDPVAAGWPPCLRMVAAIAVLRKDAGKLTMGQPLVILAPHAVEALVKQPPDRWLSNARMTHYQAMLLDTDRVQFGPVVALNPATLLPLPEEGAPHDCLEILAETHGTRPDLTDQPIPDADHTWYTDGSSFLQEGQRKAGAAVTTETEVIWARALPAGTSAQRAELIALTQALKMAEGKRLNVYTDSRYAFATAHIHGEIYRRRGWLTSEGREIKNKSEILALLKALFLPKRLSIIHCLGHQKGDSAEARGNRLADQAAREAAIKTPPDTSTLLAGKRTADGSEFEKRTADGSEFESPKKKAKVE

SEQ ID NO: 1924 - protein, 2096 aa, synthetic construct
MPAAKRVKLDGGDKKYSIGLDIGTNSVGWAVITDEYKVPSKKFKVLGNTDRHSIKKNLIGALLFDSGETAEATRLKRTARRRYTRRKNRICYLQEIFSNEMAKVDDSFFHRLEESFLVEEDKKHERHPIFGNIVDEVAYHEKYPTIYHLRKKLVDSTDKADLRLIYLALAHMIKFRGHFLIEGDLNPDNSDVDKLFIQLVQTYNQLFEENPINASGVDAKAILSARLSKSRRLENLIAQLPGEKKNGLFGNLIALSLGLTPNFKSNFDLAEDAKLQLSKDTYDDDLDNLLAQIGDQYADLFLAAKNLSDAILLSDILRVNTEITKAPLSASMIKRYDEHHQDLTLLKALVRQQLPEKYKEIFFDQSKNGYAGYIDGGASQEEFYKFIKPILEKMDGTEELLVKLNREDLLRKQRTFDNGSIPHQIHLGELHAILRRQEDFYPFLKDNREKIEKILTFRIPYYVGPLARGNSRFAWMTRKSEETITPWNFEEVVDKGASAQSFIERMTNFDKNLPNEKVLPKHSLLYEYFTVYNELTKVKYVTEGMRKPAFLSGEQKKAIVDLLFKTNRKVTVKQLKEDYFKKIECFDSVEISGVEDRFNASLGTYHDLLKIIKDKDFLDNEENEDILEDIVLTLTLFEDREMIEERLKTYAHLFDDKVMKQLKRRRYTGWGRLSRKLINGIRDKQSGKTILDFLKSDGFANRNFMQLIHDDSLTFKEDIQKAQVSGQGDSLHEHIANLAGSPAIKKGILQTVKVVDELVKVMGRHKPENIVIEMARENQTTQKGQKNSRERMKRIEEGIKELGSQILKEHPVENTQLQNEKLYLYYLQNGRDMYVDQELDINRLSDYDVDHIVPQSFLKDDSIDNKVLTRSDKARGKSDNVPSEEVVKKMKNYWRQLLNAKLITQRKFDNLTKAERGGLSELDKAGFIKRQLVETRQITKHVAQILDSRMNTKYDENDKLIREVKVITLKSKLVSDFRKDFQFYKVREINNYHHAHDAYLNAVVGTALIKKYPKLESEFVYGDYKVYDVRKMIAKSEQEIGKATAKYFFYSNIMNFFKTEITLANGEIRKRPLIETNGETGEIVWDKGRDFATVRKVLSMPQVNIVKKTEVQTGGFSKESILPKRNSDKLIARKKDWDPKKYGGFDSPTVAYSVLVVAKVEKGKSKKLKSVKELLGITIMERSSFEKNPIDFLEAKGYKEVKKDLIIKLPKYSLFELENGRKRMLASAGELQKGNELALPSKYVNFLYLASHYEKLKGSPEDNEQKQLFVEQHKHYLDEIIEQISEFSKRVILADANLDKVLSAYNKHRDKPIREQAENIIHLFTLTNLGAPAAFKYFDTTIDRKRYTSTKEVLDATLIHQSITGLYETRIDLSQLGGDGGPAPAPAPAPAPGGTLNLEDEYRLYETSAEPEVSPGSTWLSDFPQAWAETGGMGLAVRQAPLIIPLKATSTPVSIKQYPMSQEAKLGIKPHIQRLLDQGILVPCQSPWNTPLLPVKKPGTNDYRPVQDLREVNKRVEDIHPTVPNPYNLLSGLPPSHRWYTVLDLKDAFFCLRLHPTSQPLFAFEWRDPGMGISGQLTWTRLPQGFKNSPTLFNEALHRDLADFRIQHPDLILLQYVDDILLAATSELDCQQGTRALLLTLGNLGYRASAKKAQLCQKQVKYLGYLLKEGQRWLTEARKETVMGQPTPKTPRQLREFLGKAGFCRLFIPGFAEMAAPLYPLTKPGTLFNWGPDQQKAYQEIKQALLTAPALGLPDLTKPFELFVDEKQGYAKGVLTQKLGPWRRPVAYLSKKLDPVAAGWPPCLRMVAAIAVLRKDAGKLTMGQPLVILAPHAVEALVKQPPDRWLSNARMTHYQAMLLDTDRVQFGPVVALNPATLLPLPEEGAPHDCLEILAETHGTRPDLTDQPIPDADHTWYTDGSSFLQEGQRKAGAAVTTETEVIWARALPAGTSAQRAELIALTQALKMAEGKRLNVYTDSRYAFATAHIHGEIYRRRGWLTSEGREIKNKSEILALLKALFLPKRLSIIHCLGHQKGDSAEARGNRLADQAAREAAIKTPPDTSTLLAGKRTADGSEFEKRTADGSEFESPKKKAKVE

SEQ ID NO: 1925 - protein, 2094 aa, synthetic construct
MPAAKRVKLDGGDKKYSIGLDIGTNSVGWAVITDEYKVPSKKFKVLGNTDRHSIKKNLIGALLFDSGETAEATRLKRTARRRYTRRKNRICYLQEIFSNEMAKVDDSFFHRLEESFLVEEDKKHERHPIFGNIVDEVAYHEKYPTIYHLRKKLVDSTDKADLRLIYLALAHMIKFRGHFLIEGDLNPDNSDVDKLFIQLVQTYNQLFEENPINASGVDAKAILSARLSKSRRLENLIAQLPGEKKNGLFGNLIALSLGLTPNFKSNFDLAEDAKLQLSKDTYDDDLDNLLAQIGDQYADLFLAAKNLSDAILLSDILRVNTEITKAPLSASMIKRYDEHHQDLTLLKALVRQQLPEKYKEIFFDQSKNGYAGYIDGGASQEEFYKFIKPILEKMDGTEELLVKLNREDLLRKQRTFDNGSIPHQIHLGELHAILRRQEDFYPFLKDNREKIEKILTFRIPYYVGPLARGNSRFAWMTRKSEETITPWNFEEVVDKGASAQSFIERMTNFDKNLPNEKVLPKHSLLYEYFTVYNELTKVKYVTEGMRKPAFLSGEQKKAIVDLLFKTNRKVTVKQLKEDYFKKIECFDSVEISGVEDRFNASLGTYHDLLKIIKDKDFLDNEENEDILEDIVLTLTLFEDREMIEERLKTYAHLFDDKVMKQLKRRRYTGWGRLSRKLINGIRDKQSGKTILDFLKSDGFANRNFMQLIHDDSLTFKEDIQKAQVSGQGDSLHEHIANLAGSPAIKKGILQTVKVVDELVKVMGRHKPENIVIEMARENQTTQKGQKNSRERMKRIEEGIKELGSQILKEHPVENTQLQNEKLYLYYLQNGRDMYVDQELDINRLSDYDVDHIVPQSFLKDDSIDNKVLTRSDKARGKSDNVPSEEVVKKMKNYWRQLLNAKLITQRKFDNLTKAERGGLSELDKAGFIKRQLVETRQITKHVAQILDSRMNTKYDENDKLIREVKVITLKSKLVSDFRKDFQFYKVREINNYHHAHDAYLNAVVGTALIKKYPKLESEFVYGDYKVYDVRKMIAKSEQEIGKATAKYFFYSNIMNFFKTEITLANGEIRKRPLIETNGETGEIVWDKGRDFATVRKVLSMPQVNIVKKTEVQTGGFSKESILPKRNSDKLIARKKDWDPKKYGGFDSPTVAYSVLVVAKVEKGKSKKLKSVKELLGITIMERSSFEKNPIDFLEAKGYKEVKKDLIIKLPKYSLFELENGRKRMLASAGELQKGNELALPSKYVNFLYLASHYEKLKGSPEDNEQKQLFVEQHKHYLDEIIEQISEFSKRVILADANLDKVLSAYNKHRDKPIREQAENIIHLFTLTNLGAPAAFKYFDTTIDRKRYTSTKEVLDATLIHQSITGLYETRIDLSQLGGDGGGSSGSSGSSGGTLNLEDEYRLYETSAEPEVSPGSTWLSDFPQAWAETGGMGLAVRQAPLIIPLKATSTPVSIKQYPMSQEAKLGIKPHIQRLLDQGILVPCQSPWNTPLLPVKKPGTNDYRPVQDLREVNKRVEDIHPTVPNPYNLLSGLPPSHRWYTVLDLKDAFFCLRLHPTSQPLFAFEWRDPGMGISGQLTWTRLPQGFKNSPTLFNEALHRDLADFRIQHPDLILLQYVDDILLAATSELDCQQGTRALLLTLGNLGYRASAKKAQLCQKQVKYLGYLLKEGQRWLTEARKETVMGQPTPKTPRQLREFLGKAGFCRLFIPGFAEMAAPLYPLTKPGTLFNWGPDQQKAYQEIKQALLTAPALGLPDLTKPFELFVDEKQGYAKGVLTQKLGPWRRPVAYLSKKLDPVAAGWPPCLRMVAAIAVLRKDAGKLTMGQPLVILAPHAVEALVKQPPDRWLSNARMTHYQAMLLDTDRVQFGPVVALNPATLLPLPEEGAPHDCLEILAETHGTRPDLTDQPIPDADHTWYTDGSSFLQEGQRKAGAAVTTETEVIWARALPAGTSAQRAELIALTQALKMAEGKRLNVYTDSRYAFATAHIHGEIYRRRGWLTSEGREIKNKSEILALLKALFLPKRLSIIHCLGHQKGDSAEARGNRLADQAAREAAIKTPPDTSTLLAGKRTADGSEFEKRTADGSEFESPKKKAKVE

SEQ ID NO: 1926 - protein, 2094 aa, synthetic construct
MPAAKRVKLDGGDKKYSIGLDIGTNSVGWAVITDEYKVPSKKFKVLGNTDRHSIKKNLIGALLFDSGETAEATRLKRTARRRYTRRKNRICYLQEIFSNEMAKVDDSFFHRLEESFLVEEDKKHERHPIFGNIVDEVAYHEKYPTIYHLRKKLVDSTDKADLRLIYLALAHMIKFRGHFLIEGDLNPDNSDVDKLFIQLVQTYNQLFEENPINASGVDAKAILSARLSKSRRLENLIAQLPGEKKNGLFGNLIALSLGLTPNFKSNFDLAEDAKLQLSKDTYDDDLDNLLAQIGDQYADLFLAAKNLSDAILLSDILRVNTEITKAPLSASMIKRYDEHHQDLTLLKALVRQQLPEKYKEIFFDQSKNGYAGYIDGGASQEEFYKFIKPILEKMDGTEELLVKLNREDLLRKQRTFDNGSIPHQIHLGELHAILRRQEDFYPFLKDNREKIEKILTFRIPYYVGPLARGNSRFAWMTRKSEETITPWNFEEVVDKGASAQSFIERMTNFDKNLPNEKVLPKHSLLYEYFTVYNELTKVKYVTEGMRKPAFLSGEQKKAIVDLLFKTNRKVTVKQLKEDYFKKIECFDSVEISGVEDRFNASLGTYHDLLKIIKDKDFLDNEENEDILEDIVLTLTLFEDREMIEERLKTYAHLFDDKVMKQLKRRRYTGWGRLSRKLINGIRDKQSGKTILDFLKSDGFANRNFMQLIHDDSLTFKEDIQKAQVSGQGDSLHEHIANLAGSPAIKKGILQTVKVVDELVKVMGRHKPENIVIEMARENQTTQKGQKNSRERMKRIEEGIKELGSQILKEHPVENTQLQNEKLYLYYLQNGRDMYVDQELDINRLSDYDVDHIVPQSFLKDDSIDNKVLTRSDKARGKSDNVPSEEVVKKMKNYWRQLLNAKLITQRKFDNLTKAERGGLSELDKAGFIKRQLVETRQITKHVAQILDSRMNTKYDENDKLIREVKVITLKSKLVSDFRKDFQFYKVREINNYHHAHDAYLNAVVGTALIKKYPKLESEFVYGDYKVYDVRKMIAKSEQEIGKATAKYFFYSNIMNFFKTEITLANGEIRKRPLIETNGETGEIVWDKGRDFATVRKVLSMPQVNIVKKTEVQTGGFSKESILPKRNSDKLIARKKDWDPKKYGGFDSPTVAYSVLVVAKVEKGKSKKLKSVKELLGITIMERSSFEKNPIDFLEAKGYKEVKKDLIIKLPKYSLFELENGRKRMLASAGELQKGNELALPSKYVNFLYLASHYEKLKGSPEDNEQKQLFVEQHKHYLDEIIEQISEFSKRVILADANLDKVLSAYNKHRDKPIREQAENIIHLFTLTNLGAPAAFKYFDTTIDRKRYTSTKEVLDATLIHQSITGLYETRIDLSQLGGDGGGSSGGSPAPGGTLNLEDEYRLYETSAEPEVSPGSTWLSDFPQAWAETGGMGLAVRQAPLIIPLKATSTPVSIKQYPMSQEAKLGIKPHIQRLLDQGILVPCQSPWNTPLLPVKKPGTNDYRPVQDLREVNKRVEDIHPTVPNPYNLLSGLPPSHRWYTVLDLKDAFFCLRLHPTSQPLFAFEWRDPGMGISGQLTWTRLPQGFKNSPTLFNEALHRDLADFRIQHPDLILLQYVDDILLAATSELDCQQGTRALLLTLGNLGYRASAKKAQLCQKQVKYLGYLLKEGQRWLTEARKETVMGQPTPKTPRQLREFLGKAGFCRLFIPGFAEMAAPLYPLTKPGTLFNWGPDQQKAYQEIKQALLTAPALGLPDLTKPFELFVDEKQGYAKGVLTQKLGPWRRPVAYLSKKLDPVAAGWPPCLRMVAAIAVLRKDAGKLTMGQPLVILAPHAVEALVKQPPDRWLSNARMTHYQAMLLDTDRVQFGPVVALNPATLLPLPEEGAPHDCLEILAETHGTRPDLTDQPIPDADHTWYTDGSSFLQEGQRKAGAAVTTETEVIWARALPAGTSAQRAELIALTQALKMAEGKRLNVYTDSRYAFATAHIHGEIYRRRGWLTSEGREIKNKSEILALLKALFLPKRLSIIHCLGHQKGDSAEARGNRLADQAAREAAIKTPPDTSTLLAGKRTADGSEFEKRTADGSEFESPKKKAKVE

SEQ ID NO: 1927 - protein, 2091 aa, synthetic construct
MPAAKRVKLDGGDKKYSIGLDIGTNSVGWAVITDEYKVPSKKFKVLGNTDRHSIKKNLIGALLFDSGETAEATRLKRTARRRYTRRKNRICYLQEIFSNEMAKVDDSFFHRLEESFLVEEDKKHERHPIFGNIVDEVAYHEKYPTIYHLRKKLVDSTDKADLRLIYLALAHMIKFRGHFLIEGDLNPDNSDVDKLFIQLVQTYNQLFEENPINASGVDAKAILSARLSKSRRLENLIAQLPGEKKNGLFGNLIALSLGLTPNFKSNFDLAEDAKLQLSKDTYDDDLDNLLAQIGDQYADLFLAAKNLSDAILLSDILRVNTEITKAPLSASMIKRYDEHHQDLTLLKALVRQQLPEKYKEIFFDQSKNGYAGYIDGGASQEEFYKFIKPILEKMDGTEELLVKLNREDLLRKQRTFDNGSIPHQIHLGELHAILRRQEDFYPFLKDNREKIEKILTFRIPYYVGPLARGNSRFAWMTRKSEETITPWNFEEVVDKGASAQSFIERMTNFDKNLPNEKVLPKHSLLYEYFTVYNELTKVKYVTEGMRKPAFLSGEQKKAIVDLLFKTNRKVTVKQLKEDYFKKIECFDSVEISGVEDRFNASLGTYHDLLKIIKDKDFLDNEENEDILEDIVLTLTLFEDREMIEERLKTYAHLFDDKVMKQLKRRRYTGWGRLSRKLINGIRDKQSGKTILDFLKSDGFANRNFMQLIHDDSLTFKEDIQKAQVSGQGDSLHEHIANLAGSPAIKKGILQTVKVVDELVKVMGRHKPENIVIEMARENQTTQKGQKNSRERMKRIEEGIKELGSQILKEHPVENTQLQNEKLYLYYLQNGRDMYVDQELDINRLSDYDVDHIVPQSFLKDDSIDNKVLTRSDKARGKSDNVPSEEVVKKMKNYWRQLLNAKLITQRKFDNLTKAERGGLSELDKAGFIKRQLVETRQITKHVAQILDSRMNTKYDENDKLIREVKVITLKSKLVSDFRKDFQFYKVREINNYHHAHDAYLNAVVGTALIKKYPKLESEFVYGDYKVYDVRKMIAKSEQEIGKATAKYFFYSNIMNFFKTEITLANGEIRKRPLIETNGETGEIVWDKGRDFATVRKVLSMPQVNIVKKTEVQTGGFSKESILPKRNSDKLIARKKDWDPKKYGGFDSPTVAYSVLVVAKVEKGKSKKLKSVKELLGITIMERSSFEKNPIDFLEAKGYKEVKKDLIIKLPKYSLFELENGRKRMLASAGELQKGNELALPSKYVNFLYLASHYEKLKGSPEDNEQKQLFVEQHKHYLDEIIEQISEFSKRVILADANLDKVLSAYNKHRDKPIREQAENIIHLFTLTNLGAPAAFKYFDTTIDRKRYTSTKEVLDATLIHQSITGLYETRIDLSQLGGDGGGSSGSSGGTLNLEDEYRLYETSAEPEVSPGSTWLSDFPQAWAETGGMGLAVRQAPLIIPLKATSTPVSIKQYPMSQEAKLGIKPHIQRLLDQGILVPCQSPWNTPLLPVKKPGTNDYRPVQDLREVNKRVEDIHPTVPNPYNLLSGLPPSHRWYTVLDLKDAFFCLRLHPTSQPLFAFEWRDPGMGISGQLTWTRLPQGFKNSPTLFNEALHRDLADFRIQHPDLILLQYVDDILLAATSELDCQQGTRALLLTLGNLGYRASAKKAQLCQKQVKYLGYLLKEGQRWLTEARKETVMGQPTPKTPRQLREFLGKAGFCRLFIPGFAEMAAPLYPLTKPGTLFNWGPDQQKAYQEIKQALLTAPALGLPDLTKPFELFVDEKQGYAKGVLTQKLGPWRRPVAYLSKKLDPVAAGWPPCLRMVAAIAVLRKDAGKLTMGQPLVILAPHAVEALVKQPPDRWLSNARMTHYQAMLLDTDRVQFGPVVALNPATLLPLPEEGAPHDCLEILAETHGTRPDLTDQPIPDADHTWYTDGSSFLQEGQRKAGAAVTTETEVIWARALPAGTSAQRAELIALTQALKMAEGKRLNVYTDSRYAFATAHIHGEIYRRRGWLTSEGREIKNKSEILALLKALFLPKRLSIIHCLGHQKGDSAEARGNRLADQAAREAAIKTPPDTSTLLAGKRTADGSEFEKRTADGSEFESPKKKAKVE

SEQ ID NO: 1928 - protein, 2091 aa, synthetic construct
MPAAKRVKLDGGDKKYSIGLDIGTNSVGWAVITDEYKVPSKKFKVLGNTDRHSIKKNLIGALLFDSGETAEATRLKRTARRRYTRRKNRICYLQEIFSNEMAKVDDSFFHRLEESFLVEEDKKHERHPIFGNIVDEVAYHEKYPTIYHLRKKLVDSTDKADLRLIYLALAHMIKFRGHFLIEGDLNPDNSDVDKLFIQLVQTYNQLFEENPINASGVDAKAILSARLSKSRRLENLIAQLPGEKKNGLFGNLIALSLGLTPNFKSNFDLAEDAKLQLSKDTYDDDLDNLLAQIGDQYADLFLAAKNLSDAILLSDILRVNTEITKAPLSASMIKRYDEHHQDLTLLKALVRQQLPEKYKEIFFDQSKNGYAGYIDGGASQEEFYKFIKPILEKMDGTEELLVKLNREDLLRKQRTFDNGSIPHQIHLGELHAILRRQEDFYPFLKDNREKIEKILTFRIPYYVGPLARGNSRFAWMTRKSEETITPWNFEEVVDKGASAQSFIERMTNFDKNLPNEKVLPKHSLLYEYFTVYNELTKVKYVTEGMRKPAFLSGEQKKAIVDLLFKTNRKVTVKQLKEDYFKKIECFDSVEISGVEDRFNASLGTYHDLLKIIKDKDFLDNEENEDILEDIVLTLTLFEDREMIEERLKTYAHLFDDKVMKQLKRRRYTGWGRLSRKLINGIRDKQSGKTILDFLKSDGFANRNFMQLIHDDSLTFKEDIQKAQVSGQGDSLHEHIANLAGSPAIKKGILQTVKVVDELVKVMGRHKPENIVIEMARENQTTQKGQKNSRERMKRIEEGIKELGSQILKEHPVENTQLQNEKLYLYYLQNGRDMYVDQELDINRLSDYDVDHIVPQSFLKDDSIDNKVLTRSDKARGKSDNVPSEEVVKKMKNYWRQLLNAKLITQRKFDNLTKAERGGLSELDKAGFIKRQLVETRQITKHVAQILDSRMNTKYDENDKLIREVKVITLKSKLVSDFRKDFQFYKVREINNYHHAHDAYLNAVVGTALIKKYPKLESEFVYGDYKVYDVRKMIAKSEQEIGKATAKYFFYSNIMNFFKTEITLANGEIRKRPLIETNGETGEIVWDKGRDFATVRKVLSMPQVNIVKKTEVQTGGFSKESILPKRNSDKLIARKKDWDPKKYGGFDSPTVAYSVLVVAKVEKGKSKKLKSVKELLGITIMERSSFEKNPIDFLEAKGYKEVKKDLIIKLPKYSLFELENGRKRMLASAGELQKGNELALPSKYVNFLYLASHYEKLKGSPEDNEQKQLFVEQHKHYLDEIIEQISEFSKRVILADANLDKVLSAYNKHRDKPIREQAENIIHLFTLTNLGAPAAFKYFDTTIDRKRYTSTKEVLDATLIHQSITGLYETRIDLSQLGGDGGGGGGGSGGTLNLEDEYRLYETSAEPEVSPGSTWLSDFPQAWAETGGMGLAVRQAPLIIPLKATSTPVSIKQYPMSQEAKLGIKPHIQRLLDQGILVPCQSPWNTPLLPVKKPGTNDYRPVQDLREVNKRVEDIHPTVPNPYNLLSGLPPSHRWYTVLDLKDAFFCLRLHPTSQPLFAFEWRDPGMGISGQLTWTRLPQGFKNSPTLFNEALHRDLADFRIQHPDLILLQYVDDILLAATSELDCQQGTRALLLTLGNLGYRASAKKAQLCQKQVKYLGYLLKEGQRWLTEARKETVMGQPTPKTPRQLREFLGKAGFCRLFIPGFAEMAAPLYPLTKPGTLFNWGPDQQKAYQEIKQALLTAPALGLPDLTKPFELFVDEKQGYAKGVLTQKLGPWRRPVAYLSKKLDPVAAGWPPCLRMVAAIAVLRKDAGKLTMGQPLVILAPHAVEALVKQPPDRWLSNARMTHYQAMLLDTDRVQFGPVVALNPATLLPLPEEGAPHDCLEILAETHGTRPDLTDQPIPDADHTWYTDGSSFLQEGQRKAGAAVTTETEVIWARALPAGTSAQRAELIALTQALKMAEGKRLNVYTDSRYAFATAHIHGEIYRRRGWLTSEGREIKNKSEILALLKALFLPKRLSIIHCLGHQKGDSAEARGNRLADQAAREAAIKTPPDTSTLLAGKRTADGSEFEKRTADGSEFESPKKKAKVE

SEQ ID NO: 1929 - protein, 2096 aa, synthetic construct
MPAAKRVKLDGGDKKYSIGLDIGTNSVGWAVITDEYKVPSKKFKVLGNTDRHSIKKNLIGALLFDSGETAEATRLKRTARRRYTRRKNRICYLQEIFSNEMAKVDDSFFHRLEESFLVEEDKKHERHPIFGNIVDEVAYHEKYPTIYHLRKKLVDSTDKADLRLIYLALAHMIKFRGHFLIEGDLNPDNSDVDKLFIQLVQTYNQLFEENPINASGVDAKAILSARLSKSRRLENLIAQLPGEKKNGLFGNLIALSLGLTPNFKSNFDLAEDAKLQLSKDTYDDDLDNLLAQIGDQYADLFLAAKNLSDAILLSDILRVNTEITKAPLSASMIKRYDEHHQDLTLLKALVRQQLPEKYKEIFFDQSKNGYAGYIDGGASQEEFYKFIKPILEKMDGTEELLVKLNREDLLRKQRTFDNGSIPHQIHLGELHAILRRQEDFYPFLKDNREKIEKILTFRIPYYVGPLARGNSRFAWMTRKSEETITPWNFEEVVDKGASAQSFIERMTNFDKNLPNEKVLPKHSLLYEYFTVYNELTKVKYVTEGMRKPAFLSGEQKKAIVDLLFKTNRKVTVKQLKEDYFKKIECFDSVEISGVEDRFNASLGTYHDLLKIIKDKDFLDNEENEDILEDIVLTLTLFEDREMIEERLKTYAHLFDDKVMKQLKRRRYTGWGRLSRKLINGIRDKQSGKTILDFLKSDGFANRNFMQLIHDDSLTFKEDIQKAQVSGQGDSLHEHIANLAGSPAIKKGILQTVKVVDELVKVMGRHKPENIVIEMARENQTTQKGQKNSRERMKRIEEGIKELGSQILKEHPVENTQLQNEKLYLYYLQNGRDMYVDQELDINRLSDYDVDHIVPQSFLKDDSIDNKVLTRSDKARGKSDNVPSEEVVKKMKNYWRQLLNAKLITQRKFDNLTKAERGGLSELDKAGFIKRQLVETRQITKHVAQILDSRMNTKYDENDKLIREVKVITLKSKLVSDFRKDFQFYKVREINNYHHAHDAYLNAVVGTALIKKYPKLESEFVYGDYKVYDVRKMIAKSEQEIGKATAKYFFYSNIMNFFKTEITLANGEIRKRPLIETNGETGEIVWDKGRDFATVRKVLSMPQVNIVKKTEVQTGGFSKESILPKRNSDKLIARKKDWDPKKYGGFDSPTVAYSVLVVAKVEKGKSKKLKSVKELLGITIMERSSFEKNPIDFLEAKGYKEVKKDLIIKLPKYSLFELENGRKRMLASAGELQKGNELALPSKYVNFLYLASHYEKLKGSPEDNEQKQLFVEQHKHYLDEIIEQISEFSKRVILADANLDKVLSAYNKHRDKPIREQAENIIHLFTLTNLGAPAAFKYFDTTIDRKRYTSTKEVLDATLIHQSITGLYETRIDLSQLGGDGGGGGPAPEAAAKGGTLNLEDEYRLYETSAEPEVSPGSTWLSDFPQAWAETGGMGLAVRQAPLIIPLKATSTPVSIKQYPMSQEAKLGIKPHIQRLLDQGILVPCQSPWNTPLLPVKKPGTNDYRPVQDLREVNKRVEDIHPTVPNPYNLLSGLPPSHRWYTVLDLKDAFFCLRLHPTSQPLFAFEWRDPGMGISGQLTWTRLPQGFKNSPTLFNEALHRDLADFRIQHPDLILLQYVDDILLAATSELDCQQGTRALLLTLGNLGYRASAKKAQLCQKQVKYLGYLLKEGQRWLTEARKETVMGQPTPKTPRQLREFLGKAGFCRLFIPGFAEMAAPLYPLTKPGTLFNWGPDQQKAYQEIKQALLTAPALGLPDLTKPFELFVDEKQGYAKGVLTQKLGPWRRPVAYLSKKLDPVAAGWPPCLRMVAAIAVLRKDAGKLTMGQPLVILAPHAVEALVKQPPDRWLSNARMTHYQAMLLDTDRVQFGPVVALNPATLLPLPEEGAPHDCLEILAETHGTRPDLTDQPIPDADHTWYTDGSSFLQEGQRKAGAAVTTETEVIWARALPAGTSAQRAELIALTQALKMAEGKRLNVYTDSRYAFATAHIHGEIYRRRGWLTSEGREIKNKSEILALLKALFLPKRLSIIHCLGHQKGDSAEARGNRLADQAAREAAIKTPPDTSTLLAGKRTADGSEFEKRTADGSEFESPKKKAKVE

SEQ ID NO: 1930 - protein, 2091 aa, synthetic construct
MPAAKRVKLDGGDKKYSIGLDIGTNSVGWAVITDEYKVPSKKFKVLGNTDRHSIKKNLIGALLFDSGETAEATRLKRTARRRYTRRKNRICYLQEIFSNEMAKVDDSFFHRLEESFLVEEDKKHERHPIFGNIVDEVAYHEKYPTIYHLRKKLVDSTDKADLRLIYLALAHMIKFRGHFLIEGDLNPDNSDVDKLFIQLVQTYNQLFEENPINASGVDAKAILSARLSKSRRLENLIAQLPGEKKNGLFGNLIALSLGLTPNFKSNFDLAEDAKLQLSKDTYDDDLDNLLAQIGDQYADLFLAAKNLSDAILLSDILRVNTEITKAPLSASMIKRYDEHHQDLTLLKALVRQQLPEKYKEIFFDQSKNGYAGYIDGGASQEEFYKFIKPILEKMDGTEELLVKLNREDLLRKQRTFDNGSIPHQIHLGELHAILRRQEDFYPFLKDNREKIEKILTFRIPYYVGPLARGNSRFAWMTRKSEETITPWNFEEVVDKGASAQSFIERMTNFDKNLPNEKVLPKHSLLYEYFTVYNELTKVKYVTEGMRKPAFLSGEQKKAIVDLLFKTNRKVTVKQLKEDYFKKIECFDSVEISGVEDRFNASLGTYHDLLKIIKDKDFLDNEENEDILEDIVLTLTLFEDREMIEERLKTYAHLFDDKVMKQLKRRRYTGWGRLSRKLINGIRDKQSGKTILDFLKSDGFANRNFMQLIHDDSLTFKEDIQKAQVSGQGDSLHEHIANLAGSPAIKKGILQTVKVVDELVKVMGRHKPENIVIEMARENQTTQKGQKNSRERMKRIEEGIKELGSQILKEHPVENTQLQNEKLYLYYLQNGRDMYVDQELDINRLSDYDVDHIVPQSFLKDDSIDNKVLTRSDKARGKSDNVPSEEVVKKMKNYWRQLLNAKLITQRKFDNLTKAERGGLSELDKAGFIKRQLVETRQITKHVAQILDSRMNTKYDENDKLIREVKVITLKSKLVSDFRKDFQFYKVREINNYHHAHDAYLNAVVGTALIKKYPKLESEFVYGDYKVYDVRKMIAKSEQEIGKATAKYFFYSNIMNFFKTEITLANGEIRKRPLIETNGETGEIVWDKGRDFATVRKVLSMPQVNIVKKTEVQTGGFSKESILPKRNSDKLIARKKDWDPKKYGGFDSPTVAYSVLVVAKVEKGKSKKLKSVKELLGITIMERSSFEKNPIDFLEAKGYKEVKKDLIIKLPKYSLFELENGRKRMLASAGELQKGNELALPSKYVNFLYLASHYEKLKGSPEDNEQKQLFVEQHKHYLDEIIEQISEFSKRVILADANLDKVLSAYNKHRDKPIREQAENIIHLFTLTNLGAPAAFKYFDTTIDRKRYTSTKEVLDATLIHQSITGLYETRIDLSQLGGDGGGGGGSSGGTLNLEDEYRLYETSAEPEVSPGSTWLSDFPQAWAETGGMGLAVRQAPLIIPLKATSTPVSIKQYPMSQEAKLGIKPHIQRLLDQGILVPCQSPWNTPLLPVKKPGTNDYRPVQDLREVNKRVEDIHPTVPNPYNLLSGLPPSHRWYTVLDLKDAFFCLRLHPTSQPLFAFEWRDPGMGISGQLTWTRLPQGFKNSPTLFNEALHRDLADFRIQHPDLILLQYVDDILLAATSELDCQQGTRALLLTLGNLGYRASAKKAQLCQKQVKYLGYLLKEGQRWLTEARKETVMGQPTPKTPRQLREFLGKAGFCRLFIPGFAEMAAPLYPLTKPGTLFNWGPDQQKAYQEIKQALLTAPALGLPDLTKPFELFVDEKQGYAKGVLTQKLGPWRRPVAYLSKKLDPVAAGWPPCLRMVAAIAVLRKDAGKLTMGQPLVILAPHAVEALVKQPPDRWLSNARMTHYQAMLLDTDRVQFGPVVALNPATLLPLPEEGAPHDCLEILAETHGTRPDLTDQPIPDADHTWYTDGSSFLQEGQRKAGAAVTTETEVIWARALPAGTSAQRAELIALTQALKMAEGKRLNVYTDSRYAFATAHIHGEIYRRRGWLTSEGREIKNKSEILALLKALFLPKRLSIIHCLGHQKGDSAEARGNRLADQAAREAAIKTPPDTSTLLAGKRTADGSEFEKRTADGSEFESPKKKAKVE

SEQ ID NO: 1931 - protein, 2091 aa, synthetic construct
MPAAKRVKLDGGDKKYSIGLDIGTNSVGWAVITDEYKVPSKKFKVLGNTDRHSIKKNLIGALLFDSGETAEATRLKRTARRRYTRRKNRICYLQEIFSNEMAKVDDSFFHRLEESFLVEEDKKHERHPIFGNIVDEVAYHEKYPTIYHLRKKLVDSTDKADLRLIYLALAHMIKFRGHFLIEGDLNPDNSDVDKLFIQLVQTYNQLFEENPINASGVDAKAILSARLSKSRRLENLIAQLPGEKKNGLFGNLIALSLGLTPNFKSNFDLAEDAKLQLSKDTYDDDLDNLLAQIGDQYADLFLAAKNLSDAILLSDILRVNTEITKAPLSASMIKRYDEHHQDLTLLKALVRQQLPEKYKEIFFDQSKNGYAGYIDGGASQEEFYKFIKPILEKMDGTEELLVKLNREDLLRKQRTFDNGSIPHQIHLGELHAILRRQEDFYPFLKDNREKIEKILTFRIPYYVGPLARGNSRFAWMTRKSEETITPWNFEEVVDKGASAQSFIERMTNFDKNLPNEKVLPKHSLLYEYFTVYNELTKVKYVTEGMRKPAFLSGEQKKAIVDLLFKTNRKVTVKQLKEDYFKKIECFDSVEISGVEDRFNASLGTYHDLLKIIKDKDFLDNEENEDILEDIVLTLTLFEDREMIEERLKTYAHLFDDKVMKQLKRRRYTGWGRLSRKLINGIRDKQSGKTILDFLKSDGFANRNFMQLIHDDSLTFKEDIQKAQVSGQGDSLHEHIANLAGSPAIKKGILQTVKVVDELVKVMGRHKPENIVIEMARENQTTQKGQKNSRERMKRIEEGIKELGSQILKEHPVENTQLQNEKLYLYYLQNGRDMYVDQELDINRLSDYDVDHIVPQSFLKDDSIDNKVLTRSDKARGKSDNVPSEEVVKKMKNYWRQLLNAKLITQRKFDNLTKAERGGLSELDKAGFIKRQLVETRQITKHVAQILDSRMNTKYDENDKLIREVKVITLKSKLVSDFRKDFQFYKVREINNYHHAHDAYLNAVVGTALIKKYPKLESEFVYGDYKVYDVRKMIAKSEQEIGKATAKYFFYSNIMNFFKTEITLANGEIRKRPLIETNGETGEIVWDKGRDFATVRKVLSMPQVNIVKKTEVQTGGFSKESILPKRNSDKLIARKKDWDPKKYGGFDSPTVAYSVLVVAKVEKGKSKKLKSVKELLGITIMERSSFEKNPIDFLEAKGYKEVKKDLIIKLPKYSLFELENGRKRMLASAGELQKGNELALPSKYVNFLYLASHYEKLKGSPEDNEQKQLFVEQHKHYLDEIIEQISEFSKRVILADANLDKVLSAYNKHRDKPIREQAENIIHLFTLTNLGAPAAFKYFDTTIDRKRYTSTKEVLDATLIHQSITGLYETRIDLSQLGGDGGGSSGGSGGTLNLEDEYRLYETSAEPEVSPGSTWLSDFPQAWAETGGMGLAVRQAPLIIPLKATSTPVSIKQYPMSQEAKLGIKPHIQRLLDQGILVPCQSPWNTPLLPVKKPGTNDYRPVQDLREVNKRVEDIHPTVPNPYNLLSGLPPSHRWYTVLDLKDAFFCLRLHPTSQPLFAFEWRDPGMGISGQLTWTRLPQGFKNSPTLFNEALHRDLADFRIQHPDLILLQYVDDILLAATSELDCQQGTRALLLTLGNLGYRASAKKAQLCQKQVKYLGYLLKEGQRWLTEARKETVMGQPTPKTPRQLREFLGKAGFCRLFIPGFAEMAAPLYPLTKPGTLFNWGPDQQKAYQEIKQALLTAPALGLPDLTKPFELFVDEKQGYAKGVLTQKLGPWRRPVAYLSKKLDPVAAGWPPCLRMVAAIAVLRKDAGKLTMGQPLVILAPHAVEALVKQPPDRWLSNARMTHYQAMLLDTDRVQFGPVVALNPATLLPLPEEGAPHDCLEILAETHGTRPDLTDQPIPDADHTWYTDGSSFLQEGQRKAGAAVTTETEVIWARALPAGTSAQRAELIALTQALKMAEGKRLNVYTDSRYAFATAHIHGEIYRRRGWLTSEGREIKNKSEILALLKALFLPKRLSIIHCLGHQKGDSAEARGNRLADQAAREAAIKTPPDTSTLLAGKRTADGSEFEKRTADGSEFESPKKKAKVE

SEQ ID NO: 1932 - protein, 2094 aa, synthetic construct
MPAAKRVKLDGGDKKYSIGLDIGTNSVGWAVITDEYKVPSKKFKVLGNTDRHSIKKNLIGALLFDSGETAEATRLKRTARRRYTRRKNRICYLQEIFSNEMAKVDDSFFHRLEESFLVEEDKKHERHPIFGNIVDEVAYHEKYPTIYHLRKKLVDSTDKADLRLIYLALAHMIKFRGHFLIEGDLNPDNSDVDKLFIQLVQTYNQLFEENPINASGVDAKAILSARLSKSRRLENLIAQLPGEKKNGLFGNLIALSLGLTPNFKSNFDLAEDAKLQLSKDTYDDDLDNLLAQIGDQYADLFLAAKNLSDAILLSDILRVNTEITKAPLSASMIKRYDEHHQDLTLLKALVRQQLPEKYKEIFFDQSKNGYAGYIDGGASQEEFYKFIKPILEKMDGTEELLVKLNREDLLRKQRTFDNGSIPHQIHLGELHAILRRQEDFYPFLKDNREKIEKILTFRIPYYVGPLARGNSRFAWMTRKSEETITPWNFEEVVDKGASAQSFIERMTNFDKNLPNEKVLPKHSLLYEYFTVYNELTKVKYVTEGMRKPAFLSGEQKKAIVDLLFKTNRKVTVKQLKEDYFKKIECFDSVEISGVEDRFNASLGTYHDLLKIIKDKDFLDNEENEDILEDIVLTLTLFEDREMIEERLKTYAHLFDDKVMKQLKRRRYTGWGRLSRKLINGIRDKQSGKTILDFLKSDGFANRNFMQLIHDDSLTFKEDIQKAQVSGQGDSLHEHIANLAGSPAIKKGILQTVKVVDELVKVMGRHKPENIVIEMARENQTTQKGQKNSRERMKRIEEGIKELGSQILKEHPVENTQLQNEKLYLYYLQNGRDMYVDQELDINRLSDYDVDHIVPQSFLKDDSIDNKVLTRSDKARGKSDNVPSEEVVKKMKNYWRQLLNAKLITQRKFDNLTKAERGGLSELDKAGFIKRQLVETRQITKHVAQILDSRMNTKYDENDKLIREVKVITLKSKLVSDFRKDFQFYKVREINNYHHAHDAYLNAVVGTALIKKYPKLESEFVYGDYKVYDVRKMIAKSEQEIGKATAKYFFYSNIMNFFKTEITLANGEIRKRPLIETNGETGEIVWDKGRDFATVRKVLSMPQVNIVKKTEVQTGGFSKESILPKRNSDKLIARKKDWDPKKYGGFDSPTVAYSVLVVAKVEKGKSKKLKSVKELLGITIMERSSFEKNPIDFLEAKGYKEVKKDLIIKLPKYSLFELENGRKRMLASAGELQKGNELALPSKYVNFLYLASHYEKLKGSPEDNEQKQLFVEQHKHYLDEIIEQISEFSKRVILADANLDKVLSAYNKHRDKPIREQAENIIHLFTLTNLGAPAAFKYFDTTIDRKRYTSTKEVLDATLIHQSITGLYETRIDLSQLGGDGGGSSGGSGGGGGTLNLEDEYRLYETSAEPEVSPGSTWLSDFPQAWAETGGMGLAVRQAPLIIPLKATSTPVSIKQYPMSQEAKLGIKPHIQRLLDQGILVPCQSPWNTPLLPVKKPGTNDYRPVQDLREVNKRVEDIHPTVPNPYNLLSGLPPSHRWYTVLDLKDAFFCLRLHPTSQPLFAFEWRDPGMGISGQLTWTRLPQGFKNSPTLFNEALHRDLADFRIQHPDLILLQYVDDILLAATSELDCQQGTRALLLTLGNLGYRASAKKAQLCQKQVKYLGYLLKEGQRWLTEARKETVMGQPTPKTPRQLREFLGKAGFCRLFIPGFAEMAAPLYPLTKPGTLFNWGPDQQKAYQEIKQALLTAPALGLPDLTKPFELFVDEKQGYAKGVLTQKLGPWRRPVAYLSKKLDPVAAGWPPCLRMVAAIAVLRKDAGKLTMGQPLVILAPHAVEALVKQPPDRWLSNARMTHYQAMLLDTDRVQFGPVVALNPATLLPLPEEGAPHDCLEILAETHGTRPDLTDQPIPDADHTWYTDGSSFLQEGQRKAGAAVTTETEVIWARALPAGTSAQRAELIALTQALKMAEGKRLNVYTDSRYAFATAHIHGEIYRRRGWLTSEGREIKNKSEILALLKALFLPKRLSIIHCLGHQKGDSAEARGNRLADQAAREAAIKTPPDTSTLLAGKRTADGSEFEKRTADGSEFESPKKKAKVE

SEQ ID NO: 1933 - protein, 2092 aa, synthetic construct
MPAAKRVKLDGGDKKYSIGLDIGTNSVGWAVITDEYKVPSKKFKVLGNTDRHSIKKNLIGALLFDSGETAEATRLKRTARRRYTRRKNRICYLQEIFSNEMAKVDDSFFHRLEESFLVEEDKKHERHPIFGNIVDEVAYHEKYPTIYHLRKKLVDSTDKADLRLIYLALAHMIKFRGHFLIEGDLNPDNSDVDKLFIQLVQTYNQLFEENPINASGVDAKAILSARLSKSRRLENLIAQLPGEKKNGLFGNLIALSLGLTPNFKSNFDLAEDAKLQLSKDTYDDDLDNLLAQIGDQYADLFLAAKNLSDAILLSDILRVNTEITKAPLSASMIKRYDEHHQDLTLLKALVRQQLPEKYKEIFFDQSKNGYAGYIDGGASQEEFYKFIKPILEKMDGTEELLVKLNREDLLRKQRTFDNGSIPHQIHLGELHAILRRQEDFYPFLKDNREKIEKILTFRIPYYVGPLARGNSRFAWMTRKSEETITPWNFEEVVDKGASAQSFIERMTNFDKNLPNEKVLPKHSLLYEYFTVYNELTKVKYVTEGMRKPAFLSGEQKKAIVDLLFKTNRKVTVKQLKEDYFKKIECFDSVEISGVEDRFNASLGTYHDLLKIIKDKDFLDNEENEDILEDIVLTLTLFEDREMIEERLKTYAHLFDDKVMKQLKRRRYTGWGRLSRKLINGIRDKQSGKTILDFLKSDGFANRNFMQLIHDDSLTFKEDIQKAQVSGQGDSLHEHIANLAGSPAIKKGILQTVKVVDELVKVMGRHKPENIVIEMARENQTTQKGQKNSRERMKRIEEGIKELGSQILKEHPVENTQLQNEKLYLYYLQNGRDMYVDQELDINRLSDYDVDHIVPQSFLKDDSIDNKVLTRSDKARGKSDNVPSEEVVKKMKNYWRQLLNAKLITQRKFDNLTKAERGGLSELDKAGFIKRQLVETRQITKHVAQILDSRMNTKYDENDKLIREVKVITLKSKLVSDFRKDFQFYKVREINNYHHAHDAYLNAVVGTALIKKYPKLESEFVYGDYKVYDVRKMIAKSEQEIGKATAKYFFYSNIMNFFKTEITLANGEIRKRPLIETNGETGEIVWDKGRDFATVRKVLSMPQVNIVKKTEVQTGGFSKESILPKRNSDKLIARKKDWDPKKYGGFDSPTVAYSVLVVAKVEKGKSKKLKSVKELLGITIMERSSFEKNPIDFLEAKGYKEVKKDLIIKLPKYSLFELENGRKRMLASAGELQKGNELALPSKYVNFLYLASHYEKLKGSPEDNEQKQLFVEQHKHYLDEIIEQISEFSKRVILADANLDKVLSAYNKHRDKPIREQAENIIHLFTLTNLGAPAAFKYFDTTIDRKRYTSTKEVLDATLIHQSITGLYETRIDLSQLGGDGGPAPAPAPGGTLNLEDEYRLYETSAEPEVSPGSTWLSDFPQAWAETGGMGLAVRQAPLIIPLKATSTPVSIKQYPMSQEAKLGIKPHIQRLLDQGILVPCQSPWNTPLLPVKKPGTNDYRPVQDLREVNKRVEDIHPTVPNPYNLLSGLPPSHRWYTVLDLKDAFFCLRLHPTSQPLFAFEWRDPGMGISGQLTWTRLPQGFKNSPTLFNEALHRDLADFRIQHPDLILLQYVDDILLAATSELDCQQGTRALLLTLGNLGYRASAKKAQLCQKQVKYLGYLLKEGQRWLTEARKETVMGQPTPKTPRQLREFLGKAGFCRLFIPGFAEMAAPLYPLTKPGTLFNWGPDQQKAYQEIKQALLTAPALGLPDLTKPFELFVDEKQGYAKGVLTQKLGPWRRPVAYLSKKLDPVAAGWPPCLRMVAAIAVLRKDAGKLTMGQPLVILAPHAVEALVKQPPDRWLSNARMTHYQAMLLDTDRVQFGPVVALNPATLLPLPEEGAPHDCLEILAETHGTRPDLTDQPIPDADHTWYTDGSSFLQEGQRKAGAAVTTETEVIWARALPAGTSAQRAELIALTQALKMAEGKRLNVYTDSRYAFATAHIHGEIYRRRGWLTSEGREIKNKSEILALLKALFLPKRLSIIHCLGHQKGDSAEARGNRLADQAAREAAIKTPPDTSTLLAGKRTADGSEFEKRTADGSEFESPKKKAKVE

SEQ ID NO: 1934 - protein, 2102 aa, synthetic construct
MPAAKRVKLDGGDKKYSIGLDIGTNSVGWAVITDEYKVPSKKFKVLGNTDRHSIKKNLIGALLFDSGETAEATRLKRTARRRYTRRKNRICYLQEIFSNEMAKVDDSFFHRLEESFLVEEDKKHERHPIFGNIVDEVAYHEKYPTIYHLRKKLVDSTDKADLRLIYLALAHMIKFRGHFLIEGDLNPDNSDVDKLFIQLVQTYNQLFEENPINASGVDAKAILSARLSKSRRLENLIAQLPGEKKNGLFGNLIALSLGLTPNFKSNFDLAEDAKLQLSKDTYDDDLDNLLAQIGDQYADLFLAAKNLSDAILLSDILRVNTEITKAPLSASMIKRYDEHHQDLTLLKALVRQQLPEKYKEIFFDQSKNGYAGYIDGGASQEEFYKFIKPILEKMDGTEELLVKLNREDLLRKQRTFDNGSIPHQIHLGELHAILRRQEDFYPFLKDNREKIEKILTFRIPYYVGPLARGNSRFAWMTRKSEETITPWNFEEVVDKGASAQSFIERMTNFDKNLPNEKVLPKHSLLYEYFTVYNELTKVKYVTEGMRKPAFLSGEQKKAIVDLLFKTNRKVTVKQLKEDYFKKIECFDSVEISGVEDRFNASLGTYHDLLKIIKDKDFLDNEENEDILEDIVLTLTLFEDREMIEERLKTYAHLFDDKVMKQLKRRRYTGWGRLSRKLINGIRDKQSGKTILDFLKSDGFANRNFMQLIHDDSLTFKEDIQKAQVSGQGDSLHEHIANLAGSPAIKKGILQTVKVVDELVKVMGRHKPENIVIEMARENQTTQKGQKNSRERMKRIEEGIKELGSQILKEHPVENTQLQNEKLYLYYLQNGRDMYVDQELDINRLSDYDVDHIVPQSFLKDDSIDNKVLTRSDKARGKSDNVPSEEVVKKMKNYWRQLLNAKLITQRKFDNLTKAERGGLSELDKAGFIKRQLVETRQITKHVAQILDSRMNTKYDENDKLIREVKVITLKSKLVSDFRKDFQFYKVREINNYHHAHDAYLNAVVGTALIKKYPKLESEFVYGDYKVYDVRKMIAKSEQEIGKATAKYFFYSNIMNFFKTEITLANGEIRKRPLIETNGETGEIVWDKGRDFATVRKVLSMPQVNIVKKTEVQTGGFSKESILPKRNSDKLIARKKDWDPKKYGGFDSPTVAYSVLVVAKVEKGKSKKLKSVKELLGITIMERSSFEKNPIDFLEAKGYKEVKKDLIIKLPKYSLFELENGRKRMLASAGELQKGNELALPSKYVNFLYLASHYEKLKGSPEDNEQKQLFVEQHKHYLDEIIEQISEFSKRVILADANLDKVLSAYNKHRDKPIREQAENIIHLFTLTNLGAPAAFKYFDTTIDRKRYTSTKEVLDATLIHQSITGLYETRIDLSQLGGDGGPAPAPAPAPAPGGTVSLQDEHRLFDIPVTTSLPDVWLQDFPQAWAETGGLGRAKCQAPIIIDLKPTAVPVSIKQYPMSLEAHMGIRQHIIKFLELGVLRPCRSPWNTPLLPVKKPGTQDYRPVQDLREINKRTVDIHPTVPNPYNLLSTLKPDYSWYTVLDLKDAFFCLPLAPQSQELFAFEWKDPERGISGQLTWTRLPQGFKNSPTLFNEALHRDLTDFRTQHPEVTLLQYVDDLLLAAPTKKACTQGTRHLLQELGEKGYRASAKKAQICQTKVTYLGYILSEGKRWLTPGRIETVARIPPPRNPREVREFLGKAGFCRLFIPGFAELAAPLYALTKPSTPFTWQTEHQLAFEALKKALLSAPALGLPDTSKPFTLFLDERQGIAKGVLTQKLGPWKRPVAYLSKKLDPVAAGWPPCLRIMAATAMLVKDSAKLTLGQPLTVITPHTLEAIVRQPPDRWITNARLTHYQALLLDTDRVQFGPPVTLNPATLLPVPENQPSPHDCRQVLAETHGTREDLKDQELPDADHTWYTDGSSYLDSGTRRAGAAVVDGHNTIWAQSLPPGTSAQKAELIALTKALELSKGKKANIYTDSRYAFATAHTHGSIYERRGWLTSEGKEIKNKAEIIALLKALFLPQEVAIIHCPGHQKGQDPVAVGNRQADRVARQAAMAEVLTLATEPDNTSHITAGKRTADGSEFEKRTADGSEFESPKKKAKVE

SEQ ID NO: 1935 - protein, 2102 aa, synthetic construct
MPAAKRVKLDGGDKKYSIGLDIGTNSVGWAVITDEYKVPSKKFKVLGNTDRHSIKKNLIGALLFDSGETAEATRLKRTARRRYTRRKNRICYLQEIFSNEMAKVDDSFFHRLEESFLVEEDKKHERHPIFGNIVDEVAYHEKYPTIYHLRKKLVDSTDKADLRLIYLALAHMIKFRGHFLIEGDLNPDNSDVDKLFIQLVQTYNQLFEENPINASGVDAKAILSARLSKSRRLENLIAQLPGEKKNGLFGNLIALSLGLTPNFKSNFDLAEDAKLQLSKDTYDDDLDNLLAQIGDQYADLFLAAKNLSDAILLSDILRVNTEITKAPLSASMIKRYDEHHQDLTLLKALVRQQLPEKYKEIFFDQSKNGYAGYIDGGASQEEFYKFIKPILEKMDGTEELLVKLNREDLLRKQRTFDNGSIPHQIHLGELHAILRRQEDFYPFLKDNREKIEKILTFRIPYYVGPLARGNSRFAWMTRKSEETITPWNFEEVVDKGASAQSFIERMTNFDKNLPNEKVLPKHSLLYEYFTVYNELTKVKYVTEGMRKPAFLSGEQKKAIVDLLFKTNRKVTVKQLKEDYFKKIECFDSVEISGVEDRFNASLGTYHDLLKIIKDKDFLDNEENEDILEDIVLTLTLFEDREMIEERLKTYAHLFDDKVMKQLKRRRYTGWGRLSRKLINGIRDKQSGKTILDFLKSDGFANRNFMQLIHDDSLTFKEDIQKAQVSGQGDSLHEHIANLAGSPAIKKGILQTVKVVDELVKVMGRHKPENIVIEMARENQTTQKGQKNSRERMKRIEEGIKELGSQILKEHPVENTQLQNEKLYLYYLQNGRDMYVDQELDINRLSDYDVDHIVPQSFLKDDSIDNKVLTRSDKARGKSDNVPSEEVVKKMKNYWRQLLNAKLITQRKFDNLTKAERGGLSELDKAGFIKRQLVETRQITKHVAQILDSRMNTKYDENDKLIREVKVITLKSKLVSDFRKDFQFYKVREINNYHHAHDAYLNAVVGTALIKKYPKLESEFVYGDYKVYDVRKMIAKSEQEIGKATAKYFFYSNIMNFFKTEITLANGEIRKRPLIETNGETGEIVWDKGRDFATVRKVLSMPQVNIVKKTEVQTGGFSKESILPKRNSDKLIARKKDWDPKKYGGFDSPTVAYSVLVVAKVEKGKSKKLKSVKELLGITIMERSSFEKNPIDFLEAKGYKEVKKDLIIKLPKYSLFELENGRKRMLASAGELQKGNELALPSKYVNFLYLASHYEKLKGSPEDNEQKQLFVEQHKHYLDEIIEQISEFSKRVILADANLDKVLSAYNKHRDKPIREQAENIIHLFTLTNLGAPAAFKYFDTTIDRKRYTSTKEVLDATLIHQSITGLYETRIDLSQLGGDGGEAAAKGGSGGGGGTVSLQDEHRLFDIPVTTSLPDVWLQDFPQAWAETGGLGRAKCQAPIIIDLKPTAVPVSIKQYPMSLEAHMGIRQHIIKFLELGVLRPCRSPWNTPLLPVKKPGTQDYRPVQDLREINKRTVDIHPTVPNPYNLLSTLKPDYSWYTVLDLKDAFFCLPLAPQSQELFAFEWKDPERGISGQLTWTRLPQGFKNSPTLFNEALHRDLTDFRTQHPEVTLLQYVDDLLLAAPTKKACTQGTRHLLQELGEKGYRASAKKAQICQTKVTYLGYILSEGKRWLTPGRIETVARIPPPRNPREVREFLGKAGFCRLFIPGFAELAAPLYALTKPSTPFTWQTEHQLAFEALKKALLSAPALGLPDTSKPFTLFLDERQGIAKGVLTQKLGPWKRPVAYLSKKLDPVAAGWPPCLRIMAATAMLVKDSAKLTLGQPLTVITPHTLEAIVRQPPDRWITNARLTHYQALLLDTDRVQFGPPVTLNPATLLPVPENQPSPHDCRQVLAETHGTREDLKDQELPDADHTWYTDGSSYLDSGTRRAGAAVVDGHNTIWAQSLPPGTSAQKAELIALTKALELSKGKKANIYTDSRYAFATAHTHGSIYERRGWLTSEGKEIKNKAEIIALLKALFLPQEVAIIHCPGHQKGQDPVAVGNRQADRVARQAAMAEVLTLATEPDNTSHITAGKRTADGSEFEKRTADGSEFESPKKKAKVE

SEQ ID NO: 1936 - protein, 2121 aa, synthetic construct
MPAAKRVKLDGGDKKYSIGLDIGTNSVGWAVITDEYKVPSKKFKVLGNTDRHSIKKNLIGALLFDSGETAEATRLKRTARRRYTRRKNRICYLQEIFSNEMAKVDDSFFHRLEESFLVEEDKKHERHPIFGNIVDEVAYHEKYPTIYHLRKKLVDSTDKADLRLIYLALAHMIKFRGHFLIEGDLNPDNSDVDKLFIQLVQTYNQLFEENPINASGVDAKAILSARLSKSRRLENLIAQLPGEKKNGLFGNLIALSLGLTPNFKSNFDLAEDAKLQLSKDTYDDDLDNLLAQIGDQYADLFLAAKNLSDAILLSDILRVNTEITKAPLSASMIKRYDEHHQDLTLLKALVRQQLPEKYKEIFFDQSKNGYAGYIDGGASQEEFYKFIKPILEKMDGTEELLVKLNREDLLRKQRTFDNGSIPHQIHLGELHAILRRQEDFYPFLKDNREKIEKILTFRIPYYVGPLARGNSRFAWMTRKSEETITPWNFEEVVDKGASAQSFIERMTNFDKNLPNEKVLPKHSLLYEYFTVYNELTKVKYVTEGMRKPAFLSGEQKKAIVDLLFKTNRKVTVKQLKEDYFKKIECFDSVEISGVEDRFNASLGTYHDLLKIIKDKDFLDNEENEDILEDIVLTLTLFEDREMIEERLKTYAHLFDDKVMKQLKRRRYTGWGRLSRKLINGIRDKQSGKTILDFLKSDGFANRNFMQLIHDDSLTFKEDIQKAQVSGQGDSLHEHIANLAGSPAIKKGILQTVKVVDELVKVMGRHKPENIVIEMARENQTTQKGQKNSRERMKRIEEGIKELGSQILKEHPVENTQLQNEKLYLYYLQNGRDMYVDQELDINRLSDYDVDHIVPQSFLKDDSIDNKVLTRSDKARGKSDNVPSEEVVKKMKNYWRQLLNAKLITQRKFDNLTKAERGGLSELDKAGFIKRQLVETRQITKHVAQILDSRMNTKYDENDKLIREVKVITLKSKLVSDFRKDFQFYKVREINNYHHAHDAYLNAVVGTALIKKYPKLESEFVYGDYKVYDVRKMIAKSEQEIGKATAKYFFYSNIMNFFKTEITLANGEIRKRPLIETNGETGEIVWDKGRDFATVRKVLSMPQVNIVKKTEVQTGGFSKESILPKRNSDKLIARKKDWDPKKYGGFDSPTVAYSVLVVAKVEKGKSKKLKSVKELLGITIMERSSFEKNPIDFLEAKGYKEVKKDLIIKLPKYSLFELENGRKRMLASAGELQKGNELALPSKYVNFLYLASHYEKLKGSPEDNEQKQLFVEQHKHYLDEIIEQISEFSKRVILADANLDKVLSAYNKHRDKPIREQAENIIHLFTLTNLGAPAAFKYFDTTIDRKRYTSTKEVLDATLIHQSITGLYETRIDLSQLGGDGGGGGGSGGGGSGGGGSGGGGSGGGGSGGGGSGGTVSLQDEHRLFDIPVTTSLPDVWLQDFPQAWAETGGLGRAKCQAPIIIDLKPTAVPVSIKQYPMSLEAHMGIRQHIIKFLELGVLRPCRSPWNTPLLPVKKPGTQDYRPVQDLREINKRTVDIHPTVPNPYNLLSTLKPDYSWYTVLDLKDAFFCLPLAPQSQELFAFEWKDPERGISGQLTWTRLPQGFKNSPTLFNEALHRDLTDFRTQHPEVTLLQYVDDLLLAAPTKKACTQGTRHLLQELGEKGYRASAKKAQICQTKVTYLGYILSEGKRWLTPGRIETVARIPPPRNPREVREFLGKAGFCRLFIPGFAELAAPLYALTKPSTPFTWQTEHQLAFEALKKALLSAPALGLPDTSKPFTLFLDERQGIAKGVLTQKLGPWKRPVAYLSKKLDPVAAGWPPCLRIMAATAMLVKDSAKLTLGQPLTVITPHTLEAIVRQPPDRWITNARLTHYQALLLDTDRVQFGPPVTLNPATLLPVPENQPSPHDCRQVLAETHGTREDLKDQELPDADHTWYTDGSSYLDSGTRRAGAAVVDGHNTIWAQSLPPGTSAQKAELIALTKALELSKGKKANIYTDSRYAFATAHTHGSIYERRGWLTSEGKEIKNKAEIIALLKALFLPQEVAIIHCPGHQKGQDPVAVGNRQADRVARQAAMAEVLTLATEPDNTSHITAGKRTADGSEFEKRTADGSEFESPKKKAKVE

SEQ ID NO: 1937 - protein, 2102 aa, synthetic construct
MPAAKRVKLDGGDKKYSIGLDIGTNSVGWAVITDEYKVPSKKFKVLGNTDRHSIKKNLIGALLFDSGETAEATRLKRTARRRYTRRKNRICYLQEIFSNEMAKVDDSFFHRLEESFLVEEDKKHERHPIFGNIVDEVAYHEKYPTIYHLRKKLVDSTDKADLRLIYLALAHMIKFRGHFLIEGDLNPDNSDVDKLFIQLVQTYNQLFEENPINASGVDAKAILSARLSKSRRLENLIAQLPGEKKNGLFGNLIALSLGLTPNFKSNFDLAEDAKLQLSKDTYDDDLDNLLAQIGDQYADLFLAAKNLSDAILLSDILRVNTEITKAPLSASMIKRYDEHHQDLTLLKALVRQQLPEKYKEIFFDQSKNGYAGYIDGGASQEEFYKFIKPILEKMDGTEELLVKLNREDLLRKQRTFDNGSIPHQIHLGELHAILRRQEDFYPFLKDNREKIEKILTFRIPYYVGPLARGNSRFAWMTRKSEETITPWNFEEVVDKGASAQSFIERMTNFDKNLPNEKVLPKHSLLYEYFTVYNELTKVKYVTEGMRKPAFLSGEQKKAIVDLLFKTNRKVTVKQLKEDYFKKIECFDSVEISGVEDRFNASLGTYHDLLKIIKDKDFLDNEENEDILEDIVLTLTLFEDREMIEERLKTYAHLFDDKVMKQLKRRRYTGWGRLSRKLINGIRDKQSGKTILDFLKSDGFANRNFMQLIHDDSLTFKEDIQKAQVSGQGDSLHEHIANLAGSPAIKKGILQTVKVVDELVKVMGRHKPENIVIEMARENQTTQKGQKNSRERMKRIEEGIKELGSQILKEHPVENTQLQNEKLYLYYLQNGRDMYVDQELDINRLSDYDVDHIVPQSFLKDDSIDNKVLTRSDKARGKSDNVPSEEVVKKMKNYWRQLLNAKLITQRKFDNLTKAERGGLSELDKAGFIKRQLVETRQITKHVAQILDSRMNTKYDENDKLIREVKVITLKSKLVSDFRKDFQFYKVREINNYHHAHDAYLNAVVGTALIKKYPKLESEFVYGDYKVYDVRKMIAKSEQEIGKATAKYFFYSNIMNFFKTEITLANGEIRKRPLIETNGETGEIVWDKGRDFATVRKVLSMPQVNIVKKTEVQTGGFSKESILPKRNSDKLIARKKDWDPKKYGGFDSPTVAYSVLVVAKVEKGKSKKLKSVKELLGITIMERSSFEKNPIDFLEAKGYKEVKKDLIIKLPKYSLFELENGRKRMLASAGELQKGNELALPSKYVNFLYLASHYEKLKGSPEDNEQKQLFVEQHKHYLDEIIEQISEFSKRVILADANLDKVLSAYNKHRDKPIREQAENIIHLFTLTNLGAPAAFKYFDTTIDRKRYTSTKEVLDATLIHQSITGLYETRIDLSQLGGDGGGGGGGSEAAAKGGTVSLQDEHRLFDIPVTTSLPDVWLQDFPQAWAETGGLGRAKCQAPIIIDLKPTAVPVSIKQYPMSLEAHMGIRQHIIKFLELGVLRPCRSPWNTPLLPVKKPGTQDYRPVQDLREINKRTVDIHPTVPNPYNLLSTLKPDYSWYTVLDLKDAFFCLPLAPQSQELFAFEWKDPERGISGQLTWTRLPQGFKNSPTLFNEALHRDLTDFRTQHPEVTLLQYVDDLLLAAPTKKACTQGTRHLLQELGEKGYRASAKKAQICQTKVTYLGYILSEGKRWLTPGRIETVARIPPPRNPREVREFLGKAGFCRLFIPGFAELAAPLYALTKPSTPFTWQTEHQLAFEALKKALLSAPALGLPDTSKPFTLFLDERQGIAKGVLTQKLGPWKRPVAYLSKKLDPVAAGWPPCLRIMAATAMLVKDSAKLTLGQPLTVITPHTLEAIVRQPPDRWITNARLTHYQALLLDTDRVQFGPPVTLNPATLLPVPENQPSPHDCRQVLAETHGTREDLKDQELPDADHTWYTDGSSYLDSGTRRAGAAVVDGHNTIWAQSLPPGTSAQKAELIALTKALELSKGKKANIYTDSRYAFATAHTHGSIYERRGWLTSEGKEIKNKAEIIALLKALFLPQEVAIIHCPGHQKGQDPVAVGNRQADRVARQAAMAEVLTLATEPDNTSHITAGKRTADGSEFEKRTADGSEFESPKKKAKVE

SEQ ID NO: 1938 - protein, 2102 aa, synthetic construct
MPAAKRVKLDGGDKKYSIGLDIGTNSVGWAVITDEYKVPSKKFKVLGNTDRHSIKKNLIGALLFDSGETAEATRLKRTARRRYTRRKNRICYLQEIFSNEMAKVDDSFFHRLEESFLVEEDKKHERHPIFGNIVDEVAYHEKYPTIYHLRKKLVDSTDKADLRLIYLALAHMIKFRGHFLIEGDLNPDNSDVDKLFIQLVQTYNQLFEENPINASGVDAKAILSARLSKSRRLENLIAQLPGEKKNGLFGNLIALSLGLTPNFKSNFDLAEDAKLQLSKDTYDDDLDNLLAQIGDQYADLFLAAKNLSDAILLSDILRVNTEITKAPLSASMIKRYDEHHQDLTLLKALVRQQLPEKYKEIFFDQSKNGYAGYIDGGASQEEFYKFIKPILEKMDGTEELLVKLNREDLLRKQRTFDNGSIPHQIHLGELHAILRRQEDFYPFLKDNREKIEKILTFRIPYYVGPLARGNSRFAWMTRKSEETITPWNFEEVVDKGASAQSFIERMTNFDKNLPNEKVLPKHSLLYEYFTVYNELTKVKYVTEGMRKPAFLSGEQKKAIVDLLFKTNRKVTVKQLKEDYFKKIECFDSVEISGVEDRFNASLGTYHDLLKIIKDKDFLDNEENEDILEDIVLTLTLFEDREMIEERLKTYAHLFDDKVMKQLKRRRYTGWGRLSRKLINGIRDKQSGKTILDFLKSDGFANRNFMQLIHDDSLTFKEDIQKAQVSGQGDSLHEHIANLAGSPAIKKGILQTVKVVDELVKVMGRHKPENIVIEMARENQTTQKGQKNSRERMKRIEEGIKELGSQILKEHPVENTQLQNEKLYLYYLQNGRDMYVDQELDINRLSDYDVDHIVPQSFLKDDSIDNKVLTRSDKARGKSDNVPSEEVVKKMKNYWRQLLNAKLITQRKFDNLTKAERGGLSELDKAGFIKRQLVETRQITKHVAQILDSRMNTKYDENDKLIREVKVITLKSKLVSDFRKDFQFYKVREINNYHHAHDAYLNAVVGTALIKKYPKLESEFVYGDYKVYDVRKMIAKSEQEIGKATAKYFFYSNIMNFFKTEITLANGEIRKRPLIETNGETGEIVWDKGRDFATVRKVLSMPQVNIVKKTEVQTGGFSKESILPKRNSDKLIARKKDWDPKKYGGFDSPTVAYSVLVVAKVEKGKSKKLKSVKELLGITIMERSSFEKNPIDFLEAKGYKEVKKDLIIKLPKYSLFELENGRKRMLASAGELQKGNELALPSKYVNFLYLASHYEKLKGSPEDNEQKQLFVEQHKHYLDEIIEQISEFSKRVILADANLDKVLSAYNKHRDKPIREQAENIIHLFTLTNLGAPAAFKYFDTTIDRKRYTSTKEVLDATLIHQSITGLYETRIDLSQLGGDGGGGGPAPEAAAKGGTVSLQDEHRLFDIPVTTSLPDVWLQDFPQAWAETGGLGRAKCQAPIIIDLKPTAVPVSIKQYPMSLEAHMGIRQHIIKFLELGVLRPCRSPWNTPLLPVKKPGTQDYRPVQDLREINKRTVDIHPTVPNPYNLLSTLKPDYSWYTVLDLKDAFFCLPLAPQSQELFAFEWKDPERGISGQLTWTRLPQGFKNSPTLFNEALHRDLTDFRTQHPEVTLLQYVDDLLLAAPTKKACTQGTRHLLQELGEKGYRASAKKAQICQTKVTYLGYILSEGKRWLTPGRIETVARIPPPRNPREVREFLGKAGFCRLFIPGFAELAAPLYALTKPSTPFTWQTEHQLAFEALKKALLSAPALGLPDTSKPFTLFLDERQGIAKGVLTQKLGPWKRPVAYLSKKLDPVAAGWPPCLRIMAATAMLVKDSAKLTLGQPLTVITPHTLEAIVRQPPDRWITNARLTHYQALLLDTDRVQFGPPVTLNPATLLPVPENQPSPHDCRQVLAETHGTREDLKDQELPDADHTWYTDGSSYLDSGTRRAGAAVVDGHNTIWAQSLPPGTSAQKAELIALTKALELSKGKKANIYTDSRYAFATAHTHGSIYERRGWLTSEGKEIKNKAEIIALLKALFLPQEVAIIHCPGHQKGQDPVAVGNRQADRVARQAAMAEVLTLATEPDNTSHITAGKRTADGSEFEKRTADGSEFESPKKKAKVE

SEQ ID NO: 1939 - protein, 2102 aa, synthetic construct
MPAAKRVKLDGGDKKYSIGLDIGTNSVGWAVITDEYKVPSKKFKVLGNTDRHSIKKNLIGALLFDSGETAEATRLKRTARRRYTRRKNRICYLQEIFSNEMAKVDDSFFHRLEESFLVEEDKKHERHPIFGNIVDEVAYHEKYPTIYHLRKKLVDSTDKADLRLIYLALAHMIKFRGHFLIEGDLNPDNSDVDKLFIQLVQTYNQLFEENPINASGVDAKAILSARLSKSRRLENLIAQLPGEKKNGLFGNLIALSLGLTPNFKSNFDLAEDAKLQLSKDTYDDDLDNLLAQIGDQYADLFLAAKNLSDAILLSDILRVNTEITKAPLSASMIKRYDEHHQDLTLLKALVRQQLPEKYKEIFFDQSKNGYAGYIDGGASQEEFYKFIKPILEKMDGTEELLVKLNREDLLRKQRTFDNGSIPHQIHLGELHAILRRQEDFYPFLKDNREKIEKILTFRIPYYVGPLARGNSRFAWMTRKSEETITPWNFEEVVDKGASAQSFIERMTNFDKNLPNEKVLPKHSLLYEYFTVYNELTKVKYVTEGMRKPAFLSGEQKKAIVDLLFKTNRKVTVKQLKEDYFKKIECFDSVEISGVEDRFNASLGTYHDLLKIIKDKDFLDNEENEDILEDIVLTLTLFEDREMIEERLKTYAHLFDDKVMKQLKRRRYTGWGRLSRKLINGIRDKQSGKTILDFLKSDGFANRNFMQLIHDDSLTFKEDIQKAQVSGQGDSLHEHIANLAGSPAIKKGILQTVKVVDELVKVMGRHKPENIVIEMARENQTTQKGQKNSRERMKRIEEGIKELGSQILKEHPVENTQLQNEKLYLYYLQNGRDMYVDQELDINRLSDYDVDHIVPQSFLKDDSIDNKVLTRSDKARGKSDNVPSEEVVKKMKNYWRQLLNAKLITQRKFDNLTKAERGGLSELDKAGFIKRQLVETRQITKHVAQILDSRMNTKYDENDKLIREVKVITLKSKLVSDFRKDFQFYKVREINNYHHAHDAYLNAVVGTALIKKYPKLESEFVYGDYKVYDVRKMIAKSEQEIGKATAKYFFYSNIMNFFKTEITLANGEIRKRPLIETNGETGEIVWDKGRDFATVRKVLSMPQVNIVKKTEVQTGGFSKESILPKRNSDKLIARKKDWDPKKYGGFDSPTVAYSVLVVAKVEKGKSKKLKSVKELLGITIMERSSFEKNPIDFLEAKGYKEVKKDLIIKLPKYSLFELENGRKRMLASAGELQKGNELALPSKYVNFLYLASHYEKLKGSPEDNEQKQLFVEQHKHYLDEIIEQISEFSKRVILADANLDKVLSAYNKHRDKPIREQAENIIHLFTLTNLGAPAAFKYFDTTIDRKRYTSTKEVLDATLIHQSITGLYETRIDLSQLGGDGGPAPGGSEAAAKGGTVSLQDEHRLFDIPVTTSLPDVWLQDFPQAWAETGGLGRAKCQAPIIIDLKPTAVPVSIKQYPMSLEAHMGIRQHIIKFLELGVLRPCRSPWNTPLLPVKKPGTQDYRPVQDLREINKRTVDIHPTVPNPYNLLSTLKPDYSWYTVLDLKDAFFCLPLAPQSQELFAFEWKDPERGISGQLTWTRLPQGFKNSPTLFNEALHRDLTDFRTQHPEVTLLQYVDDLLLAAPTKKACTQGTRHLLQELGEKGYRASAKKAQICQTKVTYLGYILSEGKRWLTPGRIETVARIPPPRNPREVREFLGKAGFCRLFIPGFAELAAPLYALTKPSTPFTWQTEHQLAFEALKKALLSAPALGLPDTSKPFTLFLDERQGIAKGVLTQKLGPWKRPVAYLSKKLDPVAAGWPPCLRIMAATAMLVKDSAKLTLGQPLTVITPHTLEAIVRQPPDRWITNARLTHYQALLLDTDRVQFGPPVTLNPATLLPVPENQPSPHDCRQVLAETHGTREDLKDQELPDADHTWYTDGSSYLDSGTRRAGAAVVDGHNTIWAQSLPPGTSAQKAELIALTKALELSKGKKANIYTDSRYAFATAHTHGSIYERRGWLTSEGKEIKNKAEIIALLKALFLPQEVAIIHCPGHQKGQDPVAVGNRQADRVARQAAMAEVLTLATEPDNTSHITAGKRTADGSEFEKRTADGSEFESPKKKAKVE

SEQ ID NO: 1940 - protein, 2097 aa, synthetic construct
MPAAKRVKLDGGDKKYSIGLDIGTNSVGWAVITDEYKVPSKKFKVLGNTDRHSIKKNLIGALLFDSGETAEATRLKRTARRRYTRRKNRICYLQEIFSNEMAKVDDSFFHRLEESFLVEEDKKHERHPIFGNIVDEVAYHEKYPTIYHLRKKLVDSTDKADLRLIYLALAHMIKFRGHFLIEGDLNPDNSDVDKLFIQLVQTYNQLFEENPINASGVDAKAILSARLSKSRRLENLIAQLPGEKKNGLFGNLIALSLGLTPNFKSNFDLAEDAKLQLSKDTYDDDLDNLLAQIGDQYADLFLAAKNLSDAILLSDILRVNTEITKAPLSASMIKRYDEHHQDLTLLKALVRQQLPEKYKEIFFDQSKNGYAGYIDGGASQEEFYKFIKPILEKMDGTEELLVKLNREDLLRKQRTFDNGSIPHQIHLGELHAILRRQEDFYPFLKDNREKIEKILTFRIPYYVGPLARGNSRFAWMTRKSEETITPWNFEEVVDKGASAQSFIERMTNFDKNLPNEKVLPKHSLLYEYFTVYNELTKVKYVTEGMRKPAFLSGEQKKAIVDLLFKTNRKVTVKQLKEDYFKKIECFDSVEISGVEDRFNASLGTYHDLLKIIKDKDFLDNEENEDILEDIVLTLTLFEDREMIEERLKTYAHLFDDKVMKQLKRRRYTGWGRLSRKLINGIRDKQSGKTILDFLKSDGFANRNFMQLIHDDSLTFKEDIQKAQVSGQGDSLHEHIANLAGSPAIKKGILQTVKVVDELVKVMGRHKPENIVIEMARENQTTQKGQKNSRERMKRIEEGIKELGSQILKEHPVENTQLQNEKLYLYYLQNGRDMYVDQELDINRLSDYDVDHIVPQSFLKDDSIDNKVLTRSDKARGKSDNVPSEEVVKKMKNYWRQLLNAKLITQRKFDNLTKAERGGLSELDKAGFIKRQLVETRQITKHVAQILDSRMNTKYDENDKLIREVKVITLKSKLVSDFRKDFQFYKVREINNYHHAHDAYLNAVVGTALIKKYPKLESEFVYGDYKVYDVRKMIAKSEQEIGKATAKYFFYSNIMNFFKTEITLANGEIRKRPLIETNGETGEIVWDKGRDFATVRKVLSMPQVNIVKKTEVQTGGFSKESILPKRNSDKLIARKKDWDPKKYGGFDSPTVAYSVLVVAKVEKGKSKKLKSVKELLGITIMERSSFEKNPIDFLEAKGYKEVKKDLIIKLPKYSLFELENGRKRMLASAGELQKGNELALPSKYVNFLYLASHYEKLKGSPEDNEQKQLFVEQHKHYLDEIIEQISEFSKRVILADANLDKVLSAYNKHRDKPIREQAENIIHLFTLTNLGAPAAFKYFDTTIDRKRYTSTKEVLDATLIHQSITGLYETRIDLSQLGGDGGGGSGGGGGTVSLQDEHRLFDIPVTTSLPDVWLQDFPQAWAETGGLGRAKCQAPIIIDLKPTAVPVSIKQYPMSLEAHMGIRQHIIKFLELGVLRPCRSPWNTPLLPVKKPGTQDYRPVQDLREINKRTVDIHPTVPNPYNLLSTLKPDYSWYTVLDLKDAFFCLPLAPQSQELFAFEWKDPERGISGQLTWTRLPQGFKNSPTLFNEALHRDLTDFRTQHPEVTLLQYVDDLLLAAPTKKACTQGTRHLLQELGEKGYRASAKKAQICQTKVTYLGYILSEGKRWLTPGRIETVARIPPPRNPREVREFLGKAGFCRLFIPGFAELAAPLYALTKPSTPFTWQTEHQLAFEALKKALLSAPALGLPDTSKPFTLFLDERQGIAKGVLTQKLGPWKRPVAYLSKKLDPVAAGWPPCLRIMAATAMLVKDSAKLTLGQPLTVITPHTLEAIVRQPPDRWITNARLTHYQALLLDTDRVQFGPPVTLNPATLLPVPENQPSPHDCRQVLAETHGTREDLKDQELPDADHTWYTDGSSYLDSGTRRAGAAVVDGHNTIWAQSLPPGTSAQKAELIALTKALELSKGKKANIYTDSRYAFATAHTHGSIYERRGWLTSEGKEIKNKAEIIALLKALFLPQEVAIIHCPGHQKGQDPVAVGNRQADRVARQAAMAEVLTLATEPDNTSHITAGKRTADGSEFEKRTADGSEFESPKKKAKVE

SEQ ID NO: 1941 - protein, 2111 aa, synthetic construct
MPAAKRVKLDGGDKKYSIGLDIGTNSVGWAVITDEYKVPSKKFKVLGNTDRHSIKKNLIGALLFDSGETAEATRLKRTARRRYTRRKNRICYLQEIFSNEMAKVDDSFFHRLEESFLVEEDKKHERHPIFGNIVDEVAYHEKYPTIYHLRKKLVDSTDKADLRLIYLALAHMIKFRGHFLIEGDLNPDNSDVDKLFIQLVQTYNQLFEENPINASGVDAKAILSARLSKSRRLENLIAQLPGEKKNGLFGNLIALSLGLTPNFKSNFDLAEDAKLQLSKDTYDDDLDNLLAQIGDQYADLFLAAKNLSDAILLSDILRVNTEITKAPLSASMIKRYDEHHQDLTLLKALVRQQLPEKYKEIFFDQSKNGYAGYIDGGASQEEFYKFIKPILEKMDGTEELLVKLNREDLLRKQRTFDNGSIPHQIHLGELHAILRRQEDFYPFLKDNREKIEKILTFRIPYYVGPLARGNSRFAWMTRKSEETITPWNFEEVVDKGASAQSFIERMTNFDKNLPNEKVLPKHSLLYEYFTVYNELTKVKYVTEGMRKPAFLSGEQKKAIVDLLFKTNRKVTVKQLKEDYFKKIECFDSVEISGVEDRFNASLGTYHDLLKIIKDKDFLDNEENEDILEDIVLTLTLFEDREMIEERLKTYAHLFDDKVMKQLKRRRYTGWGRLSRKLINGIRDKQSGKTILDFLKSDGFANRNFMQLIHDDSLTFKEDIQKAQVSGQGDSLHEHIANLAGSPAIKKGILQTVKVVDELVKVMGRHKPENIVIEMARENQTTQKGQKNSRERMKRIEEGIKELGSQILKEHPVENTQLQNEKLYLYYLQNGRDMYVDQELDINRLSDYDVDHIVPQSFLKDDSIDNKVLTRSDKARGKSDNVPSEEVVKKMKNYWRQLLNAKLITQRKFDNLTKAERGGLSELDKAGFIKRQLVETRQITKHVAQILDSRMNTKYDENDKLIREVKVITLKSKLVSDFRKDFQFYKVREINNYHHAHDAYLNAVVGTALIKKYPKLESEFVYGDYKVYDVRKMIAKSEQEIGKATAKYFFYSNIMNFFKTEITLANGEIRKRPLIETNGETGEIVWDKGRDFATVRKVLSMPQVNIVKKTEVQTGGFSKESILPKRNSDKLIARKKDWDPKKYGGFDSPTVAYSVLVVAKVEKGKSKKLKSVKELLGITIMERSSFEKNPIDFLEAKGYKEVKKDLIIKLPKYSLFELENGRKRMLASAGELQKGNELALPSKYVNFLYLASHYEKLKGSPEDNEQKQLFVEQHKHYLDEIIEQISEFSKRVILADANLDKVLSAYNKHRDKPIREQAENIIHLFTLTNLGAPAAFKYFDTTIDRKRYTSTKEVLDATLIHQSITGLYETRIDLSQLGGDGGEAAAKEAAAKEAAAKEAAAKGGTVSLQDEHRLFDIPVTTSLPDVWLQDFPQAWAETGGLGRAKCQAPIIIDLKPTAVPVSIKQYPMSLEAHMGIRQHIIKFLELGVLRPCRSPWNTPLLPVKKPGTQDYRPVQDLREINKRTVDIHPTVPNPYNLLSTLKPDYSWYTVLDLKDAFFCLPLAPQSQELFAFEWKDPERGISGQLTWTRLPQGFKNSPTLFNEALHRDLTDFRTQHPEVTLLQYVDDLLLAAPTKKACTQGTRHLLQELGEKGYRASAKKAQICQTKVTYLGYILSEGKRWLTPGRIETVARIPPPRNPREVREFLGKAGFCRLFIPGFAELAAPLYALTKPSTPFTWQTEHQLAFEALKKALLSAPALGLPDTSKPFTLFLDERQGIAKGVLTQKLGPWKRPVAYLSKKLDPVAAGWPPCLRIMAATAMLVKDSAKLTLGQPLTVITPHTLEAIVRQPPDRWITNARLTHYQALLLDTDRVQFGPPVTLNPATLLPVPENQPSPHDCRQVLAETHGTREDLKDQELPDADHTWYTDGSSYLDSGTRRAGAAVVDGHNTIWAQSLPPGTSAQKAELIALTKALELSKGKKANIYTDSRYAFATAHTHGSIYERRGWLTSEGKEIKNKAEIIALLKALFLPQEVAIIHCPGHQKGQDPVAVGNRQADRVARQAAMAEVLTLATEPDNTSHITAGKRTADGSEFEKRTADGSEFESPKKKAKVE

SEQ ID NO: 1942 - protein, 2100 aa, synthetic construct
MPAAKRVKLDGGDKKYSIGLDIGTNSVGWAVITDEYKVPSKKFKVLGNTDRHSIKKNLIGALLFDSGETAEATRLKRTARRRYTRRKNRICYLQEIFSNEMAKVDDSFFHRLEESFLVEEDKKHERHPIFGNIVDEVAYHEKYPTIYHLRKKLVDSTDKADLRLIYLALAHMIKFRGHFLIEGDLNPDNSDVDKLFIQLVQTYNQLFEENPINASGVDAKAILSARLSKSRRLENLIAQLPGEKKNGLFGNLIALSLGLTPNFKSNFDLAEDAKLQLSKDTYDDDLDNLLAQIGDQYADLFLAAKNLSDAILLSDILRVNTEITKAPLSASMIKRYDEHHQDLTLLKALVRQQLPEKYKEIFFDQSKNGYAGYIDGGASQEEFYKFIKPILEKMDGTEELLVKLNREDLLRKQRTFDNGSIPHQIHLGELHAILRRQEDFYPFLKDNREKIEKILTFRIPYYVGPLARGNSRFAWMTRKSEETITPWNFEEVVDKGASAQSFIERMTNFDKNLPNEKVLPKHSLLYEYFTVYNELTKVKYVTEGMRKPAFLSGEQKKAIVDLLFKTNRKVTVKQLKEDYFKKIECFDSVEISGVEDRFNASLGTYHDLLKIIKDKDFLDNEENEDILEDIVLTLTLFEDREMIEERLKTYAHLFDDKVMKQLKRRRYTGWGRLSRKLINGIRDKQSGKTILDFLKSDGFANRNFMQLIHDDSLTFKEDIQKAQVSGQGDSLHEHIANLAGSPAIKKGILQTVKVVDELVKVMGRHKPENIVIEMARENQTTQKGQKNSRERMKRIEEGIKELGSQILKEHPVENTQLQNEKLYLYYLQNGRDMYVDQELDINRLSDYDVDHIVPQSFLKDDSIDNKVLTRSDKARGKSDNVPSEEVVKKMKNYWRQLLNAKLITQRKFDNLTKAERGGLSELDKAGFIKRQLVETRQITKHVAQILDSRMNTKYDENDKLIREVKVITLKSKLVSDFRKDFQFYKVREINNYHHAHDAYLNAVVGTALIKKYPKLESEFVYGDYKVYDVRKMIAKSEQEIGKATAKYFFYSNIMNFFKTEITLANGEIRKRPLIETNGETGEIVWDKGRDFATVRKVLSMPQVNIVKKTEVQTGGFSKESILPKRNSDKLIARKKDWDPKKYGGFDSPTVAYSVLVVAKVEKGKSKKLKSVKELLGITIMERSSFEKNPIDFLEAKGYKEVKKDLIIKLPKYSLFELENGRKRMLASAGELQKGNELALPSKYVNFLYLASHYEKLKGSPEDNEQKQLFVEQHKHYLDEIIEQISEFSKRVILADANLDKVLSAYNKHRDKPIREQAENIIHLFTLTNLGAPAAFKYFDTTIDRKRYTSTKEVLDATLIHQSITGLYETRIDLSQLGGDGGGGSGGGPAPGGTVSLQDEHRLFDIPVTTSLPDVWLQDFPQAWAETGGLGRAKCQAPIIIDLKPTAVPVSIKQYPMSLEAHMGIRQHIIKFLELGVLRPCRSPWNTPLLPVKKPGTQDYRPVQDLREINKRTVDIHPTVPNPYNLLSTLKPDYSWYTVLDLKDAFFCLPLAPQSQELFAFEWKDPERGISGQLTWTRLPQGFKNSPTLFNEALHRDLTDFRTQHPEVTLLQYVDDLLLAAPTKKACTQGTRHLLQELGEKGYRASAKKAQICQTKVTYLGYILSEGKRWLTPGRIETVARIPPPRNPREVREFLGKAGFCRLFIPGFAELAAPLYALTKPSTPFTWQTEHQLAFEALKKALLSAPALGLPDTSKPFTLFLDERQGIAKGVLTQKLGPWKRPVAYLSKKLDPVAAGWPPCLRIMAATAMLVKDSAKLTLGQPLTVITPHTLEAIVRQPPDRWITNARLTHYQALLLDTDRVQFGPPVTLNPATLLPVPENQPSPHDCRQVLAETHGTREDLKDQELPDADHTWYTDGSSYLDSGTRRAGAAVVDGHNTIWAQSLPPGTSAQKAELIALTKALELSKGKKANIYTDSRYAFATAHTHGSIYERRGWLTSEGKEIKNKAEIIALLKALFLPQEVAIIHCPGHQKGQDPVAVGNRQADRVARQAAMAEVLTLATEPDNTSHITAGKRTADGSEFEKRTADGSEFESPKKKAKVE

SEQ ID NO: 1943 - protein, 2102 aa, synthetic construct
MPAAKRVKLDGGDKKYSIGLDIGTNSVGWAVITDEYKVPSKKFKVLGNTDRHSIKKNLIGALLFDSGETAEATRLKRTARRRYTRRKNRICYLQEIFSNEMAKVDDSFFHRLEESFLVEEDKKHERHPIFGNIVDEVAYHEKYPTIYHLRKKLVDSTDKADLRLIYLALAHMIKFRGHFLIEGDLNPDNSDVDKLFIQLVQTYNQLFEENPINASGVDAKAILSARLSKSRRLENLIAQLPGEKKNGLFGNLIALSLGLTPNFKSNFDLAEDAKLQLSKDTYDDDLDNLLAQIGDQYADLFLAAKNLSDAILLSDILRVNTEITKAPLSASMIKRYDEHHQDLTLLKALVRQQLPEKYKEIFFDQSKNGYAGYIDGGASQEEFYKFIKPILEKMDGTEELLVKLNREDLLRKQRTFDNGSIPHQIHLGELHAILRRQEDFYPFLKDNREKIEKILTFRIPYYVGPLARGNSRFAWMTRKSEETITPWNFEEVVDKGASAQSFIERMTNFDKNLPNEKVLPKHSLLYEYFTVYNELTKVKYVTEGMRKPAFLSGEQKKAIVDLLFKTNRKVTVKQLKEDYFKKIECFDSVEISGVEDRFNASLGTYHDLLKIIKDKDFLDNEENEDILEDIVLTLTLFEDREMIEERLKTYAHLFDDKVMKQLKRRRYTGWGRLSRKLINGIRDKQSGKTILDFLKSDGFANRNFMQLIHDDSLTFKEDIQKAQVSGQGDSLHEHIANLAGSPAIKKGILQTVKVVDELVKVMGRHKPENIVIEMARENQTTQKGQKNSRERMKRIEEGIKELGSQILKEHPVENTQLQNEKLYLYYLQNGRDMYVDQELDINRLSDYDVDHIVPQSFLKDDSIDNKVLTRSDKARGKSDNVPSEEVVKKMKNYWRQLLNAKLITQRKFDNLTKAERGGLSELDKAGFIKRQLVETRQITKHVAQILDSRMNTKYDENDKLIREVKVITLKSKLVSDFRKDFQFYKVREINNYHHAHDAYLNAVVGTALIKKYPKLESEFVYGDYKVYDVRKMIAKSEQEIGKATAKYFFYSNIMNFFKTEITLANGEIRKRPLIETNGETGEIVWDKGRDFATVRKVLSMPQVNIVKKTEVQTGGFSKESILPKRNSDKLIARKKDWDPKKYGGFDSPTVAYSVLVVAKVEKGKSKKLKSVKELLGITIMERSSFEKNPIDFLEAKGYKEVKKDLIIKLPKYSLFELENGRKRMLASAGELQKGNELALPSKYVNFLYLASHYEKLKGSPEDNEQKQLFVEQHKHYLDEIIEQISEFSKRVILADANLDKVLSAYNKHRDKPIREQAENIIHLFTLTNLGAPAAFKYFDTTIDRKRYTSTKEVLDATLIHQSITGLYETRIDLSQLGGDGGGGGEAAAKGGSGGTVSLQDEHRLFDIPVTTSLPDVWLQDFPQAWAETGGLGRAKCQAPIIIDLKPTAVPVSIKQYPMSLEAHMGIRQHIIKFLELGVLRPCRSPWNTPLLPVKKPGTQDYRPVQDLREINKRTVDIHPTVPNPYNLLSTLKPDYSWYTVLDLKDAFFCLPLAPQSQELFAFEWKDPERGISGQLTWTRLPQGFKNSPTLFNEALHRDLTDFRTQHPEVTLLQYVDDLLLAAPTKKACTQGTRHLLQELGEKGYRASAKKAQICQTKVTYLGYILSEGKRWLTPGRIETVARIPPPRNPREVREFLGKAGFCRLFIPGFAELAAPLYALTKPSTPFTWQTEHQLAFEALKKALLSAPALGLPDTSKPFTLFLDERQGIAKGVLTQKLGPWKRPVAYLSKKLDPVAAGWPPCLRIMAATAMLVKDSAKLTLGQPLTVITPHTLEAIVRQPPDRWITNARLTHYQALLLDTDRVQFGPPVTLNPATLLPVPENQPSPHDCRQVLAETHGTREDLKDQELPDADHTWYTDGSSYLDSGTRRAGAAVVDGHNTIWAQSLPPGTSAQKAELIALTKALELSKGKKANIYTDSRYAFATAHTHGSIYERRGWLTSEGKEIKNKAEIIALLKALFLPQEVAIIHCPGHQKGQDPVAVGNRQADRVARQAAMAEVLTLATEPDNTSHITAGKRTADGSEFEKRTADGSEFESPKKKAKVE

SEQ ID NO: 1944 - protein, 2116 aa, synthetic construct
MPAAKRVKLDGGDKKYSIGLDIGTNSVGWAVITDEYKVPSKKFKVLGNTDRHSIKKNLIGALLFDSGETAEATRLKRTARRRYTRRKNRICYLQEIFSNEMAKVDDSFFHRLEESFLVEEDKKHERHPIFGNIVDEVAYHEKYPTIYHLRKKLVDSTDKADLRLIYLALAHMIKFRGHFLIEGDLNPDNSDVDKLFIQLVQTYNQLFEENPINASGVDAKAILSARLSKSRRLENLIAQLPGEKKNGLFGNLIALSLGLTPNFKSNFDLAEDAKLQLSKDTYDDDLDNLLAQIGDQYADLFLAAKNLSDAILLSDILRVNTEITKAPLSASMIKRYDEHHQDLTLLKALVRQQLPEKYKEIFFDQSKNGYAGYIDGGASQEEFYKFIKPILEKMDGTEELLVKLNREDLLRKQRTFDNGSIPHQIHLGELHAILRRQEDFYPFLKDNREKIEKILTFRIPYYVGPLARGNSRFAWMTRKSEETITPWNFEEVVDKGASAQSFIERMTNFDKNLPNEKVLPKHSLLYEYFTVYNELTKVKYVTEGMRKPAFLSGEQKKAIVDLLFKTNRKVTVKQLKEDYFKKIECFDSVEISGVEDRFNASLGTYHDLLKIIKDKDFLDNEENEDILEDIVLTLTLFEDREMIEERLKTYAHLFDDKVMKQLKRRRYTGWGRLSRKLINGIRDKQSGKTILDFLKSDGFANRNFMQLIHDDSLTFKEDIQKAQVSGQGDSLHEHIANLAGSPAIKKGILQTVKVVDELVKVMGRHKPENIVIEMARENQTTQKGQKNSRERMKRIEEGIKELGSQILKEHPVENTQLQNEKLYLYYLQNGRDMYVDQELDINRLSDYDVDHIVPQSFLKDDSIDNKVLTRSDKARGKSDNVPSEEVVKKMKNYWRQLLNAKLITQRKFDNLTKAERGGLSELDKAGFIKRQLVETRQITKHVAQILDSRMNTKYDENDKLIREVKVITLKSKLVSDFRKDFQFYKVREINNYHHAHDAYLNAVVGTALIKKYPKLESEFVYGDYKVYDVRKMIAKSEQEIGKATAKYFFYSNIMNFFKTEITLANGEIRKRPLIETNGETGEIVWDKGRDFATVRKVLSMPQVNIVKKTEVQTGGFSKESILPKRNSDKLIARKKDWDPKKYGGFDSPTVAYSVLVVAKVEKGKSKKLKSVKELLGITIMERSSFEKNPIDFLEAKGYKEVKKDLIIKLPKYSLFELENGRKRMLASAGELQKGNELALPSKYVNFLYLASHYEKLKGSPEDNEQKQLFVEQHKHYLDEIIEQISEFSKRVILADANLDKVLSAYNKHRDKPIREQAENIIHLFTLTNLGAPAAFKYFDTTIDRKRYTSTKEVLDATLIHQSITGLYETRIDLSQLGGDGGGGGGSGGGGSGGGGSGGGGSGGGGSGGTVSLQDEHRLFDIPVTTSLPDVWLQDFPQAWAETGGLGRAKCQAPIIIDLKPTAVPVSIKQYPMSLEAHMGIRQHIIKFLELGVLRPCRSPWNTPLLPVKKPGTQDYRPVQDLREINKRTVDIHPTVPNPYNLLSTLKPDYSWYTVLDLKDAFFCLPLAPQSQELFAFEWKDPERGISGQLTWTRLPQGFKNSPTLFNEALHRDLTDFRTQHPEVTLLQYVDDLLLAAPTKKACTQGTRHLLQELGEKGYRASAKKAQICQTKVTYLGYILSEGKRWLTPGRIETVARIPPPRNPREVREFLGKAGFCRLFIPGFAELAAPLYALTKPSTPFTWQTEHQLAFEALKKALLSAPALGLPDTSKPFTLFLDERQGIAKGVLTQKLGPWKRPVAYLSKKLDPVAAGWPPCLRIMAATAMLVKDSAKLTLGQPLTVITPHTLEAIVRQPPDRWITNARLTHYQALLLDTDRVQFGPPVTLNPATLLPVPENQPSPHDCRQVLAETHGTREDLKDQELPDADHTWYTDGSSYLDSGTRRAGAAVVDGHNTIWAQSLPPGTSAQKAELIALTKALELSKGKKANIYTDSRYAFATAHTHGSIYERRGWLTSEGKEIKNKAEIIALLKALFLPQEVAIIHCPGHQKGQDPVAVGNRQADRVARQAAMAEVLTLATEPDNTSHITAGKRTADGSEFEKRTADGSEFESPKKKAKVE

SEQ ID NO: 1945 - protein, 2096 aa, synthetic construct
MPAAKRVKLDGGDKKYSIGLDIGTNSVGWAVITDEYKVPSKKFKVLGNTDRHSIKKNLIGALLFDSGETAEATRLKRTARRRYTRRKNRICYLQEIFSNEMAKVDDSFFHRLEESFLVEEDKKHERHPIFGNIVDEVAYHEKYPTIYHLRKKLVDSTDKADLRLIYLALAHMIKFRGHFLIEGDLNPDNSDVDKLFIQLVQTYNQLFEENPINASGVDAKAILSARLSKSRRLENLIAQLPGEKKNGLFGNLIALSLGLTPNFKSNFDLAEDAKLQLSKDTYDDDLDNLLAQIGDQYADLFLAAKNLSDAILLSDILRVNTEITKAPLSASMIKRYDEHHQDLTLLKALVRQQLPEKYKEIFFDQSKNGYAGYIDGGASQEEFYKFIKPILEKMDGTEELLVKLNREDLLRKQRTFDNGSIPHQIHLGELHAILRRQEDFYPFLKDNREKIEKILTFRIPYYVGPLARGNSRFAWMTRKSEETITPWNFEEVVDKGASAQSFIERMTNFDKNLPNEKVLPKHSLLYEYFTVYNELTKVKYVTEGMRKPAFLSGEQKKAIVDLLFKTNRKVTVKQLKEDYFKKIECFDSVEISGVEDRFNASLGTYHDLLKIIKDKDFLDNEENEDILEDIVLTLTLFEDREMIEERLKTYAHLFDDKVMKQLKRRRYTGWGRLSRKLINGIRDKQSGKTILDFLKSDGFANRNFMQLIHDDSLTFKEDIQKAQVSGQGDSLHEHIANLAGSPAIKKGILQTVKVVDELVKVMGRHKPENIVIEMARENQTTQKGQKNSRERMKRIEEGIKELGSQILKEHPVENTQLQNEKLYLYYLQNGRDMYVDQELDINRLSDYDVDHIVPQSFLKDDSIDNKVLTRSDKARGKSDNVPSEEVVKKMKNYWRQLLNAKLITQRKFDNLTKAERGGLSELDKAGFIKRQLVETRQITKHVAQILDSRMNTKYDENDKLIREVKVITLKSKLVSDFRKDFQFYKVREINNYHHAHDAYLNAVVGTALIKKYPKLESEFVYGDYKVYDVRKMIAKSEQEIGKATAKYFFYSNIMNFFKTEITLANGEIRKRPLIETNGETGEIVWDKGRDFATVRKVLSMPQVNIVKKTEVQTGGFSKESILPKRNSDKLIARKKDWDPKKYGGFDSPTVAYSVLVVAKVEKGKSKKLKSVKELLGITIMERSSFEKNPIDFLEAKGYKEVKKDLIIKLPKYSLFELENGRKRMLASAGELQKGNELALPSKYVNFLYLASHYEKLKGSPEDNEQKQLFVEQHKHYLDEIIEQISEFSKRVILADANLDKVLSAYNKHRDKPIREQAENIIHLFTLTNLGAPAAFKYFDTTIDRKRYTSTKEVLDATLIHQSITGLYETRIDLSQLGGDGGPAPAPGGTVSLQDEHRLFDIPVTTSLPDVWLQDFPQAWAETGGLGRAKCQAPIIIDLKPTAVPVSIKQYPMSLEAHMGIRQHIIKFLELGVLRPCRSPWNTPLLPVKKPGTQDYRPVQDLREINKRTVDIHPTVPNPYNLLSTLKPDYSWYTVLDLKDAFFCLPLAPQSQELFAFEWKDPERGISGQLTWTRLPQGFKNSPTLFNEALHRDLTDFRTQHPEVTLLQYVDDLLLAAPTKKACTQGTRHLLQELGEKGYRASAKKAQICQTKVTYLGYILSEGKRWLTPGRIETVARIPPPRNPREVREFLGKAGFCRLFIPGFAELAAPLYALTKPSTPFTWQTEHQLAFEALKKALLSAPALGLPDTSKPFTLFLDERQGIAKGVLTQKLGPWKRPVAYLSKKLDPVAAGWPPCLRIMAATAMLVKDSAKLTLGQPLTVITPHTLEAIVRQPPDRWITNARLTHYQALLLDTDRVQFGPPVTLNPATLLPVPENQPSPHDCRQVLAETHGTREDLKDQELPDADHTWYTDGSSYLDSGTRRAGAAVVDGHNTIWAQSLPPGTSAQKAELIALTKALELSKGKKANIYTDSRYAFATAHTHGSIYERRGWLTSEGKEIKNKAEIIALLKALFLPQEVAIIHCPGHQKGQDPVAVGNRQADRVARQAAMAEVLTLATEPDNTSHITAGKRTADGSEFEKRTADGSEFESPKKKAKVE

SEQ ID NO: 1946 - protein, 2116 aa, synthetic construct
MPAAKRVKLDGGDKKYSIGLDIGTNSVGWAVITDEYKVPSKKFKVLGNTDRHSIKKNLIGALLFDSGETAEATRLKRTARRRYTRRKNRICYLQEIFSNEMAKVDDSFFHRLEESFLVEEDKKHERHPIFGNIVDEVAYHEKYPTIYHLRKKLVDSTDKADLRLIYLALAHMIKFRGHFLIEGDLNPDNSDVDKLFIQLVQTYNQLFEENPINASGVDAKAILSARLSKSRRLENLIAQLPGEKKNGLFGNLIALSLGLTPNFKSNFDLAEDAKLQLSKDTYDDDLDNLLAQIGDQYADLFLAAKNLSDAILLSDILRVNTEITKAPLSASMIKRYDEHHQDLTLLKALVRQQLPEKYKEIFFDQSKNGYAGYIDGGASQEEFYKFIKPILEKMDGTEELLVKLNREDLLRKQRTFDNGSIPHQIHLGELHAILRRQEDFYPFLKDNREKIEKILTFRIPYYVGPLARGNSRFAWMTRKSEETITPWNFEEVVDKGASAQSFIERMTNFDKNLPNEKVLPKHSLLYEYFTVYNELTKVKYVTEGMRKPAFLSGEQKKAIVDLLFKTNRKVTVKQLKEDYFKKIECFDSVEISGVEDRFNASLGTYHDLLKIIKDKDFLDNEENEDILEDIVLTLTLFEDREMIEERLKTYAHLFDDKVMKQLKRRRYTGWGRLSRKLINGIRDKQSGKTILDFLKSDGFANRNFMQLIHDDSLTFKEDIQKAQVSGQGDSLHEHIANLAGSPAIKKGILQTVKVVDELVKVMGRHKPENIVIEMARENQTTQKGQKNSRERMKRIEEGIKELGSQILKEHPVENTQLQNEKLYLYYLQNGRDMYVDQELDINRLSDYDVDHIVPQSFLKDDSIDNKVLTRSDKARGKSDNVPSEEVVKKMKNYWRQLLNAKLITQRKFDNLTKAERGGLSELDKAGFIKRQLVETRQITKHVAQILDSRMNTKYDENDKLIREVKVITLKSKLVSDFRKDFQFYKVREINNYHHAHDAYLNAVVGTALIKKYPKLESEFVYGDYKVYDVRKMIAKSEQEIGKATAKYFFYSNIMNFFKTEITLANGEIRKRPLIETNGETGEIVWDKGRDFATVRKVLSMPQVNIVKKTEVQTGGFSKESILPKRNSDKLIARKKDWDPKKYGGFDSPTVAYSVLVVAKVEKGKSKKLKSVKELLGITIMERSSFEKNPIDFLEAKGYKEVKKDLIIKLPKYSLFELENGRKRMLASAGELQKGNELALPSKYVNFLYLASHYEKLKGSPEDNEQKQLFVEQHKHYLDEIIEQISEFSKRVILADANLDKVLSAYNKHRDKPIREQAENIIHLFTLTNLGAPAAFKYFDTTIDRKRYTSTKEVLDATLIHQSITGLYETRIDLSQLGGDGGEAAAKEAAAKEAAAKEAAAKEAAAKGGTVSLQDEHRLFDIPVTTSLPDVWLQDFPQAWAETGGLGRAKCQAPIIIDLKPTAVPVSIKQYPMSLEAHMGIRQHIIKFLELGVLRPCRSPWNTPLLPVKKPGTQDYRPVQDLREINKRTVDIHPTVPNPYNLLSTLKPDYSWYTVLDLKDAFFCLPLAPQSQELFAFEWKDPERGISGQLTWTRLPQGFKNSPTLFNEALHRDLTDFRTQHPEVTLLQYVDDLLLAAPTKKACTQGTRHLLQELGEKGYRASAKKAQICQTKVTYLGYILSEGKRWLTPGRIETVARIPPPRNPREVREFLGKAGFCRLFIPGFAELAAPLYALTKPSTPFTWQTEHQLAFEALKKALLSAPALGLPDTSKPFTLFLDERQGIAKGVLTQKLGPWKRPVAYLSKKLDPVAAGWPPCLRIMAATAMLVKDSAKLTLGQPLTVITPHTLEAIVRQPPDRWITNARLTHYQALLLDTDRVQFGPPVTLNPATLLPVPENQPSPHDCRQVLAETHGTREDLKDQELPDADHTWYTDGSSYLDSGTRRAGAAVVDGHNTIWAQSLPPGTSAQKAELIALTKALELSKGKKANIYTDSRYAFATAHTHGSIYERRGWLTSEGKEIKNKAEIIALLKALFLPQEVAIIHCPGHQKGQDPVAVGNRQADRVARQAAMAEVLTLATEPDNTSHITAGKRTADGSEFEKRTADGSEFESPKKKAKVE

SEQ ID NO: 1947 - protein, 2106 aa, synthetic construct
MPAAKRVKLDGGDKKYSIGLDIGTNSVGWAVITDEYKVPSKKFKVLGNTDRHSIKKNLIGALLFDSGETAEATRLKRTARRRYTRRKNRICYLQEIFSNEMAKVDDSFFHRLEESFLVEEDKKHERHPIFGNIVDEVAYHEKYPTIYHLRKKLVDSTDKADLRLIYLALAHMIKFRGHFLIEGDLNPDNSDVDKLFIQLVQTYNQLFEENPINASGVDAKAILSARLSKSRRLENLIAQLPGEKKNGLFGNLIALSLGLTPNFKSNFDLAEDAKLQLSKDTYDDDLDNLLAQIGDQYADLFLAAKNLSDAILLSDILRVNTEITKAPLSASMIKRYDEHHQDLTLLKALVRQQLPEKYKEIFFDQSKNGYAGYIDGGASQEEFYKFIKPILEKMDGTEELLVKLNREDLLRKQRTFDNGSIPHQIHLGELHAILRRQEDFYPFLKDNREKIEKILTFRIPYYVGPLARGNSRFAWMTRKSEETITPWNFEEVVDKGASAQSFIERMTNFDKNLPNEKVLPKHSLLYEYFTVYNELTKVKYVTEGMRKPAFLSGEQKKAIVDLLFKTNRKVTVKQLKEDYFKKIECFDSVEISGVEDRFNASLGTYHDLLKIIKDKDFLDNEENEDILEDIVLTLTLFEDREMIEERLKTYAHLFDDKVMKQLKRRRYTGWGRLSRKLINGIRDKQSGKTILDFLKSDGFANRNFMQLIHDDSLTFKEDIQKAQVSGQGDSLHEHIANLAGSPAIKKGILQTVKVVDELVKVMGRHKPENIVIEMARENQTTQKGQKNSRERMKRIEEGIKELGSQILKEHPVENTQLQNEKLYLYYLQNGRDMYVDQELDINRLSDYDVDHIVPQSFLKDDSIDNKVLTRSDKARGKSDNVPSEEVVKKMKNYWRQLLNAKLITQRKFDNLTKAERGGLSELDKAGFIKRQLVETRQITKHVAQILDSRMNTKYDENDKLIREVKVITLKSKLVSDFRKDFQFYKVREINNYHHAHDAYLNAVVGTALIKKYPKLESEFVYGDYKVYDVRKMIAKSEQEIGKATAKYFFYSNIMNFFKTEITLANGEIRKRPLIETNGETGEIVWDKGRDFATVRKVLSMPQVNIVKKTEVQTGGFSKESILPKRNSDKLIARKKDWDPKKYGGFDSPTVAYSVLVVAKVEKGKSKKLKSVKELLGITIMERSSFEKNPIDFLEAKGYKEVKKDLIIKLPKYSLFELENGRKRMLASAGELQKGNELALPSKYVNFLYLASHYEKLKGSPEDNEQKQLFVEQHKHYLDEIIEQISEFSKRVILADANLDKVLSAYNKHRDKPIREQAENIIHLFTLTNLGAPAAFKYFDTTIDRKRYTSTKEVLDATLIHQSITGLYETRIDLSQLGGDGGEAAAKGGGGSEAAAKGGTVSLQDEHRLFDIPVTTSLPDVWLQDFPQAWAETGGLGRAKCQAPIIIDLKPTAVPVSIKQYPMSLEAHMGIRQHIIKFLELGVLRPCRSPWNTPLLPVKKPGTQDYRPVQDLREINKRTVDIHPTVPNPYNLLSTLKPDYSWYTVLDLKDAFFCLPLAPQSQELFAFEWKDPERGISGQLTWTRLPQGFKNSPTLFNEALHRDLTDFRTQHPEVTLLQYVDDLLLAAPTKKACTQGTRHLLQELGEKGYRASAKKAQICQTKVTYLGYILSEGKRWLTPGRIETVARIPPPRNPREVREFLGKAGFCRLFIPGFAELAAPLYALTKPSTPFTWQTEHQLAFEALKKALLSAPALGLPDTSKPFTLFLDERQGIAKGVLTQKLGPWKRPVAYLSKKLDPVAAGWPPCLRIMAATAMLVKDSAKLTLGQPLTVITPHTLEAIVRQPPDRWITNARLTHYQALLLDTDRVQFGPPVTLNPATLLPVPENQPSPHDCRQVLAETHGTREDLKDQELPDADHTWYTDGSSYLDSGTRRAGAAVVDGHNTIWAQSLPPGTSAQKAELIALTKALELSKGKKANIYTDSRYAFATAHTHGSIYERRGWLTSEGKEIKNKAEIIALLKALFLPQEVAIIHCPGHQKGQDPVAVGNRQADRVARQAAMAEVLTLATEPDNTSHITAGKRTADGSEFEKRTADGSEFESPKKKAKVE

SEQ ID NO: 1948 - protein, 2106 aa, synthetic construct
MPAAKRVKLDGGDKKYSIGLDIGTNSVGWAVITDEYKVPSKKFKVLGNTDRHSIKKNLIGALLFDSGETAEATRLKRTARRRYTRRKNRICYLQEIFSNEMAKVDDSFFHRLEESFLVEEDKKHERHPIFGNIVDEVAYHEKYPTIYHLRKKLVDSTDKADLRLIYLALAHMIKFRGHFLIEGDLNPDNSDVDKLFIQLVQTYNQLFEENPINASGVDAKAILSARLSKSRRLENLIAQLPGEKKNGLFGNLIALSLGLTPNFKSNFDLAEDAKLQLSKDTYDDDLDNLLAQIGDQYADLFLAAKNLSDAILLSDILRVNTEITKAPLSASMIKRYDEHHQDLTLLKALVRQQLPEKYKEIFFDQSKNGYAGYIDGGASQEEFYKFIKPILEKMDGTEELLVKLNREDLLRKQRTFDNGSIPHQIHLGELHAILRRQEDFYPFLKDNREKIEKILTFRIPYYVGPLARGNSRFAWMTRKSEETITPWNFEEVVDKGASAQSFIERMTNFDKNLPNEKVLPKHSLLYEYFTVYNELTKVKYVTEGMRKPAFLSGEQKKAIVDLLFKTNRKVTVKQLKEDYFKKIECFDSVEISGVEDRFNASLGTYHDLLKIIKDKDFLDNEENEDILEDIVLTLTLFEDREMIEERLKTYAHLFDDKVMKQLKRRRYTGWGRLSRKLINGIRDKQSGKTILDFLKSDGFANRNFMQLIHDDSLTFKEDIQKAQVSGQGDSLHEHIANLAGSPAIKKGILQTVKVVDELVKVMGRHKPENIVIEMARENQTTQKGQKNSRERMKRIEEGIKELGSQILKEHPVENTQLQNEKLYLYYLQNGRDMYVDQELDINRLSDYDVDHIVPQSFLKDDSIDNKVLTRSDKARGKSDNVPSEEVVKKMKNYWRQLLNAKLITQRKFDNLTKAERGGLSELDKAGFIKRQLVETRQITKHVAQILDSRMNTKYDENDKLIREVKVITLKSKLVSDFRKDFQFYKVREINNYHHAHDAYLNAVVGTALIKKYPKLESEFVYGDYKVYDVRKMIAKSEQEIGKATAKYFFYSNIMNFFKTEITLANGEIRKRPLIETNGETGEIVWDKGRDFATVRKVLSMPQVNIVKKTEVQTGGFSKESILPKRNSDKLIARKKDWDPKKYGGFDSPTVAYSVLVVAKVEKGKSKKLKSVKELLGITIMERSSFEKNPIDFLEAKGYKEVKKDLIIKLPKYSLFELENGRKRMLASAGELQKGNELALPSKYVNFLYLASHYEKLKGSPEDNEQKQLFVEQHKHYLDEIIEQISEFSKRVILADANLDKVLSAYNKHRDKPIREQAENIIHLFTLTNLGAPAAFKYFDTTIDRKRYTSTKEVLDATLIHQSITGLYETRIDLSQLGGDGGGSSGSSGSSGSSGSSGGTVSLQDEHRLFDIPVTTSLPDVWLQDFPQAWAETGGLGRAKCQAPIIIDLKPTAVPVSIKQYPMSLEAHMGIRQHIIKFLELGVLRPCRSPWNTPLLPVKKPGTQDYRPVQDLREINKRTVDIHPTVPNPYNLLSTLKPDYSWYTVLDLKDAFFCLPLAPQSQELFAFEWKDPERGISGQLTWTRLPQGFKNSPTLFNEALHRDLTDFRTQHPEVTLLQYVDDLLLAAPTKKACTQGTRHLLQELGEKGYRASAKKAQICQTKVTYLGYILSEGKRWLTPGRIETVARIPPPRNPREVREFLGKAGFCRLFIPGFAELAAPLYALTKPSTPFTWQTEHQLAFEALKKALLSAPALGLPDTSKPFTLFLDERQGIAKGVLTQKLGPWKRPVAYLSKKLDPVAAGWPPCLRIMAATAMLVKDSAKLTLGQPLTVITPHTLEAIVRQPPDRWITNARLTHYQALLLDTDRVQFGPPVTLNPATLLPVPENQPSPHDCRQVLAETHGTREDLKDQELPDADHTWYTDGSSYLDSGTRRAGAAVVDGHNTIWAQSLPPGTSAQKAELIALTKALELSKGKKANIYTDSRYAFATAHTHGSIYERRGWLTSEGKEIKNKAEIIALLKALFLPQEVAIIHCPGHQKGQDPVAVGNRQADRVARQAAMAEVLTLATEPDNTSHITAGKRTADGSEFEKRTADGSEFESPKKKAKVE

SEQ ID NO: 1949 - protein, 2106 aa, synthetic construct
MPAAKRVKLDGGDKKYSIGLDIGTNSVGWAVITDEYKVPSKKFKVLGNTDRHSIKKNLIGALLFDSGETAEATRLKRTARRRYTRRKNRICYLQEIFSNEMAKVDDSFFHRLEESFLVEEDKKHERHPIFGNIVDEVAYHEKYPTIYHLRKKLVDSTDKADLRLIYLALAHMIKFRGHFLIEGDLNPDNSDVDKLFIQLVQTYNQLFEENPINASGVDAKAILSARLSKSRRLENLIAQLPGEKKNGLFGNLIALSLGLTPNFKSNFDLAEDAKLQLSKDTYDDDLDNLLAQIGDQYADLFLAAKNLSDAILLSDILRVNTEITKAPLSASMIKRYDEHHQDLTLLKALVRQQLPEKYKEIFFDQSKNGYAGYIDGGASQEEFYKFIKPILEKMDGTEELLVKLNREDLLRKQRTFDNGSIPHQIHLGELHAILRRQEDFYPFLKDNREKIEKILTFRIPYYVGPLARGNSRFAWMTRKSEETITPWNFEEVVDKGASAQSFIERMTNFDKNLPNEKVLPKHSLLYEYFTVYNELTKVKYVTEGMRKPAFLSGEQKKAIVDLLFKTNRKVTVKQLKEDYFKKIECFDSVEISGVEDRFNASLGTYHDLLKIIKDKDFLDNEENEDILEDIVLTLTLFEDREMIEERLKTYAHLFDDKVMKQLKRRRYTGWGRLSRKLINGIRDKQSGKTILDFLKSDGFANRNFMQLIHDDSLTFKEDIQKAQVSGQGDSLHEHIANLAGSPAIKKGILQTVKVVDELVKVMGRHKPENIVIEMARENQTTQKGQKNSRERMKRIEEGIKELGSQILKEHPVENTQLQNEKLYLYYLQNGRDMYVDQELDINRLSDYDVDHIVPQSFLKDDSIDNKVLTRSDKARGKSDNVPSEEVVKKMKNYWRQLLNAKLITQRKFDNLTKAERGGLSELDKAGFIKRQLVETRQITKHVAQILDSRMNTKYDENDKLIREVKVITLKSKLVSDFRKDFQFYKVREINNYHHAHDAYLNAVVGTALIKKYPKLESEFVYGDYKVYDVRKMIAKSEQEIGKATAKYFFYSNIMNFFKTEITLANGEIRKRPLIETNGETGEIVWDKGRDFATVRKVLSMPQVNIVKKTEVQTGGFSKESILPKRNSDKLIARKKDWDPKKYGGFDSPTVAYSVLVVAKVEKGKSKKLKSVKELLGITIMERSSFEKNPIDFLEAKGYKEVKKDLIIKLPKYSLFELENGRKRMLASAGELQKGNELALPSKYVNFLYLASHYEKLKGSPEDNEQKQLFVEQHKHYLDEIIEQISEFSKRVILADANLDKVLSAYNKHRDKPIREQAENIIHLFTLTNLGAPAAFKYFDTTIDRKRYTSTKEVLDATLIHQSITGLYETRIDLSQLGGDGGGGGGSEAAAKGGGGSGGTVSLQDEHRLFDIPVTTSLPDVWLQDFPQAWAETGGLGRAKCQAPIIIDLKPTAVPVSIKQYPMSLEAHMGIRQHIIKFLELGVLRPCRSPWNTPLLPVKKPGTQDYRPVQDLREINKRTVDIHPTVPNPYNLLSTLKPDYSWYTVLDLKDAFFCLPLAPQSQELFAFEWKDPERGISGQLTWTRLPQGFKNSPTLFNEALHRDLTDFRTQHPEVTLLQYVDDLLLAAPTKKACTQGTRHLLQELGEKGYRASAKKAQICQTKVTYLGYILSEGKRWLTPGRIETVARIPPPRNPREVREFLGKAGFCRLFIPGFAELAAPLYALTKPSTPFTWQTEHQLAFEALKKALLSAPALGLPDTSKPFTLFLDERQGIAKGVLTQKLGPWKRPVAYLSKKLDPVAAGWPPCLRIMAATAMLVKDSAKLTLGQPLTVITPHTLEAIVRQPPDRWITNARLTHYQALLLDTDRVQFGPPVTLNPATLLPVPENQPSPHDCRQVLAETHGTREDLKDQELPDADHTWYTDGSSYLDSGTRRAGAAVVDGHNTIWAQSLPPGTSAQKAELIALTKALELSKGKKANIYTDSRYAFATAHTHGSIYERRGWLTSEGKEIKNKAEIIALLKALFLPQEVAIIHCPGHQKGQDPVAVGNRQADRVARQAAMAEVLTLATEPDNTSHITAGKRTADGSEFEKRTADGSEFESPKKKAKVE

SEQ ID NO: 1950 - protein, 2097 aa, synthetic construct
MPAAKRVKLDGGDKKYSIGLDIGTNSVGWAVITDEYKVPSKKFKVLGNTDRHSIKKNLIGALLFDSGETAEATRLKRTARRRYTRRKNRICYLQEIFSNEMAKVDDSFFHRLEESFLVEEDKKHERHPIFGNIVDEVAYHEKYPTIYHLRKKLVDSTDKADLRLIYLALAHMIKFRGHFLIEGDLNPDNSDVDKLFIQLVQTYNQLFEENPINASGVDAKAILSARLSKSRRLENLIAQLPGEKKNGLFGNLIALSLGLTPNFKSNFDLAEDAKLQLSKDTYDDDLDNLLAQIGDQYADLFLAAKNLSDAILLSDILRVNTEITKAPLSASMIKRYDEHHQDLTLLKALVRQQLPEKYKEIFFDQSKNGYAGYIDGGASQEEFYKFIKPILEKMDGTEELLVKLNREDLLRKQRTFDNGSIPHQIHLGELHAILRRQEDFYPFLKDNREKIEKILTFRIPYYVGPLARGNSRFAWMTRKSEETITPWNFEEVVDKGASAQSFIERMTNFDKNLPNEKVLPKHSLLYEYFTVYNELTKVKYVTEGMRKPAFLSGEQKKAIVDLLFKTNRKVTVKQLKEDYFKKIECFDSVEISGVEDRFNASLGTYHDLLKIIKDKDFLDNEENEDILEDIVLTLTLFEDREMIEERLKTYAHLFDDKVMKQLKRRRYTGWGRLSRKLINGIRDKQSGKTILDFLKSDGFANRNFMQLIHDDSLTFKEDIQKAQVSGQGDSLHEHIANLAGSPAIKKGILQTVKVVDELVKVMGRHKPENIVIEMARENQTTQKGQKNSRERMKRIEEGIKELGSQILKEHPVENTQLQNEKLYLYYLQNGRDMYVDQELDINRLSDYDVDHIVPQSFLKDDSIDNKVLTRSDKARGKSDNVPSEEVVKKMKNYWRQLLNAKLITQRKFDNLTKAERGGLSELDKAGFIKRQLVETRQITKHVAQILDSRMNTKYDENDKLIREVKVITLKSKLVSDFRKDFQFYKVREINNYHHAHDAYLNAVVGTALIKKYPKLESEFVYGDYKVYDVRKMIAKSEQEIGKATAKYFFYSNIMNFFKTEITLANGEIRKRPLIETNGETGEIVWDKGRDFATVRKVLSMPQVNIVKKTEVQTGGFSKESILPKRNSDKLIARKKDWDPKKYGGFDSPTVAYSVLVVAKVEKGKSKKLKSVKELLGITIMERSSFEKNPIDFLEAKGYKEVKKDLIIKLPKYSLFELENGRKRMLASAGELQKGNELALPSKYVNFLYLASHYEKLKGSPEDNEQKQLFVEQHKHYLDEIIEQISEFSKRVILADANLDKVLSAYNKHRDKPIREQAENIIHLFTLTNLGAPAAFKYFDTTIDRKRYTSTKEVLDATLIHQSITGLYETRIDLSQLGGDGGGGGGSSGGTVSLQDEHRLFDIPVTTSLPDVWLQDFPQAWAETGGLGRAKCQAPIIIDLKPTAVPVSIKQYPMSLEAHMGIRQHIIKFLELGVLRPCRSPWNTPLLPVKKPGTQDYRPVQDLREINKRTVDIHPTVPNPYNLLSTLKPDYSWYTVLDLKDAFFCLPLAPQSQELFAFEWKDPERGISGQLTWTRLPQGFKNSPTLFNEALHRDLTDFRTQHPEVTLLQYVDDLLLAAPTKKACTQGTRHLLQELGEKGYRASAKKAQICQTKVTYLGYILSEGKRWLTPGRIETVARIPPPRNPREVREFLGKAGFCRLFIPGFAELAAPLYALTKPSTPFTWQTEHQLAFEALKKALLSAPALGLPDTSKPFTLFLDERQGIAKGVLTQKLGPWKRPVAYLSKKLDPVAAGWPPCLRIMAATAMLVKDSAKLTLGQPLTVITPHTLEAIVRQPPDRWITNARLTHYQALLLDTDRVQFGPPVTLNPATLLPVPENQPSPHDCRQVLAETHGTREDLKDQELPDADHTWYTDGSSYLDSGTRRAGAAVVDGHNTIWAQSLPPGTSAQKAELIALTKALELSKGKKANIYTDSRYAFATAHTHGSIYERRGWLTSEGKEIKNKAEIIALLKALFLPQEVAIIHCPGHQKGQDPVAVGNRQADRVARQAAMAEVLTLATEPDNTSHITAGKRTADGSEFEKRTADGSEFESPKKKAKVE

SEQ ID NO: 1951 - protein, 2102 aa, synthetic construct
MPAAKRVKLDGGDKKYSIGLDIGTNSVGWAVITDEYKVPSKKFKVLGNTDRHSIKKNLIGALLFDSGETAEATRLKRTARRRYTRRKNRICYLQEIFSNEMAKVDDSFFHRLEESFLVEEDKKHERHPIFGNIVDEVAYHEKYPTIYHLRKKLVDSTDKADLRLIYLALAHMIKFRGHFLIEGDLNPDNSDVDKLFIQLVQTYNQLFEENPINASGVDAKAILSARLSKSRRLENLIAQLPGEKKNGLFGNLIALSLGLTPNFKSNFDLAEDAKLQLSKDTYDDDLDNLLAQIGDQYADLFLAAKNLSDAILLSDILRVNTEITKAPLSASMIKRYDEHHQDLTLLKALVRQQLPEKYKEIFFDQSKNGYAGYIDGGASQEEFYKFIKPILEKMDGTEELLVKLNREDLLRKQRTFDNGSIPHQIHLGELHAILRRQEDFYPFLKDNREKIEKILTFRIPYYVGPLARGNSRFAWMTRKSEETITPWNFEEVVDKGASAQSFIERMTNFDKNLPNEKVLPKHSLLYEYFTVYNELTKVKYVTEGMRKPAFLSGEQKKAIVDLLFKTNRKVTVKQLKEDYFKKIECFDSVEISGVEDRFNASLGTYHDLLKIIKDKDFLDNEENEDILEDIVLTLTLFEDREMIEERLKTYAHLFDDKVMKQLKRRRYTGWGRLSRKLINGIRDKQSGKTILDFLKSDGFANRNFMQLIHDDSLTFKEDIQKAQVSGQGDSLHEHIANLAGSPAIKKGILQTVKVVDELVKVMGRHKPENIVIEMARENQTTQKGQKNSRERMKRIEEGIKELGSQILKEHPVENTQLQNEKLYLYYLQNGRDMYVDQELDINRLSDYDVDHIVPQSFLKDDSIDNKVLTRSDKARGKSDNVPSEEVVKKMKNYWRQLLNAKLITQRKFDNLTKAERGGLSELDKAGFIKRQLVETRQITKHVAQILDSRMNTKYDENDKLIREVKVITLKSKLVSDFRKDFQFYKVREINNYHHAHDAYLNAVVGTALIKKYPKLESEFVYGDYKVYDVRKMIAKSEQEIGKATAKYFFYSNIMNFFKTEITLANGEIRKRPLIETNGETGEIVWDKGRDFATVRKVLSMPQVNIVKKTEVQTGGFSKESILPKRNSDKLIARKKDWDPKKYGGFDSPTVAYSVLVVAKVEKGKSKKLKSVKELLGITIMERSSFEKNPIDFLEAKGYKEVKKDLIIKLPKYSLFELENGRKRMLASAGELQKGNELALPSKYVNFLYLASHYEKLKGSPEDNEQKQLFVEQHKHYLDEIIEQISEFSKRVILADANLDKVLSAYNKHRDKPIREQAENIIHLFTLTNLGAPAAFKYFDTTIDRKRYTSTKEVLDATLIHQSITGLYETRIDLSQLGGDGGGGSGSSEAAAKGGTVSLQDEHRLFDIPVTTSLPDVWLQDFPQAWAETGGLGRAKCQAPIIIDLKPTAVPVSIKQYPMSLEAHMGIRQHIIKFLELGVLRPCRSPWNTPLLPVKKPGTQDYRPVQDLREINKRTVDIHPTVPNPYNLLSTLKPDYSWYTVLDLKDAFFCLPLAPQSQELFAFEWKDPERGISGQLTWTRLPQGFKNSPTLFNEALHRDLTDFRTQHPEVTLLQYVDDLLLAAPTKKACTQGTRHLLQELGEKGYRASAKKAQICQTKVTYLGYILSEGKRWLTPGRIETVARIPPPRNPREVREFLGKAGFCRLFIPGFAELAAPLYALTKPSTPFTWQTEHQLAFEALKKALLSAPALGLPDTSKPFTLFLDERQGIAKGVLTQKLGPWKRPVAYLSKKLDPVAAGWPPCLRIMAATAMLVKDSAKLTLGQPLTVITPHTLEAIVRQPPDRWITNARLTHYQALLLDTDRVQFGPPVTLNPATLLPVPENQPSPHDCRQVLAETHGTREDLKDQELPDADHTWYTDGSSYLDSGTRRAGAAVVDGHNTIWAQSLPPGTSAQKAELIALTKALELSKGKKANIYTDSRYAFATAHTHGSIYERRGWLTSEGKEIKNKAEIIALLKALFLPQEVAIIHCPGHQKGQDPVAVGNRQADRVARQAAMAEVLTLATEPDNTSHITAGKRTADGSEFEKRTADGSEFESPKKKAKVE

SEQ ID NO: 1952 - protein, 2102 aa, synthetic construct
MPAAKRVKLDGGDKKYSIGLDIGTNSVGWAVITDEYKVPSKKFKVLGNTDRHSIKKNLIGALLFDSGETAEATRLKRTARRRYTRRKNRICYLQEIFSNEMAKVDDSFFHRLEESFLVEEDKKHERHPIFGNIVDEVAYHEKYPTIYHLRKKLVDSTDKADLRLIYLALAHMIKFRGHFLIEGDLNPDNSDVDKLFIQLVQTYNQLFEENPINASGVDAKAILSARLSKSRRLENLIAQLPGEKKNGLFGNLIALSLGLTPNFKSNFDLAEDAKLQLSKDTYDDDLDNLLAQIGDQYADLFLAAKNLSDAILLSDILRVNTEITKAPLSASMIKRYDEHHQDLTLLKALVRQQLPEKYKEIFFDQSKNGYAGYIDGGASQEEFYKFIKPILEKMDGTEELLVKLNREDLLRKQRTFDNGSIPHQIHLGELHAILRRQEDFYPFLKDNREKIEKILTFRIPYYVGPLARGNSRFAWMTRKSEETITPWNFEEVVDKGASAQSFIERMTNFDKNLPNEKVLPKHSLLYEYFTVYNELTKVKYVTEGMRKPAFLSGEQKKAIVDLLFKTNRKVTVKQLKEDYFKKIECFDSVEISGVEDRFNASLGTYHDLLKIIKDKDFLDNEENEDILEDIVLTLTLFEDREMIEERLKTYAHLFDDKVMKQLKRRRYTGWGRLSRKLINGIRDKQSGKTILDFLKSDGFANRNFMQLIHDDSLTFKEDIQKAQVSGQGDSLHEHIANLAGSPAIKKGILQTVKVVDELVKVMGRHKPENIVIEMARENQTTQKGQKNSRERMKRIEEGIKELGSQILKEHPVENTQLQNEKLYLYYLQNGRDMYVDQELDINRLSDYDVDHIVPQSFLKDDSIDNKVLTRSDKARGKSDNVPSEEVVKKMKNYWRQLLNAKLITQRKFDNLTKAERGGLSELDKAGFIKRQLVETRQITKHVAQILDSRMNTKYDENDKLIREVKVITLKSKLVSDFRKDFQFYKVREINNYHHAHDAYLNAVVGTALIKKYPKLESEFVYGDYKVYDVRKMIAKSEQEIGKATAKYFFYSNIMNFFKTEITLANGEIRKRPLIETNGETGEIVWDKGRDFATVRKVLSMPQVNIVKKTEVQTGGFSKESILPKRNSDKLIARKKDWDPKKYGGFDSPTVAYSVLVVAKVEKGKSKKLKSVKELLGITIMERSSFEKNPIDFLEAKGYKEVKKDLIIKLPKYSLFELENGRKRMLASAGELQKGNELALPSKYVNFLYLASHYEKLKGSPEDNEQKQLFVEQHKHYLDEIIEQISEFSKRVILADANLDKVLSAYNKHRDKPIREQAENIIHLFTLTNLGAPAAFKYFDTTIDRKRYTSTKEVLDATLIHQSITGLYETRIDLSQLGGDGGGSSGGGEAAAKGGTVSLQDEHRLFDIPVTTSLPDVWLQDFPQAWAETGGLGRAKCQAPIIIDLKPTAVPVSIKQYPMSLEAHMGIRQHIIKFLELGVLRPCRSPWNTPLLPVKKPGTQDYRPVQDLREINKRTVDIHPTVPNPYNLLSTLKPDYSWYTVLDLKDAFFCLPLAPQSQELFAFEWKDPERGISGQLTWTRLPQGFKNSPTLFNEALHRDLTDFRTQHPEVTLLQYVDDLLLAAPTKKACTQGTRHLLQELGEKGYRASAKKAQICQTKVTYLGYILSEGKRWLTPGRIETVARIPPPRNPREVREFLGKAGFCRLFIPGFAELAAPLYALTKPSTPFTWQTEHQLAFEALKKALLSAPALGLPDTSKPFTLFLDERQGIAKGVLTQKLGPWKRPVAYLSKKLDPVAAGWPPCLRIMAATAMLVKDSAKLTLGQPLTVITPHTLEAIVRQPPDRWITNARLTHYQALLLDTDRVQFGPPVTLNPATLLPVPENQPSPHDCRQVLAETHGTREDLKDQELPDADHTWYTDGSSYLDSGTRRAGAAVVDGHNTIWAQSLPPGTSAQKAELIALTKALELSKGKKANIYTDSRYAFATAHTHGSIYERRGWLTSEGKEIKNKAEIIALLKALFLPQEVAIIHCPGHQKGQDPVAVGNRQADRVARQAAMAEVLTLATEPDNTSHITAGKRTADGSEFEKRTADGSEFESPKKKAKVE

SEQ ID NO: 1953 - protein, 2098 aa, synthetic construct
MPAAKRVKLDGGDKKYSIGLDIGTNSVGWAVITDEYKVPSKKFKVLGNTDRHSIKKNLIGALLFDSGETAEATRLKRTARRRYTRRKNRICYLQEIFSNEMAKVDDSFFHRLEESFLVEEDKKHERHPIFGNIVDEVAYHEKYPTIYHLRKKLVDSTDKADLRLIYLALAHMIKFRGHFLIEGDLNPDNSDVDKLFIQLVQTYNQLFEENPINASGVDAKAILSARLSKSRRLENLIAQLPGEKKNGLFGNLIALSLGLTPNFKSNFDLAEDAKLQLSKDTYDDDLDNLLAQIGDQYADLFLAAKNLSDAILLSDILRVNTEITKAPLSASMIKRYDEHHQDLTLLKALVRQQLPEKYKEIFFDQSKNGYAGYIDGGASQEEFYKFIKPILEKMDGTEELLVKLNREDLLRKQRTFDNGSIPHQIHLGELHAILRRQEDFYPFLKDNREKIEKILTFRIPYYVGPLARGNSRFAWMTRKSEETITPWNFEEVVDKGASAQSFIERMTNFDKNLPNEKVLPKHSLLYEYFTVYNELTKVKYVTEGMRKPAFLSGEQKKAIVDLLFKTNRKVTVKQLKEDYFKKIECFDSVEISGVEDRFNASLGTYHDLLKIIKDKDFLDNEENEDILEDIVLTLTLFEDREMIEERLKTYAHLFDDKVMKQLKRRRYTGWGRLSRKLINGIRDKQSGKTILDFLKSDGFANRNFMQLIHDDSLTFKEDIQKAQVSGQGDSLHEHIANLAGSPAIKKGILQTVKVVDELVKVMGRHKPENIVIEMARENQTTQKGQKNSRERMKRIEEGIKELGSQILKEHPVENTQLQNEKLYLYYLQNGRDMYVDQELDINRLSDYDVDHIVPQSFLKDDSIDNKVLTRSDKARGKSDNVPSEEVVKKMKNYWRQLLNAKLITQRKFDNLTKAERGGLSELDKAGFIKRQLVETRQITKHVAQILDSRMNTKYDENDKLIREVKVITLKSKLVSDFRKDFQFYKVREINNYHHAHDAYLNAVVGTALIKKYPKLESEFVYGDYKVYDVRKMIAKSEQEIGKATAKYFFYSNIMNFFKTEITLANGEIRKRPLIETNGETGEIVWDKGRDFATVRKVLSMPQVNIVKKTEVQTGGFSKESILPKRNSDKLIARKKDWDPKKYGGFDSPTVAYSVLVVAKVEKGKSKKLKSVKELLGITIMERSSFEKNPIDFLEAKGYKEVKKDLIIKLPKYSLFELENGRKRMLASAGELQKGNELALPSKYVNFLYLASHYEKLKGSPEDNEQKQLFVEQHKHYLDEIIEQISEFSKRVILADANLDKVLSAYNKHRDKPIREQAENIIHLFTLTNLGAPAAFKYFDTTIDRKRYTSTKEVLDATLIHQSITGLYETRIDLSQLGGDGGPAPAPAPGGTVSLQDEHRLFDIPVTTSLPDVWLQDFPQAWAETGGLGRAKCQAPIIIDLKPTAVPVSIKQYPMSLEAHMGIRQHIIKFLELGVLRPCRSPWNTPLLPVKKPGTQDYRPVQDLREINKRTVDIHPTVPNPYNLLSTLKPDYSWYTVLDLKDAFFCLPLAPQSQELFAFEWKDPERGISGQLTWTRLPQGFKNSPTLFNEALHRDLTDFRTQHPEVTLLQYVDDLLLAAPTKKACTQGTRHLLQELGEKGYRASAKKAQICQTKVTYLGYILSEGKRWLTPGRIETVARIPPPRNPREVREFLGKAGFCRLFIPGFAELAAPLYALTKPSTPFTWQTEHQLAFEALKKALLSAPALGLPDTSKPFTLFLDERQGIAKGVLTQKLGPWKRPVAYLSKKLDPVAAGWPPCLRIMAATAMLVKDSAKLTLGQPLTVITPHTLEAIVRQPPDRWITNARLTHYQALLLDTDRVQFGPPVTLNPATLLPVPENQPSPHDCRQVLAETHGTREDLKDQELPDADHTWYTDGSSYLDSGTRRAGAAVVDGHNTIWAQSLPPGTSAQKAELIALTKALELSKGKKANIYTDSRYAFATAHTHGSIYERRGWLTSEGKEIKNKAEIIALLKALFLPQEVAIIHCPGHQKGQDPVAVGNRQADRVARQAAMAEVLTLATEPDNTSHITAGKRTADGSEFEKRTADGSEFESPKKKAKVE

SEQ ID NO: 1954 - protein, 2102 aa, synthetic construct
MPAAKRVKLDGGDKKYSIGLDIGTNSVGWAVITDEYKVPSKKFKVLGNTDRHSIKKNLIGALLFDSGETAEATRLKRTARRRYTRRKNRICYLQEIFSNEMAKVDDSFFHRLEESFLVEEDKKHERHPIFGNIVDEVAYHEKYPTIYHLRKKLVDSTDKADLRLIYLALAHMIKFRGHFLIEGDLNPDNSDVDKLFIQLVQTYNQLFEENPINASGVDAKAILSARLSKSRRLENLIAQLPGEKKNGLFGNLIALSLGLTPNFKSNFDLAEDAKLQLSKDTYDDDLDNLLAQIGDQYADLFLAAKNLSDAILLSDILRVNTEITKAPLSASMIKRYDEHHQDLTLLKALVRQQLPEKYKEIFFDQSKNGYAGYIDGGASQEEFYKFIKPILEKMDGTEELLVKLNREDLLRKQRTFDNGSIPHQIHLGELHAILRRQEDFYPFLKDNREKIEKILTFRIPYYVGPLARGNSRFAWMTRKSEETITPWNFEEVVDKGASAQSFIERMTNFDKNLPNEKVLPKHSLLYEYFTVYNELTKVKYVTEGMRKPAFLSGEQKKAIVDLLFKTNRKVTVKQLKEDYFKKIECFDSVEISGVEDRFNASLGTYHDLLKIIKDKDFLDNEENEDILEDIVLTLTLFEDREMIEERLKTYAHLFDDKVMKQLKRRRYTGWGRLSRKLINGIRDKQSGKTILDFLKSDGFANRNFMQLIHDDSLTFKEDIQKAQVSGQGDSLHEHIANLAGSPAIKKGILQTVKVVDELVKVMGRHKPENIVIEMARENQTTQKGQKNSRERMKRIEEGIKELGSQILKEHPVENTQLQNEKLYLYYLQNGRDMYVDQELDINRLSDYDVDHIVPQSFLKDDSIDNKVLTRSDKARGKSDNVPSEEVVKKMKNYWRQLLNAKLITQRKFDNLTKAERGGLSELDKAGFIKRQLVETRQITKHVAQILDSRMNTKYDENDKLIREVKVITLKSKLVSDFRKDFQFYKVREINNYHHAHDAYLNAVVGTALIKKYPKLESEFVYGDYKVYDVRKMIAKSEQEIGKATAKYFFYSNIMNFFKTEITLANGEIRKRPLIETNGETGEIVWDKGRDFATVRKVLSMPQVNIVKKTEVQTGGFSKESILPKRNSDKLIARKKDWDPKKYGGFDSPTVAYSVLVVAKVEKGKSKKLKSVKELLGITIMERSSFEKNPIDFLEAKGYKEVKKDLIIKLPKYSLFELENGRKRMLASAGELQKGNELALPSKYVNFLYLASHYEKLKGSPEDNEQKQLFVEQHKHYLDEIIEQISEFSKRVILADANLDKVLSAYNKHRDKPIREQAENIIHLFTLTNLGAPAAFKYFDTTIDRKRYTSTKEVLDATLIHQSITGLYETRIDLSQLGGDGGGGSPAPEAAAKGGTVSLQDEHRLFDIPVTTSLPDVWLQDFPQAWAETGGLGRAKCQAPIIIDLKPTAVPVSIKQYPMSLEAHMGIRQHIIKFLELGVLRPCRSPWNTPLLPVKKPGTQDYRPVQDLREINKRTVDIHPTVPNPYNLLSTLKPDYSWYTVLDLKDAFFCLPLAPQSQELFAFEWKDPERGISGQLTWTRLPQGFKNSPTLFNEALHRDLTDFRTQHPEVTLLQYVDDLLLAAPTKKACTQGTRHLLQELGEKGYRASAKKAQICQTKVTYLGYILSEGKRWLTPGRIETVARIPPPRNPREVREFLGKAGFCRLFIPGFAELAAPLYALTKPSTPFTWQTEHQLAFEALKKALLSAPALGLPDTSKPFTLFLDERQGIAKGVLTQKLGPWKRPVAYLSKKLDPVAAGWPPCLRIMAATAMLVKDSAKLTLGQPLTVITPHTLEAIVRQPPDRWITNARLTHYQALLLDTDRVQFGPPVTLNPATLLPVPENQPSPHDCRQVLAETHGTREDLKDQELPDADHTWYTDGSSYLDSGTRRAGAAVVDGHNTIWAQSLPPGTSAQKAELIALTKALELSKGKKANIYTDSRYAFATAHTHGSIYERRGWLTSEGKEIKNKAEIIALLKALFLPQEVAIIHCPGHQKGQDPVAVGNRQADRVARQAAMAEVLTLATEPDNTSHITAGKRTADGSEFEKRTADGSEFESPKKKAKVE

SEQ ID NO: 1955 - protein, 2103 aa, synthetic construct
MPAAKRVKLDGGDKKYSIGLDIGTNSVGWAVITDEYKVPSKKFKVLGNTDRHSIKKNLIGALLFDSGETAEATRLKRTARRRYTRRKNRICYLQEIFSNEMAKVDDSFFHRLEESFLVEEDKKHERHPIFGNIVDEVAYHEKYPTIYHLRKKLVDSTDKADLRLIYLALAHMIKFRGHFLIEGDLNPDNSDVDKLFIQLVQTYNQLFEENPINASGVDAKAILSARLSKSRRLENLIAQLPGEKKNGLFGNLIALSLGLTPNFKSNFDLAEDAKLQLSKDTYDDDLDNLLAQIGDQYADLFLAAKNLSDAILLSDILRVNTEITKAPLSASMIKRYDEHHQDLTLLKALVRQQLPEKYKEIFFDQSKNGYAGYIDGGASQEEFYKFIKPILEKMDGTEELLVKLNREDLLRKQRTFDNGSIPHQIHLGELHAILRRQEDFYPFLKDNREKIEKILTFRIPYYVGPLARGNSRFAWMTRKSEETITPWNFEEVVDKGASAQSFIERMTNFDKNLPNEKVLPKHSLLYEYFTVYNELTKVKYVTEGMRKPAFLSGEQKKAIVDLLFKTNRKVTVKQLKEDYFKKIECFDSVEISGVEDRFNASLGTYHDLLKIIKDKDFLDNEENEDILEDIVLTLTLFEDREMIEERLKTYAHLFDDKVMKQLKRRRYTGWGRLSRKLINGIRDKQSGKTILDFLKSDGFANRNFMQLIHDDSLTFKEDIQKAQVSGQGDSLHEHIANLAGSPAIKKGILQTVKVVDELVKVMGRHKPENIVIEMARENQTTQKGQKNSRERMKRIEEGIKELGSQILKEHPVENTQLQNEKLYLYYLQNGRDMYVDQELDINRLSDYDVDHIVPQSFLKDDSIDNKVLTRSDKARGKSDNVPSEEVVKKMKNYWRQLLNAKLITQRKFDNLTKAERGGLSELDKAGFIKRQLVETRQITKHVAQILDSRMNTKYDENDKLIREVKVITLKSKLVSDFRKDFQFYKVREINNYHHAHDAYLNAVVGTALIKKYPKLESEFVYGDYKVYDVRKMIAKSEQEIGKATAKYFFYSNIMNFFKTEITLANGEIRKRPLIETNGETGEIVWDKGRDFATVRKVLSMPQVNIVKKTEVQTGGFSKESILPKRNSDKLIARKKDWDPKKYGGFDSPTVAYSVLVVAKVEKGKSKKLKSVKELLGITIMERSSFEKNPIDFLEAKGYKEVKKDLIIKLPKYSLFELENGRKRMLASAGELQKGNELALPSKYVNFLYLASHYEKLKGSPEDNEQKQLFVEQHKHYLDEIIEQISEFSKRVILADANLDKVLSAYNKHRDKPIREQAENIIHLFTLTNLGAPAAFKYFDTTIDRKRYTSTKEVLDATLIHQSITGLYETRIDLSQLGGDGGGGSGGSGGSGGSGGTVSLQDEHRLFDIPVTTSLPDVWLQDFPQAWAETGGLGRAKCQAPIIIDLKPTAVPVSIKQYPMSLEAHMGIRQHIIKFLELGVLRPCRSPWNTPLLPVKKPGTQDYRPVQDLREINKRTVDIHPTVPNPYNLLSTLKPDYSWYTVLDLKDAFFCLPLAPQSQELFAFEWKDPERGISGQLTWTRLPQGFKNSPTLFNEALHRDLTDFRTQHPEVTLLQYVDDLLLAAPTKKACTQGTRHLLQELGEKGYRASAKKAQICQTKVTYLGYILSEGKRWLTPGRIETVARIPPPRNPREVREFLGKAGFCRLFIPGFAELAAPLYALTKPSTPFTWQTEHQLAFEALKKALLSAPALGLPDTSKPFTLFLDERQGIAKGVLTQKLGPWKRPVAYLSKKLDPVAAGWPPCLRIMAATAMLVKDSAKLTLGQPLTVITPHTLEAIVRQPPDRWITNARLTHYQALLLDTDRVQFGPPVTLNPATLLPVPENQPSPHDCRQVLAETHGTREDLKDQELPDADHTWYTDGSSYLDSGTRRAGAAVVDGHNTIWAQSLPPGTSAQKAELIALTKALELSKGKKANIYTDSRYAFATAHTHGSIYERRGWLTSEGKEIKNKAEIIALLKALFLPQEVAIIHCPGHQKGQDPVAVGNRQADRVARQAAMAEVLTLATEPDNTSHITAGKRTADGSEFEKRTADGSEFESPKKKAKVE

SEQ ID NO: 1956 - protein, 2097 aa, synthetic construct
MPAAKRVKLDGGDKKYSIGLDIGTNSVGWAVITDEYKVPSKKFKVLGNTDRHSIKKNLIGALLFDSGETAEATRLKRTARRRYTRRKNRICYLQEIFSNEMAKVDDSFFHRLEESFLVEEDKKHERHPIFGNIVDEVAYHEKYPTIYHLRKKLVDSTDKADLRLIYLALAHMIKFRGHFLIEGDLNPDNSDVDKLFIQLVQTYNQLFEENPINASGVDAKAILSARLSKSRRLENLIAQLPGEKKNGLFGNLIALSLGLTPNFKSNFDLAEDAKLQLSKDTYDDDLDNLLAQIGDQYADLFLAAKNLSDAILLSDILRVNTEITKAPLSASMIKRYDEHHQDLTLLKALVRQQLPEKYKEIFFDQSKNGYAGYIDGGASQEEFYKFIKPILEKMDGTEELLVKLNREDLLRKQRTFDNGSIPHQIHLGELHAILRRQEDFYPFLKDNREKIEKILTFRIPYYVGPLARGNSRFAWMTRKSEETITPWNFEEVVDKGASAQSFIERMTNFDKNLPNEKVLPKHSLLYEYFTVYNELTKVKYVTEGMRKPAFLSGEQKKAIVDLLFKTNRKVTVKQLKEDYFKKIECFDSVEISGVEDRFNASLGTYHDLLKIIKDKDFLDNEENEDILEDIVLTLTLFEDREMIEERLKTYAHLFDDKVMKQLKRRRYTGWGRLSRKLINGIRDKQSGKTILDFLKSDGFANRNFMQLIHDDSLTFKEDIQKAQVSGQGDSLHEHIANLAGSPAIKKGILQTVKVVDELVKVMGRHKPENIVIEMARENQTTQKGQKNSRERMKRIEEGIKELGSQILKEHPVENTQLQNEKLYLYYLQNGRDMYVDQELDINRLSDYDVDHIVPQSFLKDDSIDNKVLTRSDKARGKSDNVPSEEVVKKMKNYWRQLLNAKLITQRKFDNLTKAERGGLSELDKAGFIKRQLVETRQITKHVAQILDSRMNTKYDENDKLIREVKVITLKSKLVSDFRKDFQFYKVREINNYHHAHDAYLNAVVGTALIKKYPKLESEFVYGDYKVYDVRKMIAKSEQEIGKATAKYFFYSNIMNFFKTEITLANGEIRKRPLIETNGETGEIVWDKGRDFATVRKVLSMPQVNIVKKTEVQTGGFSKESILPKRNSDKLIARKKDWDPKKYGGFDSPTVAYSVLVVAKVEKGKSKKLKSVKELLGITIMERSSFEKNPIDFLEAKGYKEVKKDLIIKLPKYSLFELENGRKRMLASAGELQKGNELALPSKYVNFLYLASHYEKLKGSPEDNEQKQLFVEQHKHYLDEIIEQISEFSKRVILADANLDKVLSAYNKHRDKPIREQAENIIHLFTLTNLGAPAAFKYFDTTIDRKRYTSTKEVLDATLIHQSITGLYETRIDLSQLGGDGGGGGGGGGGTVSLQDEHRLFDIPVTTSLPDVWLQDFPQAWAETGGLGRAKCQAPIIIDLKPTAVPVSIKQYPMSLEAHMGIRQHIIKFLELGVLRPCRSPWNTPLLPVKKPGTQDYRPVQDLREINKRTVDIHPTVPNPYNLLSTLKPDYSWYTVLDLKDAFFCLPLAPQSQELFAFEWKDPERGISGQLTWTRLPQGFKNSPTLFNEALHRDLTDFRTQHPEVTLLQYVDDLLLAAPTKKACTQGTRHLLQELGEKGYRASAKKAQICQTKVTYLGYILSEGKRWLTPGRIETVARIPPPRNPREVREFLGKAGFCRLFIPGFAELAAPLYALTKPSTPFTWQTEHQLAFEALKKALLSAPALGLPDTSKPFTLFLDERQGIAKGVLTQKLGPWKRPVAYLSKKLDPVAAGWPPCLRIMAATAMLVKDSAKLTLGQPLTVITPHTLEAIVRQPPDRWITNARLTHYQALLLDTDRVQFGPPVTLNPATLLPVPENQPSPHDCRQVLAETHGTREDLKDQELPDADHTWYTDGSSYLDSGTRRAGAAVVDGHNTIWAQSLPPGTSAQKAELIALTKALELSKGKKANIYTDSRYAFATAHTHGSIYERRGWLTSEGKEIKNKAEIIALLKALFLPQEVAIIHCPGHQKGQDPVAVGNRQADRVARQAAMAEVLTLATEPDNTSHITAGKRTADGSEFEKRTADGSEFESPKKKAKVE

SEQ ID NO: 1957 - protein, 2109 aa, synthetic construct
MPAAKRVKLDGGDKKYSIGLDIGTNSVGWAVITDEYKVPSKKFKVLGNTDRHSIKKNLIGALLFDSGETAEATRLKRTARRRYTRRKNRICYLQEIFSNEMAKVDDSFFHRLEESFLVEEDKKHERHPIFGNIVDEVAYHEKYPTIYHLRKKLVDSTDKADLRLIYLALAHMIKFRGHFLIEGDLNPDNSDVDKLFIQLVQTYNQLFEENPINASGVDAKAILSARLSKSRRLENLIAQLPGEKKNGLFGNLIALSLGLTPNFKSNFDLAEDAKLQLSKDTYDDDLDNLLAQIGDQYADLFLAAKNLSDAILLSDILRVNTEITKAPLSASMIKRYDEHHQDLTLLKALVRQQLPEKYKEIFFDQSKNGYAGYIDGGASQEEFYKFIKPILEKMDGTEELLVKLNREDLLRKQRTFDNGSIPHQIHLGELHAILRRQEDFYPFLKDNREKIEKILTFRIPYYVGPLARGNSRFAWMTRKSEETITPWNFEEVVDKGASAQSFIERMTNFDKNLPNEKVLPKHSLLYEYFTVYNELTKVKYVTEGMRKPAFLSGEQKKAIVDLLFKTNRKVTVKQLKEDYFKKIECFDSVEISGVEDRFNASLGTYHDLLKIIKDKDFLDNEENEDILEDIVLTLTLFEDREMIEERLKTYAHLFDDKVMKQLKRRRYTGWGRLSRKLINGIRDKQSGKTILDFLKSDGFANRNFMQLIHDDSLTFKEDIQKAQVSGQGDSLHEHIANLAGSPAIKKGILQTVKVVDELVKVMGRHKPENIVIEMARENQTTQKGQKNSRERMKRIEEGIKELGSQILKEHPVENTQLQNEKLYLYYLQNGRDMYVDQELDINRLSDYDVDHIVPQSFLKDDSIDNKVLTRSDKARGKSDNVPSEEVVKKMKNYWRQLLNAKLITQRKFDNLTKAERGGLSELDKAGFIKRQLVETRQITKHVAQILDSRMNTKYDENDKLIREVKVITLKSKLVSDFRKDFQFYKVREINNYHHAHDAYLNAVVGTALIKKYPKLESEFVYGDYKVYDVRKMIAKSEQEIGKATAKYFFYSNIMNFFKTEITLANGEIRKRPLIETNGETGEIVWDKGRDFATVRKVLSMPQVNIVKKTEVQTGGFSKESILPKRNSDKLIARKKDWDPKKYGGFDSPTVAYSVLVVAKVEKGKSKKLKSVKELLGITIMERSSFEKNPIDFLEAKGYKEVKKDLIIKLPKYSLFELENGRKRMLASAGELQKGNELALPSKYVNFLYLASHYEKLKGSPEDNEQKQLFVEQHKHYLDEIIEQISEFSKRVILADANLDKVLSAYNKHRDKPIREQAENIIHLFTLTNLGAPAAFKYFDTTIDRKRYTSTKEVLDATLIHQSITGLYETRIDLSQLGGDGGGGSGGSGGSGGSGGSGGSGGTVSLQDEHRLFDIPVTTSLPDVWLQDFPQAWAETGGLGRAKCQAPIIIDLKPTAVPVSIKQYPMSLEAHMGIRQHIIKFLELGVLRPCRSPWNTPLLPVKKPGTQDYRPVQDLREINKRTVDIHPTVPNPYNLLSTLKPDYSWYTVLDLKDAFFCLPLAPQSQELFAFEWKDPERGISGQLTWTRLPQGFKNSPTLFNEALHRDLTDFRTQHPEVTLLQYVDDLLLAAPTKKACTQGTRHLLQELGEKGYRASAKKAQICQTKVTYLGYILSEGKRWLTPGRIETVARIPPPRNPREVREFLGKAGFCRLFIPGFAELAAPLYALTKPSTPFTWQTEHQLAFEALKKALLSAPALGLPDTSKPFTLFLDERQGIAKGVLTQKLGPWKRPVAYLSKKLDPVAAGWPPCLRIMAATAMLVKDSAKLTLGQPLTVITPHTLEAIVRQPPDRWITNARLTHYQALLLDTDRVQFGPPVTLNPATLLPVPENQPSPHDCRQVLAETHGTREDLKDQELPDADHTWYTDGSSYLDSGTRRAGAAVVDGHNTIWAQSLPPGTSAQKAELIALTKALELSKGKKANIYTDSRYAFATAHTHGSIYERRGWLTSEGKEIKNKAEIIALLKALFLPQEVAIIHCPGHQKGQDPVAVGNRQADRVARQAAMAEVLTLATEPDNTSHITAGKRTADGSEFEKRTADGSEFESPKKKAKVE

SEQ ID NO: 1958 - protein, 2100 aa, synthetic construct
MPAAKRVKLDGGDKKYSIGLDIGTNSVGWAVITDEYKVPSKKFKVLGNTDRHSIKKNLIGALLFDSGETAEATRLKRTARRRYTRRKNRICYLQEIFSNEMAKVDDSFFHRLEESFLVEEDKKHERHPIFGNIVDEVAYHEKYPTIYHLRKKLVDSTDKADLRLIYLALAHMIKFRGHFLIEGDLNPDNSDVDKLFIQLVQTYNQLFEENPINASGVDAKAILSARLSKSRRLENLIAQLPGEKKNGLFGNLIALSLGLTPNFKSNFDLAEDAKLQLSKDTYDDDLDNLLAQIGDQYADLFLAAKNLSDAILLSDILRVNTEITKAPLSASMIKRYDEHHQDLTLLKALVRQQLPEKYKEIFFDQSKNGYAGYIDGGASQEEFYKFIKPILEKMDGTEELLVKLNREDLLRKQRTFDNGSIPHQIHLGELHAILRRQEDFYPFLKDNREKIEKILTFRIPYYVGPLARGNSRFAWMTRKSEETITPWNFEEVVDKGASAQSFIERMTNFDKNLPNEKVLPKHSLLYEYFTVYNELTKVKYVTEGMRKPAFLSGEQKKAIVDLLFKTNRKVTVKQLKEDYFKKIECFDSVEISGVEDRFNASLGTYHDLLKIIKDKDFLDNEENEDILEDIVLTLTLFEDREMIEERLKTYAHLFDDKVMKQLKRRRYTGWGRLSRKLINGIRDKQSGKTILDFLKSDGFANRNFMQLIHDDSLTFKEDIQKAQVSGQGDSLHEHIANLAGSPAIKKGILQTVKVVDELVKVMGRHKPENIVIEMARENQTTQKGQKNSRERMKRIEEGIKELGSQILKEHPVENTQLQNEKLYLYYLQNGRDMYVDQELDINRLSDYDVDHIVPQSFLKDDSIDNKVLTRSDKARGKSDNVPSEEVVKKMKNYWRQLLNAKLITQRKFDNLTKAERGGLSELDKAGFIKRQLVETRQITKHVAQILDSRMNTKYDENDKLIREVKVITLKSKLVSDFRKDFQFYKVREINNYHHAHDAYLNAVVGTALIKKYPKLESEFVYGDYKVYDVRKMIAKSEQEIGKATAKYFFYSNIMNFFKTEITLANGEIRKRPLIETNGETGEIVWDKGRDFATVRKVLSMPQVNIVKKTEVQTGGFSKESILPKRNSDKLIARKKDWDPKKYGGFDSPTVAYSVLVVAKVEKGKSKKLKSVKELLGITIMERSSFEKNPIDFLEAKGYKEVKKDLIIKLPKYSLFELENGRKRMLASAGELQKGNELALPSKYVNFLYLASHYEKLKGSPEDNEQKQLFVEQHKHYLDEIIEQISEFSKRVILADANLDKVLSAYNKHRDKPIREQAENIIHLFTLTNLGAPAAFKYFDTTIDRKRYTSTKEVLDATLIHQSITGLYETRIDLSQLGGDGGGGSGSSPAPGGTVSLQDEHRLFDIPVTTSLPDVWLQDFPQAWAETGGLGRAKCQAPIIIDLKPTAVPVSIKQYPMSLEAHMGIRQHIIKFLELGVLRPCRSPWNTPLLPVKKPGTQDYRPVQDLREINKRTVDIHPTVPNPYNLLSTLKPDYSWYTVLDLKDAFFCLPLAPQSQELFAFEWKDPERGISGQLTWTRLPQGFKNSPTLFNEALHRDLTDFRTQHPEVTLLQYVDDLLLAAPTKKACTQGTRHLLQELGEKGYRASAKKAQICQTKVTYLGYILSEGKRWLTPGRIETVARIPPPRNPREVREFLGKAGFCRLFIPGFAELAAPLYALTKPSTPFTWQTEHQLAFEALKKALLSAPALGLPDTSKPFTLFLDERQGIAKGVLTQKLGPWKRPVAYLSKKLDPVAAGWPPCLRIMAATAMLVKDSAKLTLGQPLTVITPHTLEAIVRQPPDRWITNARLTHYQALLLDTDRVQFGPPVTLNPATLLPVPENQPSPHDCRQVLAETHGTREDLKDQELPDADHTWYTDGSSYLDSGTRRAGAAVVDGHNTIWAQSLPPGTSAQKAELIALTKALELSKGKKANIYTDSRYAFATAHTHGSIYERRGWLTSEGKEIKNKAEIIALLKALFLPQEVAIIHCPGHQKGQDPVAVGNRQADRVARQAAMAEVLTLATEPDNTSHITAGKRTADGSEFEKRTADGSEFESPKKKAKVE

SEQ ID NO: 1959 - protein, 2102 aa, synthetic construct
MPAAKRVKLDGGDKKYSIGLDIGTNSVGWAVITDEYKVPSKKFKVLGNTDRHSIKKNLIGALLFDSGETAEATRLKRTARRRYTRRKNRICYLQEIFSNEMAKVDDSFFHRLEESFLVEEDKKHERHPIFGNIVDEVAYHEKYPTIYHLRKKLVDSTDKADLRLIYLALAHMIKFRGHFLIEGDLNPDNSDVDKLFIQLVQTYNQLFEENPINASGVDAKAILSARLSKSRRLENLIAQLPGEKKNGLFGNLIALSLGLTPNFKSNFDLAEDAKLQLSKDTYDDDLDNLLAQIGDQYADLFLAAKNLSDAILLSDILRVNTEITKAPLSASMIKRYDEHHQDLTLLKALVRQQLPEKYKEIFFDQSKNGYAGYIDGGASQEEFYKFIKPILEKMDGTEELLVKLNREDLLRKQRTFDNGSIPHQIHLGELHAILRRQEDFYPFLKDNREKIEKILTFRIPYYVGPLARGNSRFAWMTRKSEETITPWNFEEVVDKGASAQSFIERMTNFDKNLPNEKVLPKHSLLYEYFTVYNELTKVKYVTEGMRKPAFLSGEQKKAIVDLLFKTNRKVTVKQLKEDYFKKIECFDSVEISGVEDRFNASLGTYHDLLKIIKDKDFLDNEENEDILEDIVLTLTLFEDREMIEERLKTYAHLFDDKVMKQLKRRRYTGWGRLSRKLINGIRDKQSGKTILDFLKSDGFANRNFMQLIHDDSLTFKEDIQKAQVSGQGDSLHEHIANLAGSPAIKKGILQTVKVVDELVKVMGRHKPENIVIEMARENQTTQKGQKNSRERMKRIEEGIKELGSQILKEHPVENTQLQNEKLYLYYLQNGRDMYVDQELDINRLSDYDVDHIVPQSFLKDDSIDNKVLTRSDKARGKSDNVPSEEVVKKMKNYWRQLLNAKLITQRKFDNLTKAERGGLSELDKAGFIKRQLVETRQITKHVAQILDSRMNTKYDENDKLIREVKVITLKSKLVSDFRKDFQFYKVREINNYHHAHDAYLNAVVGTALIKKYPKLESEFVYGDYKVYDVRKMIAKSEQEIGKATAKYFFYSNIMNFFKTEITLANGEIRKRPLIETNGETGEIVWDKGRDFATVRKVLSMPQVNIVKKTEVQTGGFSKESILPKRNSDKLIARKKDWDPKKYGGFDSPTVAYSVLVVAKVEKGKSKKLKSVKELLGITIMERSSFEKNPIDFLEAKGYKEVKKDLIIKLPKYSLFELENGRKRMLASAGELQKGNELALPSKYVNFLYLASHYEKLKGSPEDNEQKQLFVEQHKHYLDEIIEQISEFSKRVILADANLDKVLSAYNKHRDKPIREQAENIIHLFTLTNLGAPAAFKYFDTTIDRKRYTSTKEVLDATLIHQSITGLYETRIDLSQLGGDGGGSSEAAAKGGSGGTVSLQDEHRLFDIPVTTSLPDVWLQDFPQAWAETGGLGRAKCQAPIIIDLKPTAVPVSIKQYPMSLEAHMGIRQHIIKFLELGVLRPCRSPWNTPLLPVKKPGTQDYRPVQDLREINKRTVDIHPTVPNPYNLLSTLKPDYSWYTVLDLKDAFFCLPLAPQSQELFAFEWKDPERGISGQLTWTRLPQGFKNSPTLFNEALHRDLTDFRTQHPEVTLLQYVDDLLLAAPTKKACTQGTRHLLQELGEKGYRASAKKAQICQTKVTYLGYILSEGKRWLTPGRIETVARIPPPRNPREVREFLGKAGFCRLFIPGFAELAAPLYALTKPSTPFTWQTEHQLAFEALKKALLSAPALGLPDTSKPFTLFLDERQGIAKGVLTQKLGPWKRPVAYLSKKLDPVAAGWPPCLRIMAATAMLVKDSAKLTLGQPLTVITPHTLEAIVRQPPDRWITNARLTHYQALLLDTDRVQFGPPVTLNPATLLPVPENQPSPHDCRQVLAETHGTREDLKDQELPDADHTWYTDGSSYLDSGTRRAGAAVVDGHNTIWAQSLPPGTSAQKAELIALTKALELSKGKKANIYTDSRYAFATAHTHGSIYERRGWLTSEGKEIKNKAEIIALLKALFLPQEVAIIHCPGHQKGQDPVAVGNRQADRVARQAAMAEVLTLATEPDNTSHITAGKRTADGSEFEKRTADGSEFESPKKKAKVE

SEQ ID NO: 1960 - protein, 2099 aa, synthetic construct
MPAAKRVKLDGGDKKYSIGLDIGTNSVGWAVITDEYKVPSKKFKVLGNTDRHSIKKNLIGALLFDSGETAEATRLKRTARRRYTRRKNRICYLQEIFSNEMAKVDDSFFHRLEESFLVEEDKKHERHPIFGNIVDEVAYHEKYPTIYHLRKKLVDSTDKADLRLIYLALAHMIKFRGHFLIEGDLNPDNSDVDKLFIQLVQTYNQLFEENPINASGVDAKAILSARLSKSRRLENLIAQLPGEKKNGLFGNLIALSLGLTPNFKSNFDLAEDAKLQLSKDTYDDDLDNLLAQIGDQYADLFLAAKNLSDAILLSDILRVNTEITKAPLSASMIKRYDEHHQDLTLLKALVRQQLPEKYKEIFFDQSKNGYAGYIDGGASQEEFYKFIKPILEKMDGTEELLVKLNREDLLRKQRTFDNGSIPHQIHLGELHAILRRQEDFYPFLKDNREKIEKILTFRIPYYVGPLARGNSRFAWMTRKSEETITPWNFEEVVDKGASAQSFIERMTNFDKNLPNEKVLPKHSLLYEYFTVYNELTKVKYVTEGMRKPAFLSGEQKKAIVDLLFKTNRKVTVKQLKEDYFKKIECFDSVEISGVEDRFNASLGTYHDLLKIIKDKDFLDNEENEDILEDIVLTLTLFEDREMIEERLKTYAHLFDDKVMKQLKRRRYTGWGRLSRKLINGIRDKQSGKTILDFLKSDGFANRNFMQLIHDDSLTFKEDIQKAQVSGQGDSLHEHIANLAGSPAIKKGILQTVKVVDELVKVMGRHKPENIVIEMARENQTTQKGQKNSRERMKRIEEGIKELGSQILKEHPVENTQLQNEKLYLYYLQNGRDMYVDQELDINRLSDYDVDHIVPQSFLKDDSIDNKVLTRSDKARGKSDNVPSEEVVKKMKNYWRQLLNAKLITQRKFDNLTKAERGGLSELDKAGFIKRQLVETRQITKHVAQILDSRMNTKYDENDKLIREVKVITLKSKLVSDFRKDFQFYKVREINNYHHAHDAYLNAVVGTALIKKYPKLESEFVYGDYKVYDVRKMIAKSEQEIGKATAKYFFYSNIMNFFKTEITLANGEIRKRPLIETNGETGEIVWDKGRDFATVRKVLSMPQVNIVKKTEVQTGGFSKESILPKRNSDKLIARKKDWDPKKYGGFDSPTVAYSVLVVAKVEKGKSKKLKSVKELLGITIMERSSFEKNPIDFLEAKGYKEVKKDLIIKLPKYSLFELENGRKRMLASAGELQKGNELALPSKYVNFLYLASHYEKLKGSPEDNEQKQLFVEQHKHYLDEIIEQISEFSKRVILADANLDKVLSAYNKHRDKPIREQAENIIHLFTLTNLGAPAAFKYFDTTIDRKRYTSTKEVLDATLIHQSITGLYETRIDLSQLGGDGGEAAAKPAPGGTVSLQDEHRLFDIPVTTSLPDVWLQDFPQAWAETGGLGRAKCQAPIIIDLKPTAVPVSIKQYPMSLEAHMGIRQHIIKFLELGVLRPCRSPWNTPLLPVKKPGTQDYRPVQDLREINKRTVDIHPTVPNPYNLLSTLKPDYSWYTVLDLKDAFFCLPLAPQSQELFAFEWKDPERGISGQLTWTRLPQGFKNSPTLFNEALHRDLTDFRTQHPEVTLLQYVDDLLLAAPTKKACTQGTRHLLQELGEKGYRASAKKAQICQTKVTYLGYILSEGKRWLTPGRIETVARIPPPRNPREVREFLGKAGFCRLFIPGFAELAAPLYALTKPSTPFTWQTEHQLAFEALKKALLSAPALGLPDTSKPFTLFLDERQGIAKGVLTQKLGPWKRPVAYLSKKLDPVAAGWPPCLRIMAATAMLVKDSAKLTLGQPLTVITPHTLEAIVRQPPDRWITNARLTHYQALLLDTDRVQFGPPVTLNPATLLPVPENQPSPHDCRQVLAETHGTREDLKDQELPDADHTWYTDGSSYLDSGTRRAGAAVVDGHNTIWAQSLPPGTSAQKAELIALTKALELSKGKKANIYTDSRYAFATAHTHGSIYERRGWLTSEGKEIKNKAEIIALLKALFLPQEVAIIHCPGHQKGQDPVAVGNRQADRVARQAAMAEVLTLATEPDNTSHITAGKRTADGSEFEKRTADGSEFESPKKKAKVE

SEQ ID NO: 1961 - protein, 2100 aa, synthetic construct
MPAAKRVKLDGGDKKYSIGLDIGTNSVGWAVITDEYKVPSKKFKVLGNTDRHSIKKNLIGALLFDSGETAEATRLKRTARRRYTRRKNRICYLQEIFSNEMAKVDDSFFHRLEESFLVEEDKKHERHPIFGNIVDEVAYHEKYPTIYHLRKKLVDSTDKADLRLIYLALAHMIKFRGHFLIEGDLNPDNSDVDKLFIQLVQTYNQLFEENPINASGVDAKAILSARLSKSRRLENLIAQLPGEKKNGLFGNLIALSLGLTPNFKSNFDLAEDAKLQLSKDTYDDDLDNLLAQIGDQYADLFLAAKNLSDAILLSDILRVNTEITKAPLSASMIKRYDEHHQDLTLLKALVRQQLPEKYKEIFFDQSKNGYAGYIDGGASQEEFYKFIKPILEKMDGTEELLVKLNREDLLRKQRTFDNGSIPHQIHLGELHAILRRQEDFYPFLKDNREKIEKILTFRIPYYVGPLARGNSRFAWMTRKSEETITPWNFEEVVDKGASAQSFIERMTNFDKNLPNEKVLPKHSLLYEYFTVYNELTKVKYVTEGMRKPAFLSGEQKKAIVDLLFKTNRKVTVKQLKEDYFKKIECFDSVEISGVEDRFNASLGTYHDLLKIIKDKDFLDNEENEDILEDIVLTLTLFEDREMIEERLKTYAHLFDDKVMKQLKRRRYTGWGRLSRKLINGIRDKQSGKTILDFLKSDGFANRNFMQLIHDDSLTFKEDIQKAQVSGQGDSLHEHIANLAGSPAIKKGILQTVKVVDELVKVMGRHKPENIVIEMARENQTTQKGQKNSRERMKRIEEGIKELGSQILKEHPVENTQLQNEKLYLYYLQNGRDMYVDQELDINRLSDYDVDHIVPQSFLKDDSIDNKVLTRSDKARGKSDNVPSEEVVKKMKNYWRQLLNAKLITQRKFDNLTKAERGGLSELDKAGFIKRQLVETRQITKHVAQILDSRMNTKYDENDKLIREVKVITLKSKLVSDFRKDFQFYKVREINNYHHAHDAYLNAVVGTALIKKYPKLESEFVYGDYKVYDVRKMIAKSEQEIGKATAKYFFYSNIMNFFKTEITLANGEIRKRPLIETNGETGEIVWDKGRDFATVRKVLSMPQVNIVKKTEVQTGGFSKESILPKRNSDKLIARKKDWDPKKYGGFDSPTVAYSVLVVAKVEKGKSKKLKSVKELLGITIMERSSFEKNPIDFLEAKGYKEVKKDLIIKLPKYSLFELENGRKRMLASAGELQKGNELALPSKYVNFLYLASHYEKLKGSPEDNEQKQLFVEQHKHYLDEIIEQISEFSKRVILADANLDKVLSAYNKHRDKPIREQAENIIHLFTLTNLGAPAAFKYFDTTIDRKRYTSTKEVLDATLIHQSITGLYETRIDLSQLGGDGGPAPGSSGGSGGTVSLQDEHRLFDIPVTTSLPDVWLQDFPQAWAETGGLGRAKCQAPIIIDLKPTAVPVSIKQYPMSLEAHMGIRQHIIKFLELGVLRPCRSPWNTPLLPVKKPGTQDYRPVQDLREINKRTVDIHPTVPNPYNLLSTLKPDYSWYTVLDLKDAFFCLPLAPQSQELFAFEWKDPERGISGQLTWTRLPQGFKNSPTLFNEALHRDLTDFRTQHPEVTLLQYVDDLLLAAPTKKACTQGTRHLLQELGEKGYRASAKKAQICQTKVTYLGYILSEGKRWLTPGRIETVARIPPPRNPREVREFLGKAGFCRLFIPGFAELAAPLYALTKPSTPFTWQTEHQLAFEALKKALLSAPALGLPDTSKPFTLFLDERQGIAKGVLTQKLGPWKRPVAYLSKKLDPVAAGWPPCLRIMAATAMLVKDSAKLTLGQPLTVITPHTLEAIVRQPPDRWITNARLTHYQALLLDTDRVQFGPPVTLNPATLLPVPENQPSPHDCRQVLAETHGTREDLKDQELPDADHTWYTDGSSYLDSGTRRAGAAVVDGHNTIWAQSLPPGTSAQKAELIALTKALELSKGKKANIYTDSRYAFATAHTHGSIYERRGWLTSEGKEIKNKAEIIALLKALFLPQEVAIIHCPGHQKGQDPVAVGNRQADRVARQAAMAEVLTLATEPDNTSHITAGKRTADGSEFEKRTADGSEFESPKKKAKVE

SEQ ID NO: 1962 - protein, 2100 aa, synthetic construct
MPAAKRVKLDGGDKKYSIGLDIGTNSVGWAVITDEYKVPSKKFKVLGNTDRHSIKKNLIGALLFDSGETAEATRLKRTARRRYTRRKNRICYLQEIFSNEMAKVDDSFFHRLEESFLVEEDKKHERHPIFGNIVDEVAYHEKYPTIYHLRKKLVDSTDKADLRLIYLALAHMIKFRGHFLIEGDLNPDNSDVDKLFIQLVQTYNQLFEENPINASGVDAKAILSARLSKSRRLENLIAQLPGEKKNGLFGNLIALSLGLTPNFKSNFDLAEDAKLQLSKDTYDDDLDNLLAQIGDQYADLFLAAKNLSDAILLSDILRVNTEITKAPLSASMIKRYDEHHQDLTLLKALVRQQLPEKYKEIFFDQSKNGYAGYIDGGASQEEFYKFIKPILEKMDGTEELLVKLNREDLLRKQRTFDNGSIPHQIHLGELHAILRRQEDFYPFLKDNREKIEKILTFRIPYYVGPLARGNSRFAWMTRKSEETITPWNFEEVVDKGASAQSFIERMTNFDKNLPNEKVLPKHSLLYEYFTVYNELTKVKYVTEGMRKPAFLSGEQKKAIVDLLFKTNRKVTVKQLKEDYFKKIECFDSVEISGVEDRFNASLGTYHDLLKIIKDKDFLDNEENEDILEDIVLTLTLFEDREMIEERLKTYAHLFDDKVMKQLKRRRYTGWGRLSRKLINGIRDKQSGKTILDFLKSDGFANRNFMQLIHDDSLTFKEDIQKAQVSGQGDSLHEHIANLAGSPAIKKGILQTVKVVDELVKVMGRHKPENIVIEMARENQTTQKGQKNSRERMKRIEEGIKELGSQILKEHPVENTQLQNEKLYLYYLQNGRDMYVDQELDINRLSDYDVDHIVPQSFLKDDSIDNKVLTRSDKARGKSDNVPSEEVVKKMKNYWRQLLNAKLITQRKFDNLTKAERGGLSELDKAGFIKRQLVETRQITKHVAQILDSRMNTKYDENDKLIREVKVITLKSKLVSDFRKDFQFYKVREINNYHHAHDAYLNAVVGTALIKKYPKLESEFVYGDYKVYDVRKMIAKSEQEIGKATAKYFFYSNIMNFFKTEITLANGEIRKRPLIETNGETGEIVWDKGRDFATVRKVLSMPQVNIVKKTEVQTGGFSKESILPKRNSDKLIARKKDWDPKKYGGFDSPTVAYSVLVVAKVEKGKSKKLKSVKELLGITIMERSSFEKNPIDFLEAKGYKEVKKDLIIKLPKYSLFELENGRKRMLASAGELQKGNELALPSKYVNFLYLASHYEKLKGSPEDNEQKQLFVEQHKHYLDEIIEQISEFSKRVILADANLDKVLSAYNKHRDKPIREQAENIIHLFTLTNLGAPAAFKYFDTTIDRKRYTSTKEVLDATLIHQSITGLYETRIDLSQLGGDGGGSSPAPGGGGGTVSLQDEHRLFDIPVTTSLPDVWLQDFPQAWAETGGLGRAKCQAPIIIDLKPTAVPVSIKQYPMSLEAHMGIRQHIIKFLELGVLRPCRSPWNTPLLPVKKPGTQDYRPVQDLREINKRTVDIHPTVPNPYNLLSTLKPDYSWYTVLDLKDAFFCLPLAPQSQELFAFEWKDPERGISGQLTWTRLPQGFKNSPTLFNEALHRDLTDFRTQHPEVTLLQYVDDLLLAAPTKKACTQGTRHLLQELGEKGYRASAKKAQICQTKVTYLGYILSEGKRWLTPGRIETVARIPPPRNPREVREFLGKAGFCRLFIPGFAELAAPLYALTKPSTPFTWQTEHQLAFEALKKALLSAPALGLPDTSKPFTLFLDERQGIAKGVLTQKLGPWKRPVAYLSKKLDPVAAGWPPCLRIMAATAMLVKDSAKLTLGQPLTVITPHTLEAIVRQPPDRWITNARLTHYQALLLDTDRVQFGPPVTLNPATLLPVPENQPSPHDCRQVLAETHGTREDLKDQELPDADHTWYTDGSSYLDSGTRRAGAAVVDGHNTIWAQSLPPGTSAQKAELIALTKALELSKGKKANIYTDSRYAFATAHTHGSIYERRGWLTSEGKEIKNKAEIIALLKALFLPQEVAIIHCPGHQKGQDPVAVGNRQADRVARQAAMAEVLTLATEPDNTSHITAGKRTADGSEFEKRTADGSEFESPKKKAKVE

SEQ ID NO: 1963 - protein, 2101 aa, synthetic construct
MPAAKRVKLDGGDKKYSIGLDIGTNSVGWAVITDEYKVPSKKFKVLGNTDRHSIKKNLIGALLFDSGETAEATRLKRTARRRYTRRKNRICYLQEIFSNEMAKVDDSFFHRLEESFLVEEDKKHERHPIFGNIVDEVAYHEKYPTIYHLRKKLVDSTDKADLRLIYLALAHMIKFRGHFLIEGDLNPDNSDVDKLFIQLVQTYNQLFEENPINASGVDAKAILSARLSKSRRLENLIAQLPGEKKNGLFGNLIALSLGLTPNFKSNFDLAEDAKLQLSKDTYDDDLDNLLAQIGDQYADLFLAAKNLSDAILLSDILRVNTEITKAPLSASMIKRYDEHHQDLTLLKALVRQQLPEKYKEIFFDQSKNGYAGYIDGGASQEEFYKFIKPILEKMDGTEELLVKLNREDLLRKQRTFDNGSIPHQIHLGELHAILRRQEDFYPFLKDNREKIEKILTFRIPYYVGPLARGNSRFAWMTRKSEETITPWNFEEVVDKGASAQSFIERMTNFDKNLPNEKVLPKHSLLYEYFTVYNELTKVKYVTEGMRKPAFLSGEQKKAIVDLLFKTNRKVTVKQLKEDYFKKIECFDSVEISGVEDRFNASLGTYHDLLKIIKDKDFLDNEENEDILEDIVLTLTLFEDREMIEERLKTYAHLFDDKVMKQLKRRRYTGWGRLSRKLINGIRDKQSGKTILDFLKSDGFANRNFMQLIHDDSLTFKEDIQKAQVSGQGDSLHEHIANLAGSPAIKKGILQTVKVVDELVKVMGRHKPENIVIEMARENQTTQKGQKNSRERMKRIEEGIKELGSQILKEHPVENTQLQNEKLYLYYLQNGRDMYVDQELDINRLSDYDVDHIVPQSFLKDDSIDNKVLTRSDKARGKSDNVPSEEVVKKMKNYWRQLLNAKLITQRKFDNLTKAERGGLSELDKAGFIKRQLVETRQITKHVAQILDSRMNTKYDENDKLIREVKVITLKSKLVSDFRKDFQFYKVREINNYHHAHDAYLNAVVGTALIKKYPKLESEFVYGDYKVYDVRKMIAKSEQEIGKATAKYFFYSNIMNFFKTEITLANGEIRKRPLIETNGETGEIVWDKGRDFATVRKVLSMPQVNIVKKTEVQTGGFSKESILPKRNSDKLIARKKDWDPKKYGGFDSPTVAYSVLVVAKVEKGKSKKLKSVKELLGITIMERSSFEKNPIDFLEAKGYKEVKKDLIIKLPKYSLFELENGRKRMLASAGELQKGNELALPSKYVNFLYLASHYEKLKGSPEDNEQKQLFVEQHKHYLDEIIEQISEFSKRVILADANLDKVLSAYNKHRDKPIREQAENIIHLFTLTNLGAPAAFKYFDTTIDRKRYTSTKEVLDATLIHQSITGLYETRIDLSQLGGDGGEAAAKEAAAKGGTVSLQDEHRLFDIPVTTSLPDVWLQDFPQAWAETGGLGRAKCQAPIIIDLKPTAVPVSIKQYPMSLEAHMGIRQHIIKFLELGVLRPCRSPWNTPLLPVKKPGTQDYRPVQDLREINKRTVDIHPTVPNPYNLLSTLKPDYSWYTVLDLKDAFFCLPLAPQSQELFAFEWKDPERGISGQLTWTRLPQGFKNSPTLFNEALHRDLTDFRTQHPEVTLLQYVDDLLLAAPTKKACTQGTRHLLQELGEKGYRASAKKAQICQTKVTYLGYILSEGKRWLTPGRIETVARIPPPRNPREVREFLGKAGFCRLFIPGFAELAAPLYALTKPSTPFTWQTEHQLAFEALKKALLSAPALGLPDTSKPFTLFLDERQGIAKGVLTQKLGPWKRPVAYLSKKLDPVAAGWPPCLRIMAATAMLVKDSAKLTLGQPLTVITPHTLEAIVRQPPDRWITNARLTHYQALLLDTDRVQFGPPVTLNPATLLPVPENQPSPHDCRQVLAETHGTREDLKDQELPDADHTWYTDGSSYLDSGTRRAGAAVVDGHNTIWAQSLPPGTSAQKAELIALTKALELSKGKKANIYTDSRYAFATAHTHGSIYERRGWLTSEGKEIKNKAEIIALLKALFLPQEVAIIHCPGHQKGQDPVAVGNRQADRVARQAAMAEVLTLATEPDNTSHITAGKRTADGSEFEKRTADGSEFESPKKKAKVE

SEQ ID NO: 1964 - protein, 2100 aa, synthetic construct
MPAAKRVKLDGGDKKYSIGLDIGTNSVGWAVITDEYKVPSKKFKVLGNTDRHSIKKNLIGALLFDSGETAEATRLKRTARRRYTRRKNRICYLQEIFSNEMAKVDDSFFHRLEESFLVEEDKKHERHPIFGNIVDEVAYHEKYPTIYHLRKKLVDSTDKADLRLIYLALAHMIKFRGHFLIEGDLNPDNSDVDKLFIQLVQTYNQLFEENPINASGVDAKAILSARLSKSRRLENLIAQLPGEKKNGLFGNLIALSLGLTPNFKSNFDLAEDAKLQLSKDTYDDDLDNLLAQIGDQYADLFLAAKNLSDAILLSDILRVNTEITKAPLSASMIKRYDEHHQDLTLLKALVRQQLPEKYKEIFFDQSKNGYAGYIDGGASQEEFYKFIKPILEKMDGTEELLVKLNREDLLRKQRTFDNGSIPHQIHLGELHAILRRQEDFYPFLKDNREKIEKILTFRIPYYVGPLARGNSRFAWMTRKSEETITPWNFEEVVDKGASAQSFIERMTNFDKNLPNEKVLPKHSLLYEYFTVYNELTKVKYVTEGMRKPAFLSGEQKKAIVDLLFKTNRKVTVKQLKEDYFKKIECFDSVEISGVEDRFNASLGTYHDLLKIIKDKDFLDNEENEDILEDIVLTLTLFEDREMIEERLKTYAHLFDDKVMKQLKRRRYTGWGRLSRKLINGIRDKQSGKTILDFLKSDGFANRNFMQLIHDDSLTFKEDIQKAQVSGQGDSLHEHIANLAGSPAIKKGILQTVKVVDELVKVMGRHKPENIVIEMARENQTTQKGQKNSRERMKRIEEGIKELGSQILKEHPVENTQLQNEKLYLYYLQNGRDMYVDQELDINRLSDYDVDHIVPQSFLKDDSIDNKVLTRSDKARGKSDNVPSEEVVKKMKNYWRQLLNAKLITQRKFDNLTKAERGGLSELDKAGFIKRQLVETRQITKHVAQILDSRMNTKYDENDKLIREVKVITLKSKLVSDFRKDFQFYKVREINNYHHAHDAYLNAVVGTALIKKYPKLESEFVYGDYKVYDVRKMIAKSEQEIGKATAKYFFYSNIMNFFKTEITLANGEIRKRPLIETNGETGEIVWDKGRDFATVRKVLSMPQVNIVKKTEVQTGGFSKESILPKRNSDKLIARKKDWDPKKYGGFDSPTVAYSVLVVAKVEKGKSKKLKSVKELLGITIMERSSFEKNPIDFLEAKGYKEVKKDLIIKLPKYSLFELENGRKRMLASAGELQKGNELALPSKYVNFLYLASHYEKLKGSPEDNEQKQLFVEQHKHYLDEIIEQISEFSKRVILADANLDKVLSAYNKHRDKPIREQAENIIHLFTLTNLGAPAAFKYFDTTIDRKRYTSTKEVLDATLIHQSITGLYETRIDLSQLGGDGGGGSPAPGSSGGTVSLQDEHRLFDIPVTTSLPDVWLQDFPQAWAETGGLGRAKCQAPIIIDLKPTAVPVSIKQYPMSLEAHMGIRQHIIKFLELGVLRPCRSPWNTPLLPVKKPGTQDYRPVQDLREINKRTVDIHPTVPNPYNLLSTLKPDYSWYTVLDLKDAFFCLPLAPQSQELFAFEWKDPERGISGQLTWTRLPQGFKNSPTLFNEALHRDLTDFRTQHPEVTLLQYVDDLLLAAPTKKACTQGTRHLLQELGEKGYRASAKKAQICQTKVTYLGYILSEGKRWLTPGRIETVARIPPPRNPREVREFLGKAGFCRLFIPGFAELAAPLYALTKPSTPFTWQTEHQLAFEALKKALLSAPALGLPDTSKPFTLFLDERQGIAKGVLTQKLGPWKRPVAYLSKKLDPVAAGWPPCLRIMAATAMLVKDSAKLTLGQPLTVITPHTLEAIVRQPPDRWITNARLTHYQALLLDTDRVQFGPPVTLNPATLLPVPENQPSPHDCRQVLAETHGTREDLKDQELPDADHTWYTDGSSYLDSGTRRAGAAVVDGHNTIWAQSLPPGTSAQKAELIALTKALELSKGKKANIYTDSRYAFATAHTHGSIYERRGWLTSEGKEIKNKAEIIALLKALFLPQEVAIIHCPGHQKGQDPVAVGNRQADRVARQAAMAEVLTLATEPDNTSHITAGKRTADGSEFEKRTADGSEFESPKKKAKVE

SEQ ID NO: 1965 - protein, 2099 aa, synthetic construct
MPAAKRVKLDGGDKKYSIGLDIGTNSVGWAVITDEYKVPSKKFKVLGNTDRHSIKKNLIGALLFDSGETAEATRLKRTARRRYTRRKNRICYLQEIFSNEMAKVDDSFFHRLEESFLVEEDKKHERHPIFGNIVDEVAYHEKYPTIYHLRKKLVDSTDKADLRLIYLALAHMIKFRGHFLIEGDLNPDNSDVDKLFIQLVQTYNQLFEENPINASGVDAKAILSARLSKSRRLENLIAQLPGEKKNGLFGNLIALSLGLTPNFKSNFDLAEDAKLQLSKDTYDDDLDNLLAQIGDQYADLFLAAKNLSDAILLSDILRVNTEITKAPLSASMIKRYDEHHQDLTLLKALVRQQLPEKYKEIFFDQSKNGYAGYIDGGASQEEFYKFIKPILEKMDGTEELLVKLNREDLLRKQRTFDNGSIPHQIHLGELHAILRRQEDFYPFLKDNREKIEKILTFRIPYYVGPLARGNSRFAWMTRKSEETITPWNFEEVVDKGASAQSFIERMTNFDKNLPNEKVLPKHSLLYEYFTVYNELTKVKYVTEGMRKPAFLSGEQKKAIVDLLFKTNRKVTVKQLKEDYFKKIECFDSVEISGVEDRFNASLGTYHDLLKIIKDKDFLDNEENEDILEDIVLTLTLFEDREMIEERLKTYAHLFDDKVMKQLKRRRYTGWGRLSRKLINGIRDKQSGKTILDFLKSDGFANRNFMQLIHDDSLTFKEDIQKAQVSGQGDSLHEHIANLAGSPAIKKGILQTVKVVDELVKVMGRHKPENIVIEMARENQTTQKGQKNSRERMKRIEEGIKELGSQILKEHPVENTQLQNEKLYLYYLQNGRDMYVDQELDINRLSDYDVDHIVPQSFLKDDSIDNKVLTRSDKARGKSDNVPSEEVVKKMKNYWRQLLNAKLITQRKFDNLTKAERGGLSELDKAGFIKRQLVETRQITKHVAQILDSRMNTKYDENDKLIREVKVITLKSKLVSDFRKDFQFYKVREINNYHHAHDAYLNAVVGTALIKKYPKLESEFVYGDYKVYDVRKMIAKSEQEIGKATAKYFFYSNIMNFFKTEITLANGEIRKRPLIETNGETGEIVWDKGRDFATVRKVLSMPQVNIVKKTEVQTGGFSKESILPKRNSDKLIARKKDWDPKKYGGFDSPTVAYSVLVVAKVEKGKSKKLKSVKELLGITIMERSSFEKNPIDFLEAKGYKEVKKDLIIKLPKYSLFELENGRKRMLASAGELQKGNELALPSKYVNFLYLASHYEKLKGSPEDNEQKQLFVEQHKHYLDEIIEQISEFSKRVILADANLDKVLSAYNKHRDKPIREQAENIIHLFTLTNLGAPAAFKYFDTTIDRKRYTSTKEVLDATLIHQSITGLYETRIDLSQLGGDGGGSSEAAAKGGTVSLQDEHRLFDIPVTTSLPDVWLQDFPQAWAETGGLGRAKCQAPIIIDLKPTAVPVSIKQYPMSLEAHMGIRQHIIKFLELGVLRPCRSPWNTPLLPVKKPGTQDYRPVQDLREINKRTVDIHPTVPNPYNLLSTLKPDYSWYTVLDLKDAFFCLPLAPQSQELFAFEWKDPERGISGQLTWTRLPQGFKNSPTLFNEALHRDLTDFRTQHPEVTLLQYVDDLLLAAPTKKACTQGTRHLLQELGEKGYRASAKKAQICQTKVTYLGYILSEGKRWLTPGRIETVARIPPPRNPREVREFLGKAGFCRLFIPGFAELAAPLYALTKPSTPFTWQTEHQLAFEALKKALLSAPALGLPDTSKPFTLFLDERQGIAKGVLTQKLGPWKRPVAYLSKKLDPVAAGWPPCLRIMAATAMLVKDSAKLTLGQPLTVITPHTLEAIVRQPPDRWITNARLTHYQALLLDTDRVQFGPPVTLNPATLLPVPENQPSPHDCRQVLAETHGTREDLKDQELPDADHTWYTDGSSYLDSGTRRAGAAVVDGHNTIWAQSLPPGTSAQKAELIALTKALELSKGKKANIYTDSRYAFATAHTHGSIYERRGWLTSEGKEIKNKAEIIALLKALFLPQEVAIIHCPGHQKGQDPVAVGNRQADRVARQAAMAEVLTLATEPDNTSHITAGKRTADGSEFEKRTADGSEFESPKKKAKVE

SEQ ID NO: 1966 - protein, 2111 aa, synthetic construct
MPAAKRVKLDGGDKKYSIGLDIGTNSVGWAVITDEYKVPSKKFKVLGNTDRHSIKKNLIGALLFDSGETAEATRLKRTARRRYTRRKNRICYLQEIFSNEMAKVDDSFFHRLEESFLVEEDKKHERHPIFGNIVDEVAYHEKYPTIYHLRKKLVDSTDKADLRLIYLALAHMIKFRGHFLIEGDLNPDNSDVDKLFIQLVQTYNQLFEENPINASGVDAKAILSARLSKSRRLENLIAQLPGEKKNGLFGNLIALSLGLTPNFKSNFDLAEDAKLQLSKDTYDDDLDNLLAQIGDQYADLFLAAKNLSDAILLSDILRVNTEITKAPLSASMIKRYDEHHQDLTLLKALVRQQLPEKYKEIFFDQSKNGYAGYIDGGASQEEFYKFIKPILEKMDGTEELLVKLNREDLLRKQRTFDNGSIPHQIHLGELHAILRRQEDFYPFLKDNREKIEKILTFRIPYYVGPLARGNSRFAWMTRKSEETITPWNFEEVVDKGASAQSFIERMTNFDKNLPNEKVLPKHSLLYEYFTVYNELTKVKYVTEGMRKPAFLSGEQKKAIVDLLFKTNRKVTVKQLKEDYFKKIECFDSVEISGVEDRFNASLGTYHDLLKIIKDKDFLDNEENEDILEDIVLTLTLFEDREMIEERLKTYAHLFDDKVMKQLKRRRYTGWGRLSRKLINGIRDKQSGKTILDFLKSDGFANRNFMQLIHDDSLTFKEDIQKAQVSGQGDSLHEHIANLAGSPAIKKGILQTVKVVDELVKVMGRHKPENIVIEMARENQTTQKGQKNSRERMKRIEEGIKELGSQILKEHPVENTQLQNEKLYLYYLQNGRDMYVDQELDINRLSDYDVDHIVPQSFLKDDSIDNKVLTRSDKARGKSDNVPSEEVVKKMKNYWRQLLNAKLITQRKFDNLTKAERGGLSELDKAGFIKRQLVETRQITKHVAQILDSRMNTKYDENDKLIREVKVITLKSKLVSDFRKDFQFYKVREINNYHHAHDAYLNAVVGTALIKKYPKLESEFVYGDYKVYDVRKMIAKSEQEIGKATAKYFFYSNIMNFFKTEITLANGEIRKRPLIETNGETGEIVWDKGRDFATVRKVLSMPQVNIVKKTEVQTGGFSKESILPKRNSDKLIARKKDWDPKKYGGFDSPTVAYSVLVVAKVEKGKSKKLKSVKELLGITIMERSSFEKNPIDFLEAKGYKEVKKDLIIKLPKYSLFELENGRKRMLASAGELQKGNELALPSKYVNFLYLASHYEKLKGSPEDNEQKQLFVEQHKHYLDEIIEQISEFSKRVILADANLDKVLSAYNKHRDKPIREQAENIIHLFTLTNLGAPAAFKYFDTTIDRKRYTSTKEVLDATLIHQSITGLYETRIDLSQLGGDGGGGGGSGGGGSGGGGSGGGGSGGTVSLQDEHRLFDIPVTTSLPDVWLQDFPQAWAETGGLGRAKCQAPIIIDLKPTAVPVSIKQYPMSLEAHMGIRQHIIKFLELGVLRPCRSPWNTPLLPVKKPGTQDYRPVQDLREINKRTVDIHPTVPNPYNLLSTLKPDYSWYTVLDLKDAFFCLPLAPQSQELFAFEWKDPERGISGQLTWTRLPQGFKNSPTLFNEALHRDLTDFRTQHPEVTLLQYVDDLLLAAPTKKACTQGTRHLLQELGEKGYRASAKKAQICQTKVTYLGYILSEGKRWLTPGRIETVARIPPPRNPREVREFLGKAGFCRLFIPGFAELAAPLYALTKPSTPFTWQTEHQLAFEALKKALLSAPALGLPDTSKPFTLFLDERQGIAKGVLTQKLGPWKRPVAYLSKKLDPVAAGWPPCLRIMAATAMLVKDSAKLTLGQPLTVITPHTLEAIVRQPPDRWITNARLTHYQALLLDTDRVQFGPPVTLNPATLLPVPENQPSPHDCRQVLAETHGTREDLKDQELPDADHTWYTDGSSYLDSGTRRAGAAVVDGHNTIWAQSLPPGTSAQKAELIALTKALELSKGKKANIYTDSRYAFATAHTHGSIYERRGWLTSEGKEIKNKAEIIALLKALFLPQEVAIIHCPGHQKGQDPVAVGNRQADRVARQAAMAEVLTLATEPDNTSHITAGKRTADGSEFEKRTADGSEFESPKKKAKVE

SEQ ID NO: 1967 - protein, 2137 aa, synthetic construct
MPAAKRVKLDGGDKKYSIGLDIGTNSVGWAVITDEYKVPSKKFKVLGNTDRHSIKKNLIGALLFDSGETAEATRLKRTARRRYTRRKNRICYLQEIFSNEMAKVDDSFFHRLEESFLVEEDKKHERHPIFGNIVDEVAYHEKYPTIYHLRKKLVDSTDKADLRLIYLALAHMIKFRGHFLIEGDLNPDNSDVDKLFIQLVQTYNQLFEENPINASGVDAKAILSARLSKSRRLENLIAQLPGEKKNGLFGNLIALSLGLTPNFKSNFDLAEDAKLQLSKDTYDDDLDNLLAQIGDQYADLFLAAKNLSDAILLSDILRVNTEITKAPLSASMIKRYDEHHQDLTLLKALVRQQLPEKYKEIFFDQSKNGYAGYIDGGASQEEFYKFIKPILEKMDGTEELLVKLNREDLLRKQRTFDNGSIPHQIHLGELHAILRRQEDFYPFLKDNREKIEKILTFRIPYYVGPLARGNSRFAWMTRKSEETITPWNFEEVVDKGASAQSFIERMTNFDKNLPNEKVLPKHSLLYEYFTVYNELTKVKYVTEGMRKPAFLSGEQKKAIVDLLFKTNRKVTVKQLKEDYFKKIECFDSVEISGVEDRFNASLGTYHDLLKIIKDKDFLDNEENEDILEDIVLTLTLFEDREMIEERLKTYAHLFDDKVMKQLKRRRYTGWGRLSRKLINGIRDKQSGKTILDFLKSDGFANRNFMQLIHDDSLTFKEDIQKAQVSGQGDSLHEHIANLAGSPAIKKGILQTVKVVDELVKVMGRHKPENIVIEMARENQTTQKGQKNSRERMKRIEEGIKELGSQILKEHPVENTQLQNEKLYLYYLQNGRDMYVDQELDINRLSDYDVDHIVPQSFLKDDSIDNKVLTRSDKARGKSDNVPSEEVVKKMKNYWRQLLNAKLITQRKFDNLTKAERGGLSELDKAGFIKRQLVETRQITKHVAQILDSRMNTKYDENDKLIREVKVITLKSKLVSDFRKDFQFYKVREINNYHHAHDAYLNAVVGTALIKKYPKLESEFVYGDYKVYDVRKMIAKSEQEIGKATAKYFFYSNIMNFFKTEITLANGEIRKRPLIETNGETGEIVWDKGRDFATVRKVLSMPQVNIVKKTEVQTGGFSKESILPKRNSDKLIARKKDWDPKKYGGFDSPTVAYSVLVVAKVEKGKSKKLKSVKELLGITIMERSSFEKNPIDFLEAKGYKEVKKDLIIKLPKYSLFELENGRKRMLASAGELQKGNELALPSKYVNFLYLASHYEKLKGSPEDNEQKQLFVEQHKHYLDEIIEQISEFSKRVILADANLDKVLSAYNKHRDKPIREQAENIIHLFTLTNLGAPAAFKYFDTTIDRKRYTSTKEVLDATLIHQSITGLYETRIDLSQLGGDGGAEAAAKEAAAKEAAAKEAAAKALEAEAAAKEAAAKEAAAKEAAAKAGGTVSLQDEHRLFDIPVTTSLPDVWLQDFPQAWAETGGLGRAKCQAPIIIDLKPTAVPVSIKQYPMSLEAHMGIRQHIIKFLELGVLRPCRSPWNTPLLPVKKPGTQDYRPVQDLREINKRTVDIHPTVPNPYNLLSTLKPDYSWYTVLDLKDAFFCLPLAPQSQELFAFEWKDPERGISGQLTWTRLPQGFKNSPTLFNEALHRDLTDFRTQHPEVTLLQYVDDLLLAAPTKKACTQGTRHLLQELGEKGYRASAKKAQICQTKVTYLGYILSEGKRWLTPGRIETVARIPPPRNPREVREFLGKAGFCRLFIPGFAELAAPLYALTKPSTPFTWQTEHQLAFEALKKALLSAPALGLPDTSKPFTLFLDERQGIAKGVLTQKLGPWKRPVAYLSKKLDPVAAGWPPCLRIMAATAMLVKDSAKLTLGQPLTVITPHTLEAIVRQPPDRWITNARLTHYQALLLDTDRVQFGPPVTLNPATLLPVPENQPSPHDCRQVLAETHGTREDLKDQELPDADHTWYTDGSSYLDSGTRRAGAAVVDGHNTIWAQSLPPGTSAQKAELIALTKALELSKGKKANIYTDSRYAFATAHTHGSIYERRGWLTSEGKEIKNKAEIIALLKALFLPQEVAIIHCPGHQKGQDPVAVGNRQADRVARQAAMAEVLTLATEPDNTSHITAGKRTADGSEFEKRTADGSEFESPKKKAKVE

SEQ ID NO: 1968 - protein, 2102 aa, synthetic construct
MPAAKRVKLDGGDKKYSIGLDIGTNSVGWAVITDEYKVPSKKFKVLGNTDRHSIKKNLIGALLFDSGETAEATRLKRTARRRYTRRKNRICYLQEIFSNEMAKVDDSFFHRLEESFLVEEDKKHERHPIFGNIVDEVAYHEKYPTIYHLRKKLVDSTDKADLRLIYLALAHMIKFRGHFLIEGDLNPDNSDVDKLFIQLVQTYNQLFEENPINASGVDAKAILSARLSKSRRLENLIAQLPGEKKNGLFGNLIALSLGLTPNFKSNFDLAEDAKLQLSKDTYDDDLDNLLAQIGDQYADLFLAAKNLSDAILLSDILRVNTEITKAPLSASMIKRYDEHHQDLTLLKALVRQQLPEKYKEIFFDQSKNGYAGYIDGGASQEEFYKFIKPILEKMDGTEELLVKLNREDLLRKQRTFDNGSIPHQIHLGELHAILRRQEDFYPFLKDNREKIEKILTFRIPYYVGPLARGNSRFAWMTRKSEETITPWNFEEVVDKGASAQSFIERMTNFDKNLPNEKVLPKHSLLYEYFTVYNELTKVKYVTEGMRKPAFLSGEQKKAIVDLLFKTNRKVTVKQLKEDYFKKIECFDSVEISGVEDRFNASLGTYHDLLKIIKDKDFLDNEENEDILEDIVLTLTLFEDREMIEERLKTYAHLFDDKVMKQLKRRRYTGWGRLSRKLINGIRDKQSGKTILDFLKSDGFANRNFMQLIHDDSLTFKEDIQKAQVSGQGDSLHEHIANLAGSPAIKKGILQTVKVVDELVKVMGRHKPENIVIEMARENQTTQKGQKNSRERMKRIEEGIKELGSQILKEHPVENTQLQNEKLYLYYLQNGRDMYVDQELDINRLSDYDVDHIVPQSFLKDDSIDNKVLTRSDKARGKSDNVPSEEVVKKMKNYWRQLLNAKLITQRKFDNLTKAERGGLSELDKAGFIKRQLVETRQITKHVAQILDSRMNTKYDENDKLIREVKVITLKSKLVSDFRKDFQFYKVREINNYHHAHDAYLNAVVGTALIKKYPKLESEFVYGDYKVYDVRKMIAKSEQEIGKATAKYFFYSNIMNFFKTEITLANGEIRKRPLIETNGETGEIVWDKGRDFATVRKVLSMPQVNIVKKTEVQTGGFSKESILPKRNSDKLIARKKDWDPKKYGGFDSPTVAYSVLVVAKVEKGKSKKLKSVKELLGITIMERSSFEKNPIDFLEAKGYKEVKKDLIIKLPKYSLFELENGRKRMLASAGELQKGNELALPSKYVNFLYLASHYEKLKGSPEDNEQKQLFVEQHKHYLDEIIEQISEFSKRVILADANLDKVLSAYNKHRDKPIREQAENIIHLFTLTNLGAPAAFKYFDTTIDRKRYTSTKEVLDATLIHQSITGLYETRIDLSQLGGDGGPAPGSSEAAAKGGTVSLQDEHRLFDIPVTTSLPDVWLQDFPQAWAETGGLGRAKCQAPIIIDLKPTAVPVSIKQYPMSLEAHMGIRQHIIKFLELGVLRPCRSPWNTPLLPVKKPGTQDYRPVQDLREINKRTVDIHPTVPNPYNLLSTLKPDYSWYTVLDLKDAFFCLPLAPQSQELFAFEWKDPERGISGQLTWTRLPQGFKNSPTLFNEALHRDLTDFRTQHPEVTLLQYVDDLLLAAPTKKACTQGTRHLLQELGEKGYRASAKKAQICQTKVTYLGYILSEGKRWLTPGRIETVARIPPPRNPREVREFLGKAGFCRLFIPGFAELAAPLYALTKPSTPFTWQTEHQLAFEALKKALLSAPALGLPDTSKPFTLFLDERQGIAKGVLTQKLGPWKRPVAYLSKKLDPVAAGWPPCLRIMAATAMLVKDSAKLTLGQPLTVITPHTLEAIVRQPPDRWITNARLTHYQALLLDTDRVQFGPPVTLNPATLLPVPENQPSPHDCRQVLAETHGTREDLKDQELPDADHTWYTDGSSYLDSGTRRAGAAVVDGHNTIWAQSLPPGTSAQKAELIALTKALELSKGKKANIYTDSRYAFATAHTHGSIYERRGWLTSEGKEIKNKAEIIALLKALFLPQEVAIIHCPGHQKGQDPVAVGNRQADRVARQAAMAEVLTLATEPDNTSHITAGKRTADGSEFEKRTADGSEFESPKKKAKVE

SEQ ID NO: 1969 - protein, 2102 aa, synthetic construct
MPAAKRVKLDGGDKKYSIGLDIGTNSVGWAVITDEYKVPSKKFKVLGNTDRHSIKKNLIGALLFDSGETAEATRLKRTARRRYTRRKNRICYLQEIFSNEMAKVDDSFFHRLEESFLVEEDKKHERHPIFGNIVDEVAYHEKYPTIYHLRKKLVDSTDKADLRLIYLALAHMIKFRGHFLIEGDLNPDNSDVDKLFIQLVQTYNQLFEENPINASGVDAKAILSARLSKSRRLENLIAQLPGEKKNGLFGNLIALSLGLTPNFKSNFDLAEDAKLQLSKDTYDDDLDNLLAQIGDQYADLFLAAKNLSDAILLSDILRVNTEITKAPLSASMIKRYDEHHQDLTLLKALVRQQLPEKYKEIFFDQSKNGYAGYIDGGASQEEFYKFIKPILEKMDGTEELLVKLNREDLLRKQRTFDNGSIPHQIHLGELHAILRRQEDFYPFLKDNREKIEKILTFRIPYYVGPLARGNSRFAWMTRKSEETITPWNFEEVVDKGASAQSFIERMTNFDKNLPNEKVLPKHSLLYEYFTVYNELTKVKYVTEGMRKPAFLSGEQKKAIVDLLFKTNRKVTVKQLKEDYFKKIECFDSVEISGVEDRFNASLGTYHDLLKIIKDKDFLDNEENEDILEDIVLTLTLFEDREMIEERLKTYAHLFDDKVMKQLKRRRYTGWGRLSRKLINGIRDKQSGKTILDFLKSDGFANRNFMQLIHDDSLTFKEDIQKAQVSGQGDSLHEHIANLAGSPAIKKGILQTVKVVDELVKVMGRHKPENIVIEMARENQTTQKGQKNSRERMKRIEEGIKELGSQILKEHPVENTQLQNEKLYLYYLQNGRDMYVDQELDINRLSDYDVDHIVPQSFLKDDSIDNKVLTRSDKARGKSDNVPSEEVVKKMKNYWRQLLNAKLITQRKFDNLTKAERGGLSELDKAGFIKRQLVETRQITKHVAQILDSRMNTKYDENDKLIREVKVITLKSKLVSDFRKDFQFYKVREINNYHHAHDAYLNAVVGTALIKKYPKLESEFVYGDYKVYDVRKMIAKSEQEIGKATAKYFFYSNIMNFFKTEITLANGEIRKRPLIETNGETGEIVWDKGRDFATVRKVLSMPQVNIVKKTEVQTGGFSKESILPKRNSDKLIARKKDWDPKKYGGFDSPTVAYSVLVVAKVEKGKSKKLKSVKELLGITIMERSSFEKNPIDFLEAKGYKEVKKDLIIKLPKYSLFELENGRKRMLASAGELQKGNELALPSKYVNFLYLASHYEKLKGSPEDNEQKQLFVEQHKHYLDEIIEQISEFSKRVILADANLDKVLSAYNKHRDKPIREQAENIIHLFTLTNLGAPAAFKYFDTTIDRKRYTSTKEVLDATLIHQSITGLYETRIDLSQLGGDGGGGGEAAAKPAPGGTVSLQDEHRLFDIPVTTSLPDVWLQDFPQAWAETGGLGRAKCQAPIIIDLKPTAVPVSIKQYPMSLEAHMGIRQHIIKFLELGVLRPCRSPWNTPLLPVKKPGTQDYRPVQDLREINKRTVDIHPTVPNPYNLLSTLKPDYSWYTVLDLKDAFFCLPLAPQSQELFAFEWKDPERGISGQLTWTRLPQGFKNSPTLFNEALHRDLTDFRTQHPEVTLLQYVDDLLLAAPTKKACTQGTRHLLQELGEKGYRASAKKAQICQTKVTYLGYILSEGKRWLTPGRIETVARIPPPRNPREVREFLGKAGFCRLFIPGFAELAAPLYALTKPSTPFTWQTEHQLAFEALKKALLSAPALGLPDTSKPFTLFLDERQGIAKGVLTQKLGPWKRPVAYLSKKLDPVAAGWPPCLRIMAATAMLVKDSAKLTLGQPLTVITPHTLEAIVRQPPDRWITNARLTHYQALLLDTDRVQFGPPVTLNPATLLPVPENQPSPHDCRQVLAETHGTREDLKDQELPDADHTWYTDGSSYLDSGTRRAGAAVVDGHNTIWAQSLPPGTSAQKAELIALTKALELSKGKKANIYTDSRYAFATAHTHGSIYERRGWLTSEGKEIKNKAEIIALLKALFLPQEVAIIHCPGHQKGQDPVAVGNRQADRVARQAAMAEVLTLATEPDNTSHITAGKRTADGSEFEKRTADGSEFESPKKKAKVE

SEQ ID NO: 1970 - protein, 2097 aa, synthetic construct
MPAAKRVKLDGGDKKYSIGLDIGTNSVGWAVITDEYKVPSKKFKVLGNTDRHSIKKNLIGALLFDSGETAEATRLKRTARRRYTRRKNRICYLQEIFSNEMAKVDDSFFHRLEESFLVEEDKKHERHPIFGNIVDEVAYHEKYPTIYHLRKKLVDSTDKADLRLIYLALAHMIKFRGHFLIEGDLNPDNSDVDKLFIQLVQTYNQLFEENPINASGVDAKAILSARLSKSRRLENLIAQLPGEKKNGLFGNLIALSLGLTPNFKSNFDLAEDAKLQLSKDTYDDDLDNLLAQIGDQYADLFLAAKNLSDAILLSDILRVNTEITKAPLSASMIKRYDEHHQDLTLLKALVRQQLPEKYKEIFFDQSKNGYAGYIDGGASQEEFYKFIKPILEKMDGTEELLVKLNREDLLRKQRTFDNGSIPHQIHLGELHAILRRQEDFYPFLKDNREKIEKILTFRIPYYVGPLARGNSRFAWMTRKSEETITPWNFEEVVDKGASAQSFIERMTNFDKNLPNEKVLPKHSLLYEYFTVYNELTKVKYVTEGMRKPAFLSGEQKKAIVDLLFKTNRKVTVKQLKEDYFKKIECFDSVEISGVEDRFNASLGTYHDLLKIIKDKDFLDNEENEDILEDIVLTLTLFEDREMIEERLKTYAHLFDDKVMKQLKRRRYTGWGRLSRKLINGIRDKQSGKTILDFLKSDGFANRNFMQLIHDDSLTFKEDIQKAQVSGQGDSLHEHIANLAGSPAIKKGILQTVKVVDELVKVMGRHKPENIVIEMARENQTTQKGQKNSRERMKRIEEGIKELGSQILKEHPVENTQLQNEKLYLYYLQNGRDMYVDQELDINRLSDYDVDHIVPQSFLKDDSIDNKVLTRSDKARGKSDNVPSEEVVKKMKNYWRQLLNAKLITQRKFDNLTKAERGGLSELDKAGFIKRQLVETRQITKHVAQILDSRMNTKYDENDKLIREVKVITLKSKLVSDFRKDFQFYKVREINNYHHAHDAYLNAVVGTALIKKYPKLESEFVYGDYKVYDVRKMIAKSEQEIGKATAKYFFYSNIMNFFKTEITLANGEIRKRPLIETNGETGEIVWDKGRDFATVRKVLSMPQVNIVKKTEVQTGGFSKESILPKRNSDKLIARKKDWDPKKYGGFDSPTVAYSVLVVAKVEKGKSKKLKSVKELLGITIMERSSFEKNPIDFLEAKGYKEVKKDLIIKLPKYSLFELENGRKRMLASAGELQKGNELALPSKYVNFLYLASHYEKLKGSPEDNEQKQLFVEQHKHYLDEIIEQISEFSKRVILADANLDKVLSAYNKHRDKPIREQAENIIHLFTLTNLGAPAAFKYFDTTIDRKRYTSTKEVLDATLIHQSITGLYETRIDLSQLGGDGGGSSGSSGGTVSLQDEHRLFDIPVTTSLPDVWLQDFPQAWAETGGLGRAKCQAPIIIDLKPTAVPVSIKQYPMSLEAHMGIRQHIIKFLELGVLRPCRSPWNTPLLPVKKPGTQDYRPVQDLREINKRTVDIHPTVPNPYNLLSTLKPDYSWYTVLDLKDAFFCLPLAPQSQELFAFEWKDPERGISGQLTWTRLPQGFKNSPTLFNEALHRDLTDFRTQHPEVTLLQYVDDLLLAAPTKKACTQGTRHLLQELGEKGYRASAKKAQICQTKVTYLGYILSEGKRWLTPGRIETVARIPPPRNPREVREFLGKAGFCRLFIPGFAELAAPLYALTKPSTPFTWQTEHQLAFEALKKALLSAPALGLPDTSKPFTLFLDERQGIAKGVLTQKLGPWKRPVAYLSKKLDPVAAGWPPCLRIMAATAMLVKDSAKLTLGQPLTVITPHTLEAIVRQPPDRWITNARLTHYQALLLDTDRVQFGPPVTLNPATLLPVPENQPSPHDCRQVLAETHGTREDLKDQELPDADHTWYTDGSSYLDSGTRRAGAAVVDGHNTIWAQSLPPGTSAQKAELIALTKALELSKGKKANIYTDSRYAFATAHTHGSIYERRGWLTSEGKEIKNKAEIIALLKALFLPQEVAIIHCPGHQKGQDPVAVGNRQADRVARQAAMAEVLTLATEPDNTSHITAGKRTADGSEFEKRTADGSEFESPKKKAKVE

SEQ ID NO: 1971 - protein, 2099 aa, synthetic construct
MPAAKRVKLDGGDKKYSIGLDIGTNSVGWAVITDEYKVPSKKFKVLGNTDRHSIKKNLIGALLFDSGETAEATRLKRTARRRYTRRKNRICYLQEIFSNEMAKVDDSFFHRLEESFLVEEDKKHERHPIFGNIVDEVAYHEKYPTIYHLRKKLVDSTDKADLRLIYLALAHMIKFRGHFLIEGDLNPDNSDVDKLFIQLVQTYNQLFEENPINASGVDAKAILSARLSKSRRLENLIAQLPGEKKNGLFGNLIALSLGLTPNFKSNFDLAEDAKLQLSKDTYDDDLDNLLAQIGDQYADLFLAAKNLSDAILLSDILRVNTEITKAPLSASMIKRYDEHHQDLTLLKALVRQQLPEKYKEIFFDQSKNGYAGYIDGGASQEEFYKFIKPILEKMDGTEELLVKLNREDLLRKQRTFDNGSIPHQIHLGELHAILRRQEDFYPFLKDNREKIEKILTFRIPYYVGPLARGNSRFAWMTRKSEETITPWNFEEVVDKGASAQSFIERMTNFDKNLPNEKVLPKHSLLYEYFTVYNELTKVKYVTEGMRKPAFLSGEQKKAIVDLLFKTNRKVTVKQLKEDYFKKIECFDSVEISGVEDRFNASLGTYHDLLKIIKDKDFLDNEENEDILEDIVLTLTLFEDREMIEERLKTYAHLFDDKVMKQLKRRRYTGWGRLSRKLINGIRDKQSGKTILDFLKSDGFANRNFMQLIHDDSLTFKEDIQKAQVSGQGDSLHEHIANLAGSPAIKKGILQTVKVVDELVKVMGRHKPENIVIEMARENQTTQKGQKNSRERMKRIEEGIKELGSQILKEHPVENTQLQNEKLYLYYLQNGRDMYVDQELDINRLSDYDVDHIVPQSFLKDDSIDNKVLTRSDKARGKSDNVPSEEVVKKMKNYWRQLLNAKLITQRKFDNLTKAERGGLSELDKAGFIKRQLVETRQITKHVAQILDSRMNTKYDENDKLIREVKVITLKSKLVSDFRKDFQFYKVREINNYHHAHDAYLNAVVGTALIKKYPKLESEFVYGDYKVYDVRKMIAKSEQEIGKATAKYFFYSNIMNFFKTEITLANGEIRKRPLIETNGETGEIVWDKGRDFATVRKVLSMPQVNIVKKTEVQTGGFSKESILPKRNSDKLIARKKDWDPKKYGGFDSPTVAYSVLVVAKVEKGKSKKLKSVKELLGITIMERSSFEKNPIDFLEAKGYKEVKKDLIIKLPKYSLFELENGRKRMLASAGELQKGNELALPSKYVNFLYLASHYEKLKGSPEDNEQKQLFVEQHKHYLDEIIEQISEFSKRVILADANLDKVLSAYNKHRDKPIREQAENIIHLFTLTNLGAPAAFKYFDTTIDRKRYTSTKEVLDATLIHQSITGLYETRIDLSQLGGDGGEAAAKGSSGGTVSLQDEHRLFDIPVTTSLPDVWLQDFPQAWAETGGLGRAKCQAPIIIDLKPTAVPVSIKQYPMSLEAHMGIRQHIIKFLELGVLRPCRSPWNTPLLPVKKPGTQDYRPVQDLREINKRTVDIHPTVPNPYNLLSTLKPDYSWYTVLDLKDAFFCLPLAPQSQELFAFEWKDPERGISGQLTWTRLPQGFKNSPTLFNEALHRDLTDFRTQHPEVTLLQYVDDLLLAAPTKKACTQGTRHLLQELGEKGYRASAKKAQICQTKVTYLGYILSEGKRWLTPGRIETVARIPPPRNPREVREFLGKAGFCRLFIPGFAELAAPLYALTKPSTPFTWQTEHQLAFEALKKALLSAPALGLPDTSKPFTLFLDERQGIAKGVLTQKLGPWKRPVAYLSKKLDPVAAGWPPCLRIMAATAMLVKDSAKLTLGQPLTVITPHTLEAIVRQPPDRWITNARLTHYQALLLDTDRVQFGPPVTLNPATLLPVPENQPSPHDCRQVLAETHGTREDLKDQELPDADHTWYTDGSSYLDSGTRRAGAAVVDGHNTIWAQSLPPGTSAQKAELIALTKALELSKGKKANIYTDSRYAFATAHTHGSIYERRGWLTSEGKEIKNKAEIIALLKALFLPQEVAIIHCPGHQKGQDPVAVGNRQADRVARQAAMAEVLTLATEPDNTSHITAGKRTADGSEFEKRTADGSEFESPKKKAKVE

SEQ ID NO: 1972 - protein, 2102 aa, synthetic construct
MPAAKRVKLDGGDKKYSIGLDIGTNSVGWAVITDEYKVPSKKFKVLGNTDRHSIKKNLIGALLFDSGETAEATRLKRTARRRYTRRKNRICYLQEIFSNEMAKVDDSFFHRLEESFLVEEDKKHERHPIFGNIVDEVAYHEKYPTIYHLRKKLVDSTDKADLRLIYLALAHMIKFRGHFLIEGDLNPDNSDVDKLFIQLVQTYNQLFEENPINASGVDAKAILSARLSKSRRLENLIAQLPGEKKNGLFGNLIALSLGLTPNFKSNFDLAEDAKLQLSKDTYDDDLDNLLAQIGDQYADLFLAAKNLSDAILLSDILRVNTEITKAPLSASMIKRYDEHHQDLTLLKALVRQQLPEKYKEIFFDQSKNGYAGYIDGGASQEEFYKFIKPILEKMDGTEELLVKLNREDLLRKQRTFDNGSIPHQIHLGELHAILRRQEDFYPFLKDNREKIEKILTFRIPYYVGPLARGNSRFAWMTRKSEETITPWNFEEVVDKGASAQSFIERMTNFDKNLPNEKVLPKHSLLYEYFTVYNELTKVKYVTEGMRKPAFLSGEQKKAIVDLLFKTNRKVTVKQLKEDYFKKIECFDSVEISGVEDRFNASLGTYHDLLKIIKDKDFLDNEENEDILEDIVLTLTLFEDREMIEERLKTYAHLFDDKVMKQLKRRRYTGWGRLSRKLINGIRDKQSGKTILDFLKSDGFANRNFMQLIHDDSLTFKEDIQKAQVSGQGDSLHEHIANLAGSPAIKKGILQTVKVVDELVKVMGRHKPENIVIEMARENQTTQKGQKNSRERMKRIEEGIKELGSQILKEHPVENTQLQNEKLYLYYLQNGRDMYVDQELDINRLSDYDVDHIVPQSFLKDDSIDNKVLTRSDKARGKSDNVPSEEVVKKMKNYWRQLLNAKLITQRKFDNLTKAERGGLSELDKAGFIKRQLVETRQITKHVAQILDSRMNTKYDENDKLIREVKVITLKSKLVSDFRKDFQFYKVREINNYHHAHDAYLNAVVGTALIKKYPKLESEFVYGDYKVYDVRKMIAKSEQEIGKATAKYFFYSNIMNFFKTEITLANGEIRKRPLIETNGETGEIVWDKGRDFATVRKVLSMPQVNIVKKTEVQTGGFSKESILPKRNSDKLIARKKDWDPKKYGGFDSPTVAYSVLVVAKVEKGKSKKLKSVKELLGITIMERSSFEKNPIDFLEAKGYKEVKKDLIIKLPKYSLFELENGRKRMLASAGELQKGNELALPSKYVNFLYLASHYEKLKGSPEDNEQKQLFVEQHKHYLDEIIEQISEFSKRVILADANLDKVLSAYNKHRDKPIREQAENIIHLFTLTNLGAPAAFKYFDTTIDRKRYTSTKEVLDATLIHQSITGLYETRIDLSQLGGDGGGSSEAAAKGGGGGTVSLQDEHRLFDIPVTTSLPDVWLQDFPQAWAETGGLGRAKCQAPIIIDLKPTAVPVSIKQYPMSLEAHMGIRQHIIKFLELGVLRPCRSPWNTPLLPVKKPGTQDYRPVQDLREINKRTVDIHPTVPNPYNLLSTLKPDYSWYTVLDLKDAFFCLPLAPQSQELFAFEWKDPERGISGQLTWTRLPQGFKNSPTLFNEALHRDLTDFRTQHPEVTLLQYVDDLLLAAPTKKACTQGTRHLLQELGEKGYRASAKKAQICQTKVTYLGYILSEGKRWLTPGRIETVARIPPPRNPREVREFLGKAGFCRLFIPGFAELAAPLYALTKPSTPFTWQTEHQLAFEALKKALLSAPALGLPDTSKPFTLFLDERQGIAKGVLTQKLGPWKRPVAYLSKKLDPVAAGWPPCLRIMAATAMLVKDSAKLTLGQPLTVITPHTLEAIVRQPPDRWITNARLTHYQALLLDTDRVQFGPPVTLNPATLLPVPENQPSPHDCRQVLAETHGTREDLKDQELPDADHTWYTDGSSYLDSGTRRAGAAVVDGHNTIWAQSLPPGTSAQKAELIALTKALELSKGKKANIYTDSRYAFATAHTHGSIYERRGWLTSEGKEIKNKAEIIALLKALFLPQEVAIIHCPGHQKGQDPVAVGNRQADRVARQAAMAEVLTLATEPDNTSHITAGKRTADGSEFEKRTADGSEFESPKKKAKVE

SEQ ID NO: 1973 - protein, 2102 aa, synthetic construct
MPAAKRVKLDGGDKKYSIGLDIGTNSVGWAVITDEYKVPSKKFKVLGNTDRHSIKKNLIGALLFDSGETAEATRLKRTARRRYTRRKNRICYLQEIFSNEMAKVDDSFFHRLEESFLVEEDKKHERHPIFGNIVDEVAYHEKYPTIYHLRKKLVDSTDKADLRLIYLALAHMIKFRGHFLIEGDLNPDNSDVDKLFIQLVQTYNQLFEENPINASGVDAKAILSARLSKSRRLENLIAQLPGEKKNGLFGNLIALSLGLTPNFKSNFDLAEDAKLQLSKDTYDDDLDNLLAQIGDQYADLFLAAKNLSDAILLSDILRVNTEITKAPLSASMIKRYDEHHQDLTLLKALVRQQLPEKYKEIFFDQSKNGYAGYIDGGASQEEFYKFIKPILEKMDGTEELLVKLNREDLLRKQRTFDNGSIPHQIHLGELHAILRRQEDFYPFLKDNREKIEKILTFRIPYYVGPLARGNSRFAWMTRKSEETITPWNFEEVVDKGASAQSFIERMTNFDKNLPNEKVLPKHSLLYEYFTVYNELTKVKYVTEGMRKPAFLSGEQKKAIVDLLFKTNRKVTVKQLKEDYFKKIECFDSVEISGVEDRFNASLGTYHDLLKIIKDKDFLDNEENEDILEDIVLTLTLFEDREMIEERLKTYAHLFDDKVMKQLKRRRYTGWGRLSRKLINGIRDKQSGKTILDFLKSDGFANRNFMQLIHDDSLTFKEDIQKAQVSGQGDSLHEHIANLAGSPAIKKGILQTVKVVDELVKVMGRHKPENIVIEMARENQTTQKGQKNSRERMKRIEEGIKELGSQILKEHPVENTQLQNEKLYLYYLQNGRDMYVDQELDINRLSDYDVDHIVPQSFLKDDSIDNKVLTRSDKARGKSDNVPSEEVVKKMKNYWRQLLNAKLITQRKFDNLTKAERGGLSELDKAGFIKRQLVETRQITKHVAQILDSRMNTKYDENDKLIREVKVITLKSKLVSDFRKDFQFYKVREINNYHHAHDAYLNAVVGTALIKKYPKLESEFVYGDYKVYDVRKMIAKSEQEIGKATAKYFFYSNIMNFFKTEITLANGEIRKRPLIETNGETGEIVWDKGRDFATVRKVLSMPQVNIVKKTEVQTGGFSKESILPKRNSDKLIARKKDWDPKKYGGFDSPTVAYSVLVVAKVEKGKSKKLKSVKELLGITIMERSSFEKNPIDFLEAKGYKEVKKDLIIKLPKYSLFELENGRKRMLASAGELQKGNELALPSKYVNFLYLASHYEKLKGSPEDNEQKQLFVEQHKHYLDEIIEQISEFSKRVILADANLDKVLSAYNKHRDKPIREQAENIIHLFTLTNLGAPAAFKYFDTTIDRKRYTSTKEVLDATLIHQSITGLYETRIDLSQLGGDGGPAPEAAAKGGGGGTVSLQDEHRLFDIPVTTSLPDVWLQDFPQAWAETGGLGRAKCQAPIIIDLKPTAVPVSIKQYPMSLEAHMGIRQHIIKFLELGVLRPCRSPWNTPLLPVKKPGTQDYRPVQDLREINKRTVDIHPTVPNPYNLLSTLKPDYSWYTVLDLKDAFFCLPLAPQSQELFAFEWKDPERGISGQLTWTRLPQGFKNSPTLFNEALHRDLTDFRTQHPEVTLLQYVDDLLLAAPTKKACTQGTRHLLQELGEKGYRASAKKAQICQTKVTYLGYILSEGKRWLTPGRIETVARIPPPRNPREVREFLGKAGFCRLFIPGFAELAAPLYALTKPSTPFTWQTEHQLAFEALKKALLSAPALGLPDTSKPFTLFLDERQGIAKGVLTQKLGPWKRPVAYLSKKLDPVAAGWPPCLRIMAATAMLVKDSAKLTLGQPLTVITPHTLEAIVRQPPDRWITNARLTHYQALLLDTDRVQFGPPVTLNPATLLPVPENQPSPHDCRQVLAETHGTREDLKDQELPDADHTWYTDGSSYLDSGTRRAGAAVVDGHNTIWAQSLPPGTSAQKAELIALTKALELSKGKKANIYTDSRYAFATAHTHGSIYERRGWLTSEGKEIKNKAEIIALLKALFLPQEVAIIHCPGHQKGQDPVAVGNRQADRVARQAAMAEVLTLATEPDNTSHITAGKRTADGSEFEKRTADGSEFESPKKKAKVE

SEQ ID NO: 1974 - protein, 2100 aa, synthetic construct
MPAAKRVKLDGGDKKYSIGLDIGTNSVGWAVITDEYKVPSKKFKVLGNTDRHSIKKNLIGALLFDSGETAEATRLKRTARRRYTRRKNRICYLQEIFSNEMAKVDDSFFHRLEESFLVEEDKKHERHPIFGNIVDEVAYHEKYPTIYHLRKKLVDSTDKADLRLIYLALAHMIKFRGHFLIEGDLNPDNSDVDKLFIQLVQTYNQLFEENPINASGVDAKAILSARLSKSRRLENLIAQLPGEKKNGLFGNLIALSLGLTPNFKSNFDLAEDAKLQLSKDTYDDDLDNLLAQIGDQYADLFLAAKNLSDAILLSDILRVNTEITKAPLSASMIKRYDEHHQDLTLLKALVRQQLPEKYKEIFFDQSKNGYAGYIDGGASQEEFYKFIKPILEKMDGTEELLVKLNREDLLRKQRTFDNGSIPHQIHLGELHAILRRQEDFYPFLKDNREKIEKILTFRIPYYVGPLARGNSRFAWMTRKSEETITPWNFEEVVDKGASAQSFIERMTNFDKNLPNEKVLPKHSLLYEYFTVYNELTKVKYVTEGMRKPAFLSGEQKKAIVDLLFKTNRKVTVKQLKEDYFKKIECFDSVEISGVEDRFNASLGTYHDLLKIIKDKDFLDNEENEDILEDIVLTLTLFEDREMIEERLKTYAHLFDDKVMKQLKRRRYTGWGRLSRKLINGIRDKQSGKTILDFLKSDGFANRNFMQLIHDDSLTFKEDIQKAQVSGQGDSLHEHIANLAGSPAIKKGILQTVKVVDELVKVMGRHKPENIVIEMARENQTTQKGQKNSRERMKRIEEGIKELGSQILKEHPVENTQLQNEKLYLYYLQNGRDMYVDQELDINRLSDYDVDHIVPQSFLKDDSIDNKVLTRSDKARGKSDNVPSEEVVKKMKNYWRQLLNAKLITQRKFDNLTKAERGGLSELDKAGFIKRQLVETRQITKHVAQILDSRMNTKYDENDKLIREVKVITLKSKLVSDFRKDFQFYKVREINNYHHAHDAYLNAVVGTALIKKYPKLESEFVYGDYKVYDVRKMIAKSEQEIGKATAKYFFYSNIMNFFKTEITLANGEIRKRPLIETNGETGEIVWDKGRDFATVRKVLSMPQVNIVKKTEVQTGGFSKESILPKRNSDKLIARKKDWDPKKYGGFDSPTVAYSVLVVAKVEKGKSKKLKSVKELLGITIMERSSFEKNPIDFLEAKGYKEVKKDLIIKLPKYSLFELENGRKRMLASAGELQKGNELALPSKYVNFLYLASHYEKLKGSPEDNEQKQLFVEQHKHYLDEIIEQISEFSKRVILADANLDKVLSAYNKHRDKPIREQAENIIHLFTLTNLGAPAAFKYFDTTIDRKRYTSTKEVLDATLIHQSITGLYETRIDLSQLGGDGGGGSGSSGGGGGTVSLQDEHRLFDIPVTTSLPDVWLQDFPQAWAETGGLGRAKCQAPIIIDLKPTAVPVSIKQYPMSLEAHMGIRQHIIKFLELGVLRPCRSPWNTPLLPVKKPGTQDYRPVQDLREINKRTVDIHPTVPNPYNLLSTLKPDYSWYTVLDLKDAFFCLPLAPQSQELFAFEWKDPERGISGQLTWTRLPQGFKNSPTLFNEALHRDLTDFRTQHPEVTLLQYVDDLLLAAPTKKACTQGTRHLLQELGEKGYRASAKKAQICQTKVTYLGYILSEGKRWLTPGRIETVARIPPPRNPREVREFLGKAGFCRLFIPGFAELAAPLYALTKPSTPFTWQTEHQLAFEALKKALLSAPALGLPDTSKPFTLFLDERQGIAKGVLTQKLGPWKRPVAYLSKKLDPVAAGWPPCLRIMAATAMLVKDSAKLTLGQPLTVITPHTLEAIVRQPPDRWITNARLTHYQALLLDTDRVQFGPPVTLNPATLLPVPENQPSPHDCRQVLAETHGTREDLKDQELPDADHTWYTDGSSYLDSGTRRAGAAVVDGHNTIWAQSLPPGTSAQKAELIALTKALELSKGKKANIYTDSRYAFATAHTHGSIYERRGWLTSEGKEIKNKAEIIALLKALFLPQEVAIIHCPGHQKGQDPVAVGNRQADRVARQAAMAEVLTLATEPDNTSHITAGKRTADGSEFEKRTADGSEFESPKKKAKVE

SEQ ID NO: 1975 - protein, 2102 aa, synthetic construct
MPAAKRVKLDGGDKKYSIGLDIGTNSVGWAVITDEYKVPSKKFKVLGNTDRHSIKKNLIGALLFDSGETAEATRLKRTARRRYTRRKNRICYLQEIFSNEMAKVDDSFFHRLEESFLVEEDKKHERHPIFGNIVDEVAYHEKYPTIYHLRKKLVDSTDKADLRLIYLALAHMIKFRGHFLIEGDLNPDNSDVDKLFIQLVQTYNQLFEENPINASGVDAKAILSARLSKSRRLENLIAQLPGEKKNGLFGNLIALSLGLTPNFKSNFDLAEDAKLQLSKDTYDDDLDNLLAQIGDQYADLFLAAKNLSDAILLSDILRVNTEITKAPLSASMIKRYDEHHQDLTLLKALVRQQLPEKYKEIFFDQSKNGYAGYIDGGASQEEFYKFIKPILEKMDGTEELLVKLNREDLLRKQRTFDNGSIPHQIHLGELHAILRRQEDFYPFLKDNREKIEKILTFRIPYYVGPLARGNSRFAWMTRKSEETITPWNFEEVVDKGASAQSFIERMTNFDKNLPNEKVLPKHSLLYEYFTVYNELTKVKYVTEGMRKPAFLSGEQKKAIVDLLFKTNRKVTVKQLKEDYFKKIECFDSVEISGVEDRFNASLGTYHDLLKIIKDKDFLDNEENEDILEDIVLTLTLFEDREMIEERLKTYAHLFDDKVMKQLKRRRYTGWGRLSRKLINGIRDKQSGKTILDFLKSDGFANRNFMQLIHDDSLTFKEDIQKAQVSGQGDSLHEHIANLAGSPAIKKGILQTVKVVDELVKVMGRHKPENIVIEMARENQTTQKGQKNSRERMKRIEEGIKELGSQILKEHPVENTQLQNEKLYLYYLQNGRDMYVDQELDINRLSDYDVDHIVPQSFLKDDSIDNKVLTRSDKARGKSDNVPSEEVVKKMKNYWRQLLNAKLITQRKFDNLTKAERGGLSELDKAGFIKRQLVETRQITKHVAQILDSRMNTKYDENDKLIREVKVITLKSKLVSDFRKDFQFYKVREINNYHHAHDAYLNAVVGTALIKKYPKLESEFVYGDYKVYDVRKMIAKSEQEIGKATAKYFFYSNIMNFFKTEITLANGEIRKRPLIETNGETGEIVWDKGRDFATVRKVLSMPQVNIVKKTEVQTGGFSKESILPKRNSDKLIARKKDWDPKKYGGFDSPTVAYSVLVVAKVEKGKSKKLKSVKELLGITIMERSSFEKNPIDFLEAKGYKEVKKDLIIKLPKYSLFELENGRKRMLASAGELQKGNELALPSKYVNFLYLASHYEKLKGSPEDNEQKQLFVEQHKHYLDEIIEQISEFSKRVILADANLDKVLSAYNKHRDKPIREQAENIIHLFTLTNLGAPAAFKYFDTTIDRKRYTSTKEVLDATLIHQSITGLYETRIDLSQLGGDGGGGGGSSEAAAKGGTVSLQDEHRLFDIPVTTSLPDVWLQDFPQAWAETGGLGRAKCQAPIIIDLKPTAVPVSIKQYPMSLEAHMGIRQHIIKFLELGVLRPCRSPWNTPLLPVKKPGTQDYRPVQDLREINKRTVDIHPTVPNPYNLLSTLKPDYSWYTVLDLKDAFFCLPLAPQSQELFAFEWKDPERGISGQLTWTRLPQGFKNSPTLFNEALHRDLTDFRTQHPEVTLLQYVDDLLLAAPTKKACTQGTRHLLQELGEKGYRASAKKAQICQTKVTYLGYILSEGKRWLTPGRIETVARIPPPRNPREVREFLGKAGFCRLFIPGFAELAAPLYALTKPSTPFTWQTEHQLAFEALKKALLSAPALGLPDTSKPFTLFLDERQGIAKGVLTQKLGPWKRPVAYLSKKLDPVAAGWPPCLRIMAATAMLVKDSAKLTLGQPLTVITPHTLEAIVRQPPDRWITNARLTHYQALLLDTDRVQFGPPVTLNPATLLPVPENQPSPHDCRQVLAETHGTREDLKDQELPDADHTWYTDGSSYLDSGTRRAGAAVVDGHNTIWAQSLPPGTSAQKAELIALTKALELSKGKKANIYTDSRYAFATAHTHGSIYERRGWLTSEGKEIKNKAEIIALLKALFLPQEVAIIHCPGHQKGQDPVAVGNRQADRVARQAAMAEVLTLATEPDNTSHITAGKRTADGSEFEKRTADGSEFESPKKKAKVE

SEQ ID NO: 1976 - protein, 2100 aa, synthetic construct
MPAAKRVKLDGGDKKYSIGLDIGTNSVGWAVITDEYKVPSKKFKVLGNTDRHSIKKNLIGALLFDSGETAEATRLKRTARRRYTRRKNRICYLQEIFSNEMAKVDDSFFHRLEESFLVEEDKKHERHPIFGNIVDEVAYHEKYPTIYHLRKKLVDSTDKADLRLIYLALAHMIKFRGHFLIEGDLNPDNSDVDKLFIQLVQTYNQLFEENPINASGVDAKAILSARLSKSRRLENLIAQLPGEKKNGLFGNLIALSLGLTPNFKSNFDLAEDAKLQLSKDTYDDDLDNLLAQIGDQYADLFLAAKNLSDAILLSDILRVNTEITKAPLSASMIKRYDEHHQDLTLLKALVRQQLPEKYKEIFFDQSKNGYAGYIDGGASQEEFYKFIKPILEKMDGTEELLVKLNREDLLRKQRTFDNGSIPHQIHLGELHAILRRQEDFYPFLKDNREKIEKILTFRIPYYVGPLARGNSRFAWMTRKSEETITPWNFEEVVDKGASAQSFIERMTNFDKNLPNEKVLPKHSLLYEYFTVYNELTKVKYVTEGMRKPAFLSGEQKKAIVDLLFKTNRKVTVKQLKEDYFKKIECFDSVEISGVEDRFNASLGTYHDLLKIIKDKDFLDNEENEDILEDIVLTLTLFEDREMIEERLKTYAHLFDDKVMKQLKRRRYTGWGRLSRKLINGIRDKQSGKTILDFLKSDGFANRNFMQLIHDDSLTFKEDIQKAQVSGQGDSLHEHIANLAGSPAIKKGILQTVKVVDELVKVMGRHKPENIVIEMARENQTTQKGQKNSRERMKRIEEGIKELGSQILKEHPVENTQLQNEKLYLYYLQNGRDMYVDQELDINRLSDYDVDHIVPQSFLKDDSIDNKVLTRSDKARGKSDNVPSEEVVKKMKNYWRQLLNAKLITQRKFDNLTKAERGGLSELDKAGFIKRQLVETRQITKHVAQILDSRMNTKYDENDKLIREVKVITLKSKLVSDFRKDFQFYKVREINNYHHAHDAYLNAVVGTALIKKYPKLESEFVYGDYKVYDVRKMIAKSEQEIGKATAKYFFYSNIMNFFKTEITLANGEIRKRPLIETNGETGEIVWDKGRDFATVRKVLSMPQVNIVKKTEVQTGGFSKESILPKRNSDKLIARKKDWDPKKYGGFDSPTVAYSVLVVAKVEKGKSKKLKSVKELLGITIMERSSFEKNPIDFLEAKGYKEVKKDLIIKLPKYSLFELENGRKRMLASAGELQKGNELALPSKYVNFLYLASHYEKLKGSPEDNEQKQLFVEQHKHYLDEIIEQISEFSKRVILADANLDKVLSAYNKHRDKPIREQAENIIHLFTLTNLGAPAAFKYFDTTIDRKRYTSTKEVLDATLIHQSITGLYETRIDLSQLGGDGGGGSPAPGGGGGTVSLQDEHRLFDIPVTTSLPDVWLQDFPQAWAETGGLGRAKCQAPIIIDLKPTAVPVSIKQYPMSLEAHMGIRQHIIKFLELGVLRPCRSPWNTPLLPVKKPGTQDYRPVQDLREINKRTVDIHPTVPNPYNLLSTLKPDYSWYTVLDLKDAFFCLPLAPQSQELFAFEWKDPERGISGQLTWTRLPQGFKNSPTLFNEALHRDLTDFRTQHPEVTLLQYVDDLLLAAPTKKACTQGTRHLLQELGEKGYRASAKKAQICQTKVTYLGYILSEGKRWLTPGRIETVARIPPPRNPREVREFLGKAGFCRLFIPGFAELAAPLYALTKPSTPFTWQTEHQLAFEALKKALLSAPALGLPDTSKPFTLFLDERQGIAKGVLTQKLGPWKRPVAYLSKKLDPVAAGWPPCLRIMAATAMLVKDSAKLTLGQPLTVITPHTLEAIVRQPPDRWITNARLTHYQALLLDTDRVQFGPPVTLNPATLLPVPENQPSPHDCRQVLAETHGTREDLKDQELPDADHTWYTDGSSYLDSGTRRAGAAVVDGHNTIWAQSLPPGTSAQKAELIALTKALELSKGKKANIYTDSRYAFATAHTHGSIYERRGWLTSEGKEIKNKAEIIALLKALFLPQEVAIIHCPGHQKGQDPVAVGNRQADRVARQAAMAEVLTLATEPDNTSHITAGKRTADGSEFEKRTADGSEFESPKKKAKVE

SEQ ID NO: 1977 - protein, 2102 aa, synthetic construct
MPAAKRVKLDGGDKKYSIGLDIGTNSVGWAVITDEYKVPSKKFKVLGNTDRHSIKKNLIGALLFDSGETAEATRLKRTARRRYTRRKNRICYLQEIFSNEMAKVDDSFFHRLEESFLVEEDKKHERHPIFGNIVDEVAYHEKYPTIYHLRKKLVDSTDKADLRLIYLALAHMIKFRGHFLIEGDLNPDNSDVDKLFIQLVQTYNQLFEENPINASGVDAKAILSARLSKSRRLENLIAQLPGEKKNGLFGNLIALSLGLTPNFKSNFDLAEDAKLQLSKDTYDDDLDNLLAQIGDQYADLFLAAKNLSDAILLSDILRVNTEITKAPLSASMIKRYDEHHQDLTLLKALVRQQLPEKYKEIFFDQSKNGYAGYIDGGASQEEFYKFIKPILEKMDGTEELLVKLNREDLLRKQRTFDNGSIPHQIHLGELHAILRRQEDFYPFLKDNREKIEKILTFRIPYYVGPLARGNSRFAWMTRKSEETITPWNFEEVVDKGASAQSFIERMTNFDKNLPNEKVLPKHSLLYEYFTVYNELTKVKYVTEGMRKPAFLSGEQKKAIVDLLFKTNRKVTVKQLKEDYFKKIECFDSVEISGVEDRFNASLGTYHDLLKIIKDKDFLDNEENEDILEDIVLTLTLFEDREMIEERLKTYAHLFDDKVMKQLKRRRYTGWGRLSRKLINGIRDKQSGKTILDFLKSDGFANRNFMQLIHDDSLTFKEDIQKAQVSGQGDSLHEHIANLAGSPAIKKGILQTVKVVDELVKVMGRHKPENIVIEMARENQTTQKGQKNSRERMKRIEEGIKELGSQILKEHPVENTQLQNEKLYLYYLQNGRDMYVDQELDINRLSDYDVDHIVPQSFLKDDSIDNKVLTRSDKARGKSDNVPSEEVVKKMKNYWRQLLNAKLITQRKFDNLTKAERGGLSELDKAGFIKRQLVETRQITKHVAQILDSRMNTKYDENDKLIREVKVITLKSKLVSDFRKDFQFYKVREINNYHHAHDAYLNAVVGTALIKKYPKLESEFVYGDYKVYDVRKMIAKSEQEIGKATAKYFFYSNIMNFFKTEITLANGEIRKRPLIETNGETGEIVWDKGRDFATVRKVLSMPQVNIVKKTEVQTGGFSKESILPKRNSDKLIARKKDWDPKKYGGFDSPTVAYSVLVVAKVEKGKSKKLKSVKELLGITIMERSSFEKNPIDFLEAKGYKEVKKDLIIKLPKYSLFELENGRKRMLASAGELQKGNELALPSKYVNFLYLASHYEKLKGSPEDNEQKQLFVEQHKHYLDEIIEQISEFSKRVILADANLDKVLSAYNKHRDKPIREQAENIIHLFTLTNLGAPAAFKYFDTTIDRKRYTSTKEVLDATLIHQSITGLYETRIDLSQLGGDGGPAPGGGEAAAKGGTVSLQDEHRLFDIPVTTSLPDVWLQDFPQAWAETGGLGRAKCQAPIIIDLKPTAVPVSIKQYPMSLEAHMGIRQHIIKFLELGVLRPCRSPWNTPLLPVKKPGTQDYRPVQDLREINKRTVDIHPTVPNPYNLLSTLKPDYSWYTVLDLKDAFFCLPLAPQSQELFAFEWKDPERGISGQLTWTRLPQGFKNSPTLFNEALHRDLTDFRTQHPEVTLLQYVDDLLLAAPTKKACTQGTRHLLQELGEKGYRASAKKAQICQTKVTYLGYILSEGKRWLTPGRIETVARIPPPRNPREVREFLGKAGFCRLFIPGFAELAAPLYALTKPSTPFTWQTEHQLAFEALKKALLSAPALGLPDTSKPFTLFLDERQGIAKGVLTQKLGPWKRPVAYLSKKLDPVAAGWPPCLRIMAATAMLVKDSAKLTLGQPLTVITPHTLEAIVRQPPDRWITNARLTHYQALLLDTDRVQFGPPVTLNPATLLPVPENQPSPHDCRQVLAETHGTREDLKDQELPDADHTWYTDGSSYLDSGTRRAGAAVVDGHNTIWAQSLPPGTSAQKAELIALTKALELSKGKKANIYTDSRYAFATAHTHGSIYERRGWLTSEGKEIKNKAEIIALLKALFLPQEVAIIHCPGHQKGQDPVAVGNRQADRVARQAAMAEVLTLATEPDNTSHITAGKRTADGSEFEKRTADGSEFESPKKKAKVE

SEQ ID NO: 1978 - protein, 2100 aa, synthetic construct
MPAAKRVKLDGGDKKYSIGLDIGTNSVGWAVITDEYKVPSKKFKVLGNTDRHSIKKNLIGALLFDSGETAEATRLKRTARRRYTRRKNRICYLQEIFSNEMAKVDDSFFHRLEESFLVEEDKKHERHPIFGNIVDEVAYHEKYPTIYHLRKKLVDSTDKADLRLIYLALAHMIKFRGHFLIEGDLNPDNSDVDKLFIQLVQTYNQLFEENPINASGVDAKAILSARLSKSRRLENLIAQLPGEKKNGLFGNLIALSLGLTPNFKSNFDLAEDAKLQLSKDTYDDDLDNLLAQIGDQYADLFLAAKNLSDAILLSDILRVNTEITKAPLSASMIKRYDEHHQDLTLLKALVRQQLPEKYKEIFFDQSKNGYAGYIDGGASQEEFYKFIKPILEKMDGTEELLVKLNREDLLRKQRTFDNGSIPHQIHLGELHAILRRQEDFYPFLKDNREKIEKILTFRIPYYVGPLARGNSRFAWMTRKSEETITPWNFEEVVDKGASAQSFIERMTNFDKNLPNEKVLPKHSLLYEYFTVYNELTKVKYVTEGMRKPAFLSGEQKKAIVDLLFKTNRKVTVKQLKEDYFKKIECFDSVEISGVEDRFNASLGTYHDLLKIIKDKDFLDNEENEDILEDIVLTLTLFEDREMIEERLKTYAHLFDDKVMKQLKRRRYTGWGRLSRKLINGIRDKQSGKTILDFLKSDGFANRNFMQLIHDDSLTFKEDIQKAQVSGQGDSLHEHIANLAGSPAIKKGILQTVKVVDELVKVMGRHKPENIVIEMARENQTTQKGQKNSRERMKRIEEGIKELGSQILKEHPVENTQLQNEKLYLYYLQNGRDMYVDQELDINRLSDYDVDHIVPQSFLKDDSIDNKVLTRSDKARGKSDNVPSEEVVKKMKNYWRQLLNAKLITQRKFDNLTKAERGGLSELDKAGFIKRQLVETRQITKHVAQILDSRMNTKYDENDKLIREVKVITLKSKLVSDFRKDFQFYKVREINNYHHAHDAYLNAVVGTALIKKYPKLESEFVYGDYKVYDVRKMIAKSEQEIGKATAKYFFYSNIMNFFKTEITLANGEIRKRPLIETNGETGEIVWDKGRDFATVRKVLSMPQVNIVKKTEVQTGGFSKESILPKRNSDKLIARKKDWDPKKYGGFDSPTVAYSVLVVAKVEKGKSKKLKSVKELLGITIMERSSFEKNPIDFLEAKGYKEVKKDLIIKLPKYSLFELENGRKRMLASAGELQKGNELALPSKYVNFLYLASHYEKLKGSPEDNEQKQLFVEQHKHYLDEIIEQISEFSKRVILADANLDKVLSAYNKHRDKPIREQAENIIHLFTLTNLGAPAAFKYFDTTIDRKRYTSTKEVLDATLIHQSITGLYETRIDLSQLGGDGGPAPAPAPAPGGTVSLQDEHRLFDIPVTTSLPDVWLQDFPQAWAETGGLGRAKCQAPIIIDLKPTAVPVSIKQYPMSLEAHMGIRQHIIKFLELGVLRPCRSPWNTPLLPVKKPGTQDYRPVQDLREINKRTVDIHPTVPNPYNLLSTLKPDYSWYTVLDLKDAFFCLPLAPQSQELFAFEWKDPERGISGQLTWTRLPQGFKNSPTLFNEALHRDLTDFRTQHPEVTLLQYVDDLLLAAPTKKACTQGTRHLLQELGEKGYRASAKKAQICQTKVTYLGYILSEGKRWLTPGRIETVARIPPPRNPREVREFLGKAGFCRLFIPGFAELAAPLYALTKPSTPFTWQTEHQLAFEALKKALLSAPALGLPDTSKPFTLFLDERQGIAKGVLTQKLGPWKRPVAYLSKKLDPVAAGWPPCLRIMAATAMLVKDSAKLTLGQPLTVITPHTLEAIVRQPPDRWITNARLTHYQALLLDTDRVQFGPPVTLNPATLLPVPENQPSPHDCRQVLAETHGTREDLKDQELPDADHTWYTDGSSYLDSGTRRAGAAVVDGHNTIWAQSLPPGTSAQKAELIALTKALELSKGKKANIYTDSRYAFATAHTHGSIYERRGWLTSEGKEIKNKAEIIALLKALFLPQEVAIIHCPGHQKGQDPVAVGNRQADRVARQAAMAEVLTLATEPDNTSHITAGKRTADGSEFEKRTADGSEFESPKKKAKVE

SEQ ID NO: 1979 - protein, 2099 aa, synthetic construct
MPAAKRVKLDGGDKKYSIGLDIGTNSVGWAVITDEYKVPSKKFKVLGNTDRHSIKKNLIGALLFDSGETAEATRLKRTARRRYTRRKNRICYLQEIFSNEMAKVDDSFFHRLEESFLVEEDKKHERHPIFGNIVDEVAYHEKYPTIYHLRKKLVDSTDKADLRLIYLALAHMIKFRGHFLIEGDLNPDNSDVDKLFIQLVQTYNQLFEENPINASGVDAKAILSARLSKSRRLENLIAQLPGEKKNGLFGNLIALSLGLTPNFKSNFDLAEDAKLQLSKDTYDDDLDNLLAQIGDQYADLFLAAKNLSDAILLSDILRVNTEITKAPLSASMIKRYDEHHQDLTLLKALVRQQLPEKYKEIFFDQSKNGYAGYIDGGASQEEFYKFIKPILEKMDGTEELLVKLNREDLLRKQRTFDNGSIPHQIHLGELHAILRRQEDFYPFLKDNREKIEKILTFRIPYYVGPLARGNSRFAWMTRKSEETITPWNFEEVVDKGASAQSFIERMTNFDKNLPNEKVLPKHSLLYEYFTVYNELTKVKYVTEGMRKPAFLSGEQKKAIVDLLFKTNRKVTVKQLKEDYFKKIECFDSVEISGVEDRFNASLGTYHDLLKIIKDKDFLDNEENEDILEDIVLTLTLFEDREMIEERLKTYAHLFDDKVMKQLKRRRYTGWGRLSRKLINGIRDKQSGKTILDFLKSDGFANRNFMQLIHDDSLTFKEDIQKAQVSGQGDSLHEHIANLAGSPAIKKGILQTVKVVDELVKVMGRHKPENIVIEMARENQTTQKGQKNSRERMKRIEEGIKELGSQILKEHPVENTQLQNEKLYLYYLQNGRDMYVDQELDINRLSDYDVDHIVPQSFLKDDSIDNKVLTRSDKARGKSDNVPSEEVVKKMKNYWRQLLNAKLITQRKFDNLTKAERGGLSELDKAGFIKRQLVETRQITKHVAQILDSRMNTKYDENDKLIREVKVITLKSKLVSDFRKDFQFYKVREINNYHHAHDAYLNAVVGTALIKKYPKLESEFVYGDYKVYDVRKMIAKSEQEIGKATAKYFFYSNIMNFFKTEITLANGEIRKRPLIETNGETGEIVWDKGRDFATVRKVLSMPQVNIVKKTEVQTGGFSKESILPKRNSDKLIARKKDWDPKKYGGFDSPTVAYSVLVVAKVEKGKSKKLKSVKELLGITIMERSSFEKNPIDFLEAKGYKEVKKDLIIKLPKYSLFELENGRKRMLASAGELQKGNELALPSKYVNFLYLASHYEKLKGSPEDNEQKQLFVEQHKHYLDEIIEQISEFSKRVILADANLDKVLSAYNKHRDKPIREQAENIIHLFTLTNLGAPAAFKYFDTTIDRKRYTSTKEVLDATLIHQSITGLYETRIDLSQLGGDGGGGGGGGGGGGTVSLQDEHRLFDIPVTTSLPDVWLQDFPQAWAETGGLGRAKCQAPIIIDLKPTAVPVSIKQYPMSLEAHMGIRQHIIKFLELGVLRPCRSPWNTPLLPVKKPGTQDYRPVQDLREINKRTVDIHPTVPNPYNLLSTLKPDYSWYTVLDLKDAFFCLPLAPQSQELFAFEWKDPERGISGQLTWTRLPQGFKNSPTLFNEALHRDLTDFRTQHPEVTLLQYVDDLLLAAPTKKACTQGTRHLLQELGEKGYRASAKKAQICQTKVTYLGYILSEGKRWLTPGRIETVARIPPPRNPREVREFLGKAGFCRLFIPGFAELAAPLYALTKPSTPFTWQTEHQLAFEALKKALLSAPALGLPDTSKPFTLFLDERQGIAKGVLTQKLGPWKRPVAYLSKKLDPVAAGWPPCLRIMAATAMLVKDSAKLTLGQPLTVITPHTLEAIVRQPPDRWITNARLTHYQALLLDTDRVQFGPPVTLNPATLLPVPENQPSPHDCRQVLAETHGTREDLKDQELPDADHTWYTDGSSYLDSGTRRAGAAVVDGHNTIWAQSLPPGTSAQKAELIALTKALELSKGKKANIYTDSRYAFATAHTHGSIYERRGWLTSEGKEIKNKAEIIALLKALFLPQEVAIIHCPGHQKGQDPVAVGNRQADRVARQAAMAEVLTLATEPDNTSHITAGKRTADGSEFEKRTADGSEFESPKKKAKVE

SEQ ID NO: 1980 - protein, 2107 aa, synthetic construct
MPAAKRVKLDGGDKKYSIGLDIGTNSVGWAVITDEYKVPSKKFKVLGNTDRHSIKKNLIGALLFDSGETAEATRLKRTARRRYTRRKNRICYLQEIFSNEMAKVDDSFFHRLEESFLVEEDKKHERHPIFGNIVDEVAYHEKYPTIYHLRKKLVDSTDKADLRLIYLALAHMIKFRGHFLIEGDLNPDNSDVDKLFIQLVQTYNQLFEENPINASGVDAKAILSARLSKSRRLENLIAQLPGEKKNGLFGNLIALSLGLTPNFKSNFDLAEDAKLQLSKDTYDDDLDNLLAQIGDQYADLFLAAKNLSDAILLSDILRVNTEITKAPLSASMIKRYDEHHQDLTLLKALVRQQLPEKYKEIFFDQSKNGYAGYIDGGASQEEFYKFIKPILEKMDGTEELLVKLNREDLLRKQRTFDNGSIPHQIHLGELHAILRRQEDFYPFLKDNREKIEKILTFRIPYYVGPLARGNSRFAWMTRKSEETITPWNFEEVVDKGASAQSFIERMTNFDKNLPNEKVLPKHSLLYEYFTVYNELTKVKYVTEGMRKPAFLSGEQKKAIVDLLFKTNRKVTVKQLKEDYFKKIECFDSVEISGVEDRFNASLGTYHDLLKIIKDKDFLDNEENEDILEDIVLTLTLFEDREMIEERLKTYAHLFDDKVMKQLKRRRYTGWGRLSRKLINGIRDKQSGKTILDFLKSDGFANRNFMQLIHDDSLTFKEDIQKAQVSGQGDSLHEHIANLAGSPAIKKGILQTVKVVDELVKVMGRHKPENIVIEMARENQTTQKGQKNSRERMKRIEEGIKELGSQILKEHPVENTQLQNEKLYLYYLQNGRDMYVDQELDINRLSDYDVDHIVPQSFLKDDSIDNKVLTRSDKARGKSDNVPSEEVVKKMKNYWRQLLNAKLITQRKFDNLTKAERGGLSELDKAGFIKRQLVETRQITKHVAQILDSRMNTKYDENDKLIREVKVITLKSKLVSDFRKDFQFYKVREINNYHHAHDAYLNAVVGTALIKKYPKLESEFVYGDYKVYDVRKMIAKSEQEIGKATAKYFFYSNIMNFFKTEITLANGEIRKRPLIETNGETGEIVWDKGRDFATVRKVLSMPQVNIVKKTEVQTGGFSKESILPKRNSDKLIARKKDWDPKKYGGFDSPTVAYSVLVVAKVEKGKSKKLKSVKELLGITIMERSSFEKNPIDFLEAKGYKEVKKDLIIKLPKYSLFELENGRKRMLASAGELQKGNELALPSKYVNFLYLASHYEKLKGSPEDNEQKQLFVEQHKHYLDEIIEQISEFSKRVILADANLDKVLSAYNKHRDKPIREQAENIIHLFTLTNLGAPAAFKYFDTTIDRKRYTSTKEVLDATLIHQSITGLYETRIDLSQLGGDGGSGSETPGTSESATPESGGTVSLQDEHRLFDIPVTTSLPDVWLQDFPQAWAETGGLGRAKCQAPIIIDLKPTAVPVSIKQYPMSLEAHMGIRQHIIKFLELGVLRPCRSPWNTPLLPVKKPGTQDYRPVQDLREINKRTVDIHPTVPNPYNLLSTLKPDYSWYTVLDLKDAFFCLPLAPQSQELFAFEWKDPERGISGQLTWTRLPQGFKNSPTLFNEALHRDLTDFRTQHPEVTLLQYVDDLLLAAPTKKACTQGTRHLLQELGEKGYRASAKKAQICQTKVTYLGYILSEGKRWLTPGRIETVARIPPPRNPREVREFLGKAGFCRLFIPGFAELAAPLYALTKPSTPFTWQTEHQLAFEALKKALLSAPALGLPDTSKPFTLFLDERQGIAKGVLTQKLGPWKRPVAYLSKKLDPVAAGWPPCLRIMAATAMLVKDSAKLTLGQPLTVITPHTLEAIVRQPPDRWITNARLTHYQALLLDTDRVQFGPPVTLNPATLLPVPENQPSPHDCRQVLAETHGTREDLKDQELPDADHTWYTDGSSYLDSGTRRAGAAVVDGHNTIWAQSLPPGTSAQKAELIALTKALELSKGKKANIYTDSRYAFATAHTHGSIYERRGWLTSEGKEIKNKAEIIALLKALFLPQEVAIIHCPGHQKGQDPVAVGNRQADRVARQAAMAEVLTLATEPDNTSHITAGKRTADGSEFEKRTADGSEFESPKKKAKVE

SEQ ID NO: 1981 - protein, 2102 aa, synthetic construct
MPAAKRVKLDGGDKKYSIGLDIGTNSVGWAVITDEYKVPSKKFKVLGNTDRHSIKKNLIGALLFDSGETAEATRLKRTARRRYTRRKNRICYLQEIFSNEMAKVDDSFFHRLEESFLVEEDKKHERHPIFGNIVDEVAYHEKYPTIYHLRKKLVDSTDKADLRLIYLALAHMIKFRGHFLIEGDLNPDNSDVDKLFIQLVQTYNQLFEENPINASGVDAKAILSARLSKSRRLENLIAQLPGEKKNGLFGNLIALSLGLTPNFKSNFDLAEDAKLQLSKDTYDDDLDNLLAQIGDQYADLFLAAKNLSDAILLSDILRVNTEITKAPLSASMIKRYDEHHQDLTLLKALVRQQLPEKYKEIFFDQSKNGYAGYIDGGASQEEFYKFIKPILEKMDGTEELLVKLNREDLLRKQRTFDNGSIPHQIHLGELHAILRRQEDFYPFLKDNREKIEKILTFRIPYYVGPLARGNSRFAWMTRKSEETITPWNFEEVVDKGASAQSFIERMTNFDKNLPNEKVLPKHSLLYEYFTVYNELTKVKYVTEGMRKPAFLSGEQKKAIVDLLFKTNRKVTVKQLKEDYFKKIECFDSVEISGVEDRFNASLGTYHDLLKIIKDKDFLDNEENEDILEDIVLTLTLFEDREMIEERLKTYAHLFDDKVMKQLKRRRYTGWGRLSRKLINGIRDKQSGKTILDFLKSDGFANRNFMQLIHDDSLTFKEDIQKAQVSGQGDSLHEHIANLAGSPAIKKGILQTVKVVDELVKVMGRHKPENIVIEMARENQTTQKGQKNSRERMKRIEEGIKELGSQILKEHPVENTQLQNEKLYLYYLQNGRDMYVDQELDINRLSDYDVDHIVPQSFLKDDSIDNKVLTRSDKARGKSDNVPSEEVVKKMKNYWRQLLNAKLITQRKFDNLTKAERGGLSELDKAGFIKRQLVETRQITKHVAQILDSRMNTKYDENDKLIREVKVITLKSKLVSDFRKDFQFYKVREINNYHHAHDAYLNAVVGTALIKKYPKLESEFVYGDYKVYDVRKMIAKSEQEIGKATAKYFFYSNIMNFFKTEITLANGEIRKRPLIETNGETGEIVWDKGRDFATVRKVLSMPQVNIVKKTEVQTGGFSKESILPKRNSDKLIARKKDWDPKKYGGFDSPTVAYSVLVVAKVEKGKSKKLKSVKELLGITIMERSSFEKNPIDFLEAKGYKEVKKDLIIKLPKYSLFELENGRKRMLASAGELQKGNELALPSKYVNFLYLASHYEKLKGSPEDNEQKQLFVEQHKHYLDEIIEQISEFSKRVILADANLDKVLSAYNKHRDKPIREQAENIIHLFTLTNLGAPAAFKYFDTTIDRKRYTSTKEVLDATLIHQSITGLYETRIDLSQLGGDGGGSSPAPEAAAKGGTVSLQDEHRLFDIPVTTSLPDVWLQDFPQAWAETGGLGRAKCQAPIIIDLKPTAVPVSIKQYPMSLEAHMGIRQHIIKFLELGVLRPCRSPWNTPLLPVKKPGTQDYRPVQDLREINKRTVDIHPTVPNPYNLLSTLKPDYSWYTVLDLKDAFFCLPLAPQSQELFAFEWKDPERGISGQLTWTRLPQGFKNSPTLFNEALHRDLTDFRTQHPEVTLLQYVDDLLLAAPTKKACTQGTRHLLQELGEKGYRASAKKAQICQTKVTYLGYILSEGKRWLTPGRIETVARIPPPRNPREVREFLGKAGFCRLFIPGFAELAAPLYALTKPSTPFTWQTEHQLAFEALKKALLSAPALGLPDTSKPFTLFLDERQGIAKGVLTQKLGPWKRPVAYLSKKLDPVAAGWPPCLRIMAATAMLVKDSAKLTLGQPLTVITPHTLEAIVRQPPDRWITNARLTHYQALLLDTDRVQFGPPVTLNPATLLPVPENQPSPHDCRQVLAETHGTREDLKDQELPDADHTWYTDGSSYLDSGTRRAGAAVVDGHNTIWAQSLPPGTSAQKAELIALTKALELSKGKKANIYTDSRYAFATAHTHGSIYERRGWLTSEGKEIKNKAEIIALLKALFLPQEVAIIHCPGHQKGQDPVAVGNRQADRVARQAAMAEVLTLATEPDNTSHITAGKRTADGSEFEKRTADGSEFESPKKKAKVE

SEQ ID NO: 1982 - protein, 2100 aa, synthetic construct
MPAAKRVKLDGGDKKYSIGLDIGTNSVGWAVITDEYKVPSKKFKVLGNTDRHSIKKNLIGALLFDSGETAEATRLKRTARRRYTRRKNRICYLQEIFSNEMAKVDDSFFHRLEESFLVEEDKKHERHPIFGNIVDEVAYHEKYPTIYHLRKKLVDSTDKADLRLIYLALAHMIKFRGHFLIEGDLNPDNSDVDKLFIQLVQTYNQLFEENPINASGVDAKAILSARLSKSRRLENLIAQLPGEKKNGLFGNLIALSLGLTPNFKSNFDLAEDAKLQLSKDTYDDDLDNLLAQIGDQYADLFLAAKNLSDAILLSDILRVNTEITKAPLSASMIKRYDEHHQDLTLLKALVRQQLPEKYKEIFFDQSKNGYAGYIDGGASQEEFYKFIKPILEKMDGTEELLVKLNREDLLRKQRTFDNGSIPHQIHLGELHAILRRQEDFYPFLKDNREKIEKILTFRIPYYVGPLARGNSRFAWMTRKSEETITPWNFEEVVDKGASAQSFIERMTNFDKNLPNEKVLPKHSLLYEYFTVYNELTKVKYVTEGMRKPAFLSGEQKKAIVDLLFKTNRKVTVKQLKEDYFKKIECFDSVEISGVEDRFNASLGTYHDLLKIIKDKDFLDNEENEDILEDIVLTLTLFEDREMIEERLKTYAHLFDDKVMKQLKRRRYTGWGRLSRKLINGIRDKQSGKTILDFLKSDGFANRNFMQLIHDDSLTFKEDIQKAQVSGQGDSLHEHIANLAGSPAIKKGILQTVKVVDELVKVMGRHKPENIVIEMARENQTTQKGQKNSRERMKRIEEGIKELGSQILKEHPVENTQLQNEKLYLYYLQNGRDMYVDQELDINRLSDYDVDHIVPQSFLKDDSIDNKVLTRSDKARGKSDNVPSEEVVKKMKNYWRQLLNAKLITQRKFDNLTKAERGGLSELDKAGFIKRQLVETRQITKHVAQILDSRMNTKYDENDKLIREVKVITLKSKLVSDFRKDFQFYKVREINNYHHAHDAYLNAVVGTALIKKYPKLESEFVYGDYKVYDVRKMIAKSEQEIGKATAKYFFYSNIMNFFKTEITLANGEIRKRPLIETNGETGEIVWDKGRDFATVRKVLSMPQVNIVKKTEVQTGGFSKESILPKRNSDKLIARKKDWDPKKYGGFDSPTVAYSVLVVAKVEKGKSKKLKSVKELLGITIMERSSFEKNPIDFLEAKGYKEVKKDLIIKLPKYSLFELENGRKRMLASAGELQKGNELALPSKYVNFLYLASHYEKLKGSPEDNEQKQLFVEQHKHYLDEIIEQISEFSKRVILADANLDKVLSAYNKHRDKPIREQAENIIHLFTLTNLGAPAAFKYFDTTIDRKRYTSTKEVLDATLIHQSITGLYETRIDLSQLGGDGGGSSGGGGGSGGTVSLQDEHRLFDIPVTTSLPDVWLQDFPQAWAETGGLGRAKCQAPIIIDLKPTAVPVSIKQYPMSLEAHMGIRQHIIKFLELGVLRPCRSPWNTPLLPVKKPGTQDYRPVQDLREINKRTVDIHPTVPNPYNLLSTLKPDYSWYTVLDLKDAFFCLPLAPQSQELFAFEWKDPERGISGQLTWTRLPQGFKNSPTLFNEALHRDLTDFRTQHPEVTLLQYVDDLLLAAPTKKACTQGTRHLLQELGEKGYRASAKKAQICQTKVTYLGYILSEGKRWLTPGRIETVARIPPPRNPREVREFLGKAGFCRLFIPGFAELAAPLYALTKPSTPFTWQTEHQLAFEALKKALLSAPALGLPDTSKPFTLFLDERQGIAKGVLTQKLGPWKRPVAYLSKKLDPVAAGWPPCLRIMAATAMLVKDSAKLTLGQPLTVITPHTLEAIVRQPPDRWITNARLTHYQALLLDTDRVQFGPPVTLNPATLLPVPENQPSPHDCRQVLAETHGTREDLKDQELPDADHTWYTDGSSYLDSGTRRAGAAVVDGHNTIWAQSLPPGTSAQKAELIALTKALELSKGKKANIYTDSRYAFATAHTHGSIYERRGWLTSEGKEIKNKAEIIALLKALFLPQEVAIIHCPGHQKGQDPVAVGNRQADRVARQAAMAEVLTLATEPDNTSHITAGKRTADGSEFEKRTADGSEFESPKKKAKVE

SEQ ID NO: 1983 - protein, 2097 aa, synthetic construct
MPAAKRVKLDGGDKKYSIGLDIGTNSVGWAVITDEYKVPSKKFKVLGNTDRHSIKKNLIGALLFDSGETAEATRLKRTARRRYTRRKNRICYLQEIFSNEMAKVDDSFFHRLEESFLVEEDKKHERHPIFGNIVDEVAYHEKYPTIYHLRKKLVDSTDKADLRLIYLALAHMIKFRGHFLIEGDLNPDNSDVDKLFIQLVQTYNQLFEENPINASGVDAKAILSARLSKSRRLENLIAQLPGEKKNGLFGNLIALSLGLTPNFKSNFDLAEDAKLQLSKDTYDDDLDNLLAQIGDQYADLFLAAKNLSDAILLSDILRVNTEITKAPLSASMIKRYDEHHQDLTLLKALVRQQLPEKYKEIFFDQSKNGYAGYIDGGASQEEFYKFIKPILEKMDGTEELLVKLNREDLLRKQRTFDNGSIPHQIHLGELHAILRRQEDFYPFLKDNREKIEKILTFRIPYYVGPLARGNSRFAWMTRKSEETITPWNFEEVVDKGASAQSFIERMTNFDKNLPNEKVLPKHSLLYEYFTVYNELTKVKYVTEGMRKPAFLSGEQKKAIVDLLFKTNRKVTVKQLKEDYFKKIECFDSVEISGVEDRFNASLGTYHDLLKIIKDKDFLDNEENEDILEDIVLTLTLFEDREMIEERLKTYAHLFDDKVMKQLKRRRYTGWGRLSRKLINGIRDKQSGKTILDFLKSDGFANRNFMQLIHDDSLTFKEDIQKAQVSGQGDSLHEHIANLAGSPAIKKGILQTVKVVDELVKVMGRHKPENIVIEMARENQTTQKGQKNSRERMKRIEEGIKELGSQILKEHPVENTQLQNEKLYLYYLQNGRDMYVDQELDINRLSDYDVDHIVPQSFLKDDSIDNKVLTRSDKARGKSDNVPSEEVVKKMKNYWRQLLNAKLITQRKFDNLTKAERGGLSELDKAGFIKRQLVETRQITKHVAQILDSRMNTKYDENDKLIREVKVITLKSKLVSDFRKDFQFYKVREINNYHHAHDAYLNAVVGTALIKKYPKLESEFVYGDYKVYDVRKMIAKSEQEIGKATAKYFFYSNIMNFFKTEITLANGEIRKRPLIETNGETGEIVWDKGRDFATVRKVLSMPQVNIVKKTEVQTGGFSKESILPKRNSDKLIARKKDWDPKKYGGFDSPTVAYSVLVVAKVEKGKSKKLKSVKELLGITIMERSSFEKNPIDFLEAKGYKEVKKDLIIKLPKYSLFELENGRKRMLASAGELQKGNELALPSKYVNFLYLASHYEKLKGSPEDNEQKQLFVEQHKHYLDEIIEQISEFSKRVILADANLDKVLSAYNKHRDKPIREQAENIIHLFTLTNLGAPAAFKYFDTTIDRKRYTSTKEVLDATLIHQSITGLYETRIDLSQLGGDGGPAPGGGGGTVSLQDEHRLFDIPVTTSLPDVWLQDFPQAWAETGGLGRAKCQAPIIIDLKPTAVPVSIKQYPMSLEAHMGIRQHIIKFLELGVLRPCRSPWNTPLLPVKKPGTQDYRPVQDLREINKRTVDIHPTVPNPYNLLSTLKPDYSWYTVLDLKDAFFCLPLAPQSQELFAFEWKDPERGISGQLTWTRLPQGFKNSPTLFNEALHRDLTDFRTQHPEVTLLQYVDDLLLAAPTKKACTQGTRHLLQELGEKGYRASAKKAQICQTKVTYLGYILSEGKRWLTPGRIETVARIPPPRNPREVREFLGKAGFCRLFIPGFAELAAPLYALTKPSTPFTWQTEHQLAFEALKKALLSAPALGLPDTSKPFTLFLDERQGIAKGVLTQKLGPWKRPVAYLSKKLDPVAAGWPPCLRIMAATAMLVKDSAKLTLGQPLTVITPHTLEAIVRQPPDRWITNARLTHYQALLLDTDRVQFGPPVTLNPATLLPVPENQPSPHDCRQVLAETHGTREDLKDQELPDADHTWYTDGSSYLDSGTRRAGAAVVDGHNTIWAQSLPPGTSAQKAELIALTKALELSKGKKANIYTDSRYAFATAHTHGSIYERRGWLTSEGKEIKNKAEIIALLKALFLPQEVAIIHCPGHQKGQDPVAVGNRQADRVARQAAMAEVLTLATEPDNTSHITAGKRTADGSEFEKRTADGSEFESPKKKAKVE

SEQ ID NO: 1984 - protein, 2102 aa, synthetic construct
MPAAKRVKLDGGDKKYSIGLDIGTNSVGWAVITDEYKVPSKKFKVLGNTDRHSIKKNLIGALLFDSGETAEATRLKRTARRRYTRRKNRICYLQEIFSNEMAKVDDSFFHRLEESFLVEEDKKHERHPIFGNIVDEVAYHEKYPTIYHLRKKLVDSTDKADLRLIYLALAHMIKFRGHFLIEGDLNPDNSDVDKLFIQLVQTYNQLFEENPINASGVDAKAILSARLSKSRRLENLIAQLPGEKKNGLFGNLIALSLGLTPNFKSNFDLAEDAKLQLSKDTYDDDLDNLLAQIGDQYADLFLAAKNLSDAILLSDILRVNTEITKAPLSASMIKRYDEHHQDLTLLKALVRQQLPEKYKEIFFDQSKNGYAGYIDGGASQEEFYKFIKPILEKMDGTEELLVKLNREDLLRKQRTFDNGSIPHQIHLGELHAILRRQEDFYPFLKDNREKIEKILTFRIPYYVGPLARGNSRFAWMTRKSEETITPWNFEEVVDKGASAQSFIERMTNFDKNLPNEKVLPKHSLLYEYFTVYNELTKVKYVTEGMRKPAFLSGEQKKAIVDLLFKTNRKVTVKQLKEDYFKKIECFDSVEISGVEDRFNASLGTYHDLLKIIKDKDFLDNEENEDILEDIVLTLTLFEDREMIEERLKTYAHLFDDKVMKQLKRRRYTGWGRLSRKLINGIRDKQSGKTILDFLKSDGFANRNFMQLIHDDSLTFKEDIQKAQVSGQGDSLHEHIANLAGSPAIKKGILQTVKVVDELVKVMGRHKPENIVIEMARENQTTQKGQKNSRERMKRIEEGIKELGSQILKEHPVENTQLQNEKLYLYYLQNGRDMYVDQELDINRLSDYDVDHIVPQSFLKDDSIDNKVLTRSDKARGKSDNVPSEEVVKKMKNYWRQLLNAKLITQRKFDNLTKAERGGLSELDKAGFIKRQLVETRQITKHVAQILDSRMNTKYDENDKLIREVKVITLKSKLVSDFRKDFQFYKVREINNYHHAHDAYLNAVVGTALIKKYPKLESEFVYGDYKVYDVRKMIAKSEQEIGKATAKYFFYSNIMNFFKTEITLANGEIRKRPLIETNGETGEIVWDKGRDFATVRKVLSMPQVNIVKKTEVQTGGFSKESILPKRNSDKLIARKKDWDPKKYGGFDSPTVAYSVLVVAKVEKGKSKKLKSVKELLGITIMERSSFEKNPIDFLEAKGYKEVKKDLIIKLPKYSLFELENGRKRMLASAGELQKGNELALPSKYVNFLYLASHYEKLKGSPEDNEQKQLFVEQHKHYLDEIIEQISEFSKRVILADANLDKVLSAYNKHRDKPIREQAENIIHLFTLTNLGAPAAFKYFDTTIDRKRYTSTKEVLDATLIHQSITGLYETRIDLSQLGGDGGGGSEAAAKGGGGGTVSLQDEHRLFDIPVTTSLPDVWLQDFPQAWAETGGLGRAKCQAPIIIDLKPTAVPVSIKQYPMSLEAHMGIRQHIIKFLELGVLRPCRSPWNTPLLPVKKPGTQDYRPVQDLREINKRTVDIHPTVPNPYNLLSTLKPDYSWYTVLDLKDAFFCLPLAPQSQELFAFEWKDPERGISGQLTWTRLPQGFKNSPTLFNEALHRDLTDFRTQHPEVTLLQYVDDLLLAAPTKKACTQGTRHLLQELGEKGYRASAKKAQICQTKVTYLGYILSEGKRWLTPGRIETVARIPPPRNPREVREFLGKAGFCRLFIPGFAELAAPLYALTKPSTPFTWQTEHQLAFEALKKALLSAPALGLPDTSKPFTLFLDERQGIAKGVLTQKLGPWKRPVAYLSKKLDPVAAGWPPCLRIMAATAMLVKDSAKLTLGQPLTVITPHTLEAIVRQPPDRWITNARLTHYQALLLDTDRVQFGPPVTLNPATLLPVPENQPSPHDCRQVLAETHGTREDLKDQELPDADHTWYTDGSSYLDSGTRRAGAAVVDGHNTIWAQSLPPGTSAQKAELIALTKALELSKGKKANIYTDSRYAFATAHTHGSIYERRGWLTSEGKEIKNKAEIIALLKALFLPQEVAIIHCPGHQKGQDPVAVGNRQADRVARQAAMAEVLTLATEPDNTSHITAGKRTADGSEFEKRTADGSEFESPKKKAKVE

SEQ ID NO: 1985 - protein, 2100 aa, synthetic construct
MPAAKRVKLDGGDKKYSIGLDIGTNSVGWAVITDEYKVPSKKFKVLGNTDRHSIKKNLIGALLFDSGETAEATRLKRTARRRYTRRKNRICYLQEIFSNEMAKVDDSFFHRLEESFLVEEDKKHERHPIFGNIVDEVAYHEKYPTIYHLRKKLVDSTDKADLRLIYLALAHMIKFRGHFLIEGDLNPDNSDVDKLFIQLVQTYNQLFEENPINASGVDAKAILSARLSKSRRLENLIAQLPGEKKNGLFGNLIALSLGLTPNFKSNFDLAEDAKLQLSKDTYDDDLDNLLAQIGDQYADLFLAAKNLSDAILLSDILRVNTEITKAPLSASMIKRYDEHHQDLTLLKALVRQQLPEKYKEIFFDQSKNGYAGYIDGGASQEEFYKFIKPILEKMDGTEELLVKLNREDLLRKQRTFDNGSIPHQIHLGELHAILRRQEDFYPFLKDNREKIEKILTFRIPYYVGPLARGNSRFAWMTRKSEETITPWNFEEVVDKGASAQSFIERMTNFDKNLPNEKVLPKHSLLYEYFTVYNELTKVKYVTEGMRKPAFLSGEQKKAIVDLLFKTNRKVTVKQLKEDYFKKIECFDSVEISGVEDRFNASLGTYHDLLKIIKDKDFLDNEENEDILEDIVLTLTLFEDREMIEERLKTYAHLFDDKVMKQLKRRRYTGWGRLSRKLINGIRDKQSGKTILDFLKSDGFANRNFMQLIHDDSLTFKEDIQKAQVSGQGDSLHEHIANLAGSPAIKKGILQTVKVVDELVKVMGRHKPENIVIEMARENQTTQKGQKNSRERMKRIEEGIKELGSQILKEHPVENTQLQNEKLYLYYLQNGRDMYVDQELDINRLSDYDVDHIVPQSFLKDDSIDNKVLTRSDKARGKSDNVPSEEVVKKMKNYWRQLLNAKLITQRKFDNLTKAERGGLSELDKAGFIKRQLVETRQITKHVAQILDSRMNTKYDENDKLIREVKVITLKSKLVSDFRKDFQFYKVREINNYHHAHDAYLNAVVGTALIKKYPKLESEFVYGDYKVYDVRKMIAKSEQEIGKATAKYFFYSNIMNFFKTEITLANGEIRKRPLIETNGETGEIVWDKGRDFATVRKVLSMPQVNIVKKTEVQTGGFSKESILPKRNSDKLIARKKDWDPKKYGGFDSPTVAYSVLVVAKVEKGKSKKLKSVKELLGITIMERSSFEKNPIDFLEAKGYKEVKKDLIIKLPKYSLFELENGRKRMLASAGELQKGNELALPSKYVNFLYLASHYEKLKGSPEDNEQKQLFVEQHKHYLDEIIEQISEFSKRVILADANLDKVLSAYNKHRDKPIREQAENIIHLFTLTNLGAPAAFKYFDTTIDRKRYTSTKEVLDATLIHQSITGLYETRIDLSQLGGDGGGSSPAPGGSGGTVSLQDEHRLFDIPVTTSLPDVWLQDFPQAWAETGGLGRAKCQAPIIIDLKPTAVPVSIKQYPMSLEAHMGIRQHIIKFLELGVLRPCRSPWNTPLLPVKKPGTQDYRPVQDLREINKRTVDIHPTVPNPYNLLSTLKPDYSWYTVLDLKDAFFCLPLAPQSQELFAFEWKDPERGISGQLTWTRLPQGFKNSPTLFNEALHRDLTDFRTQHPEVTLLQYVDDLLLAAPTKKACTQGTRHLLQELGEKGYRASAKKAQICQTKVTYLGYILSEGKRWLTPGRIETVARIPPPRNPREVREFLGKAGFCRLFIPGFAELAAPLYALTKPSTPFTWQTEHQLAFEALKKALLSAPALGLPDTSKPFTLFLDERQGIAKGVLTQKLGPWKRPVAYLSKKLDPVAAGWPPCLRIMAATAMLVKDSAKLTLGQPLTVITPHTLEAIVRQPPDRWITNARLTHYQALLLDTDRVQFGPPVTLNPATLLPVPENQPSPHDCRQVLAETHGTREDLKDQELPDADHTWYTDGSSYLDSGTRRAGAAVVDGHNTIWAQSLPPGTSAQKAELIALTKALELSKGKKANIYTDSRYAFATAHTHGSIYERRGWLTSEGKEIKNKAEIIALLKALFLPQEVAIIHCPGHQKGQDPVAVGNRQADRVARQAAMAEVLTLATEPDNTSHITAGKRTADGSEFEKRTADGSEFESPKKKAKVE

SEQ ID NO: 1986 - protein, 2099 aa, synthetic construct
MPAAKRVKLDGGDKKYSIGLDIGTNSVGWAVITDEYKVPSKKFKVLGNTDRHSIKKNLIGALLFDSGETAEATRLKRTARRRYTRRKNRICYLQEIFSNEMAKVDDSFFHRLEESFLVEEDKKHERHPIFGNIVDEVAYHEKYPTIYHLRKKLVDSTDKADLRLIYLALAHMIKFRGHFLIEGDLNPDNSDVDKLFIQLVQTYNQLFEENPINASGVDAKAILSARLSKSRRLENLIAQLPGEKKNGLFGNLIALSLGLTPNFKSNFDLAEDAKLQLSKDTYDDDLDNLLAQIGDQYADLFLAAKNLSDAILLSDILRVNTEITKAPLSASMIKRYDEHHQDLTLLKALVRQQLPEKYKEIFFDQSKNGYAGYIDGGASQEEFYKFIKPILEKMDGTEELLVKLNREDLLRKQRTFDNGSIPHQIHLGELHAILRRQEDFYPFLKDNREKIEKILTFRIPYYVGPLARGNSRFAWMTRKSEETITPWNFEEVVDKGASAQSFIERMTNFDKNLPNEKVLPKHSLLYEYFTVYNELTKVKYVTEGMRKPAFLSGEQKKAIVDLLFKTNRKVTVKQLKEDYFKKIECFDSVEISGVEDRFNASLGTYHDLLKIIKDKDFLDNEENEDILEDIVLTLTLFEDREMIEERLKTYAHLFDDKVMKQLKRRRYTGWGRLSRKLINGIRDKQSGKTILDFLKSDGFANRNFMQLIHDDSLTFKEDIQKAQVSGQGDSLHEHIANLAGSPAIKKGILQTVKVVDELVKVMGRHKPENIVIEMARENQTTQKGQKNSRERMKRIEEGIKELGSQILKEHPVENTQLQNEKLYLYYLQNGRDMYVDQELDINRLSDYDVDHIVPQSFLKDDSIDNKVLTRSDKARGKSDNVPSEEVVKKMKNYWRQLLNAKLITQRKFDNLTKAERGGLSELDKAGFIKRQLVETRQITKHVAQILDSRMNTKYDENDKLIREVKVITLKSKLVSDFRKDFQFYKVREINNYHHAHDAYLNAVVGTALIKKYPKLESEFVYGDYKVYDVRKMIAKSEQEIGKATAKYFFYSNIMNFFKTEITLANGEIRKRPLIETNGETGEIVWDKGRDFATVRKVLSMPQVNIVKKTEVQTGGFSKESILPKRNSDKLIARKKDWDPKKYGGFDSPTVAYSVLVVAKVEKGKSKKLKSVKELLGITIMERSSFEKNPIDFLEAKGYKEVKKDLIIKLPKYSLFELENGRKRMLASAGELQKGNELALPSKYVNFLYLASHYEKLKGSPEDNEQKQLFVEQHKHYLDEIIEQISEFSKRVILADANLDKVLSAYNKHRDKPIREQAENIIHLFTLTNLGAPAAFKYFDTTIDRKRYTSTKEVLDATLIHQSITGLYETRIDLSQLGGDGGEAAAKGGGGGTVSLQDEHRLFDIPVTTSLPDVWLQDFPQAWAETGGLGRAKCQAPIIIDLKPTAVPVSIKQYPMSLEAHMGIRQHIIKFLELGVLRPCRSPWNTPLLPVKKPGTQDYRPVQDLREINKRTVDIHPTVPNPYNLLSTLKPDYSWYTVLDLKDAFFCLPLAPQSQELFAFEWKDPERGISGQLTWTRLPQGFKNSPTLFNEALHRDLTDFRTQHPEVTLLQYVDDLLLAAPTKKACTQGTRHLLQELGEKGYRASAKKAQICQTKVTYLGYILSEGKRWLTPGRIETVARIPPPRNPREVREFLGKAGFCRLFIPGFAELAAPLYALTKPSTPFTWQTEHQLAFEALKKALLSAPALGLPDTSKPFTLFLDERQGIAKGVLTQKLGPWKRPVAYLSKKLDPVAAGWPPCLRIMAATAMLVKDSAKLTLGQPLTVITPHTLEAIVRQPPDRWITNARLTHYQALLLDTDRVQFGPPVTLNPATLLPVPENQPSPHDCRQVLAETHGTREDLKDQELPDADHTWYTDGSSYLDSGTRRAGAAVVDGHNTIWAQSLPPGTSAQKAELIALTKALELSKGKKANIYTDSRYAFATAHTHGSIYERRGWLTSEGKEIKNKAEIIALLKALFLPQEVAIIHCPGHQKGQDPVAVGNRQADRVARQAAMAEVLTLATEPDNTSHITAGKRTADGSEFEKRTADGSEFESPKKKAKVE

SEQ ID NO: 1987 - protein, 2106 aa, synthetic construct
MPAAKRVKLDGGDKKYSIGLDIGTNSVGWAVITDEYKVPSKKFKVLGNTDRHSIKKNLIGALLFDSGETAEATRLKRTARRRYTRRKNRICYLQEIFSNEMAKVDDSFFHRLEESFLVEEDKKHERHPIFGNIVDEVAYHEKYPTIYHLRKKLVDSTDKADLRLIYLALAHMIKFRGHFLIEGDLNPDNSDVDKLFIQLVQTYNQLFEENPINASGVDAKAILSARLSKSRRLENLIAQLPGEKKNGLFGNLIALSLGLTPNFKSNFDLAEDAKLQLSKDTYDDDLDNLLAQIGDQYADLFLAAKNLSDAILLSDILRVNTEITKAPLSASMIKRYDEHHQDLTLLKALVRQQLPEKYKEIFFDQSKNGYAGYIDGGASQEEFYKFIKPILEKMDGTEELLVKLNREDLLRKQRTFDNGSIPHQIHLGELHAILRRQEDFYPFLKDNREKIEKILTFRIPYYVGPLARGNSRFAWMTRKSEETITPWNFEEVVDKGASAQSFIERMTNFDKNLPNEKVLPKHSLLYEYFTVYNELTKVKYVTEGMRKPAFLSGEQKKAIVDLLFKTNRKVTVKQLKEDYFKKIECFDSVEISGVEDRFNASLGTYHDLLKIIKDKDFLDNEENEDILEDIVLTLTLFEDREMIEERLKTYAHLFDDKVMKQLKRRRYTGWGRLSRKLINGIRDKQSGKTILDFLKSDGFANRNFMQLIHDDSLTFKEDIQKAQVSGQGDSLHEHIANLAGSPAIKKGILQTVKVVDELVKVMGRHKPENIVIEMARENQTTQKGQKNSRERMKRIEEGIKELGSQILKEHPVENTQLQNEKLYLYYLQNGRDMYVDQELDINRLSDYDVDHIVPQSFLKDDSIDNKVLTRSDKARGKSDNVPSEEVVKKMKNYWRQLLNAKLITQRKFDNLTKAERGGLSELDKAGFIKRQLVETRQITKHVAQILDSRMNTKYDENDKLIREVKVITLKSKLVSDFRKDFQFYKVREINNYHHAHDAYLNAVVGTALIKKYPKLESEFVYGDYKVYDVRKMIAKSEQEIGKATAKYFFYSNIMNFFKTEITLANGEIRKRPLIETNGETGEIVWDKGRDFATVRKVLSMPQVNIVKKTEVQTGGFSKESILPKRNSDKLIARKKDWDPKKYGGFDSPTVAYSVLVVAKVEKGKSKKLKSVKELLGITIMERSSFEKNPIDFLEAKGYKEVKKDLIIKLPKYSLFELENGRKRMLASAGELQKGNELALPSKYVNFLYLASHYEKLKGSPEDNEQKQLFVEQHKHYLDEIIEQISEFSKRVILADANLDKVLSAYNKHRDKPIREQAENIIHLFTLTNLGAPAAFKYFDTTIDRKRYTSTKEVLDATLIHQSITGLYETRIDLSQLGGDGGGGGGSGGGGSGGGGSGGTVSLQDEHRLFDIPVTTSLPDVWLQDFPQAWAETGGLGRAKCQAPIIIDLKPTAVPVSIKQYPMSLEAHMGIRQHIIKFLELGVLRPCRSPWNTPLLPVKKPGTQDYRPVQDLREINKRTVDIHPTVPNPYNLLSTLKPDYSWYTVLDLKDAFFCLPLAPQSQELFAFEWKDPERGISGQLTWTRLPQGFKNSPTLFNEALHRDLTDFRTQHPEVTLLQYVDDLLLAAPTKKACTQGTRHLLQELGEKGYRASAKKAQICQTKVTYLGYILSEGKRWLTPGRIETVARIPPPRNPREVREFLGKAGFCRLFIPGFAELAAPLYALTKPSTPFTWQTEHQLAFEALKKALLSAPALGLPDTSKPFTLFLDERQGIAKGVLTQKLGPWKRPVAYLSKKLDPVAAGWPPCLRIMAATAMLVKDSAKLTLGQPLTVITPHTLEAIVRQPPDRWITNARLTHYQALLLDTDRVQFGPPVTLNPATLLPVPENQPSPHDCRQVLAETHGTREDLKDQELPDADHTWYTDGSSYLDSGTRRAGAAVVDGHNTIWAQSLPPGTSAQKAELIALTKALELSKGKKANIYTDSRYAFATAHTHGSIYERRGWLTSEGKEIKNKAEIIALLKALFLPQEVAIIHCPGHQKGQDPVAVGNRQADRVARQAAMAEVLTLATEPDNTSHITAGKRTADGSEFEKRTADGSEFESPKKKAKVE

SEQ ID NO: 1988 - protein, 2100 aa, synthetic construct
MPAAKRVKLDGGDKKYSIGLDIGTNSVGWAVITDEYKVPSKKFKVLGNTDRHSIKKNLIGALLFDSGETAEATRLKRTARRRYTRRKNRICYLQEIFSNEMAKVDDSFFHRLEESFLVEEDKKHERHPIFGNIVDEVAYHEKYPTIYHLRKKLVDSTDKADLRLIYLALAHMIKFRGHFLIEGDLNPDNSDVDKLFIQLVQTYNQLFEENPINASGVDAKAILSARLSKSRRLENLIAQLPGEKKNGLFGNLIALSLGLTPNFKSNFDLAEDAKLQLSKDTYDDDLDNLLAQIGDQYADLFLAAKNLSDAILLSDILRVNTEITKAPLSASMIKRYDEHHQDLTLLKALVRQQLPEKYKEIFFDQSKNGYAGYIDGGASQEEFYKFIKPILEKMDGTEELLVKLNREDLLRKQRTFDNGSIPHQIHLGELHAILRRQEDFYPFLKDNREKIEKILTFRIPYYVGPLARGNSRFAWMTRKSEETITPWNFEEVVDKGASAQSFIERMTNFDKNLPNEKVLPKHSLLYEYFTVYNELTKVKYVTEGMRKPAFLSGEQKKAIVDLLFKTNRKVTVKQLKEDYFKKIECFDSVEISGVEDRFNASLGTYHDLLKIIKDKDFLDNEENEDILEDIVLTLTLFEDREMIEERLKTYAHLFDDKVMKQLKRRRYTGWGRLSRKLINGIRDKQSGKTILDFLKSDGFANRNFMQLIHDDSLTFKEDIQKAQVSGQGDSLHEHIANLAGSPAIKKGILQTVKVVDELVKVMGRHKPENIVIEMARENQTTQKGQKNSRERMKRIEEGIKELGSQILKEHPVENTQLQNEKLYLYYLQNGRDMYVDQELDINRLSDYDVDHIVPQSFLKDDSIDNKVLTRSDKARGKSDNVPSEEVVKKMKNYWRQLLNAKLITQRKFDNLTKAERGGLSELDKAGFIKRQLVETRQITKHVAQILDSRMNTKYDENDKLIREVKVITLKSKLVSDFRKDFQFYKVREINNYHHAHDAYLNAVVGTALIKKYPKLESEFVYGDYKVYDVRKMIAKSEQEIGKATAKYFFYSNIMNFFKTEITLANGEIRKRPLIETNGETGEIVWDKGRDFATVRKVLSMPQVNIVKKTEVQTGGFSKESILPKRNSDKLIARKKDWDPKKYGGFDSPTVAYSVLVVAKVEKGKSKKLKSVKELLGITIMERSSFEKNPIDFLEAKGYKEVKKDLIIKLPKYSLFELENGRKRMLASAGELQKGNELALPSKYVNFLYLASHYEKLKGSPEDNEQKQLFVEQHKHYLDEIIEQISEFSKRVILADANLDKVLSAYNKHRDKPIREQAENIIHLFTLTNLGAPAAFKYFDTTIDRKRYTSTKEVLDATLIHQSITGLYETRIDLSQLGGDGGGGGPAPGSSGGTVSLQDEHRLFDIPVTTSLPDVWLQDFPQAWAETGGLGRAKCQAPIIIDLKPTAVPVSIKQYPMSLEAHMGIRQHIIKFLELGVLRPCRSPWNTPLLPVKKPGTQDYRPVQDLREINKRTVDIHPTVPNPYNLLSTLKPDYSWYTVLDLKDAFFCLPLAPQSQELFAFEWKDPERGISGQLTWTRLPQGFKNSPTLFNEALHRDLTDFRTQHPEVTLLQYVDDLLLAAPTKKACTQGTRHLLQELGEKGYRASAKKAQICQTKVTYLGYILSEGKRWLTPGRIETVARIPPPRNPREVREFLGKAGFCRLFIPGFAELAAPLYALTKPSTPFTWQTEHQLAFEALKKALLSAPALGLPDTSKPFTLFLDERQGIAKGVLTQKLGPWKRPVAYLSKKLDPVAAGWPPCLRIMAATAMLVKDSAKLTLGQPLTVITPHTLEAIVRQPPDRWITNARLTHYQALLLDTDRVQFGPPVTLNPATLLPVPENQPSPHDCRQVLAETHGTREDLKDQELPDADHTWYTDGSSYLDSGTRRAGAAVVDGHNTIWAQSLPPGTSAQKAELIALTKALELSKGKKANIYTDSRYAFATAHTHGSIYERRGWLTSEGKEIKNKAEIIALLKALFLPQEVAIIHCPGHQKGQDPVAVGNRQADRVARQAAMAEVLTLATEPDNTSHITAGKRTADGSEFEKRTADGSEFESPKKKAKVE

SEQ ID NO: 1989 - protein, 2102 aa, synthetic construct
MPAAKRVKLDGGDKKYSIGLDIGTNSVGWAVITDEYKVPSKKFKVLGNTDRHSIKKNLIGALLFDSGETAEATRLKRTARRRYTRRKNRICYLQEIFSNEMAKVDDSFFHRLEESFLVEEDKKHERHPIFGNIVDEVAYHEKYPTIYHLRKKLVDSTDKADLRLIYLALAHMIKFRGHFLIEGDLNPDNSDVDKLFIQLVQTYNQLFEENPINASGVDAKAILSARLSKSRRLENLIAQLPGEKKNGLFGNLIALSLGLTPNFKSNFDLAEDAKLQLSKDTYDDDLDNLLAQIGDQYADLFLAAKNLSDAILLSDILRVNTEITKAPLSASMIKRYDEHHQDLTLLKALVRQQLPEKYKEIFFDQSKNGYAGYIDGGASQEEFYKFIKPILEKMDGTEELLVKLNREDLLRKQRTFDNGSIPHQIHLGELHAILRRQEDFYPFLKDNREKIEKILTFRIPYYVGPLARGNSRFAWMTRKSEETITPWNFEEVVDKGASAQSFIERMTNFDKNLPNEKVLPKHSLLYEYFTVYNELTKVKYVTEGMRKPAFLSGEQKKAIVDLLFKTNRKVTVKQLKEDYFKKIECFDSVEISGVEDRFNASLGTYHDLLKIIKDKDFLDNEENEDILEDIVLTLTLFEDREMIEERLKTYAHLFDDKVMKQLKRRRYTGWGRLSRKLINGIRDKQSGKTILDFLKSDGFANRNFMQLIHDDSLTFKEDIQKAQVSGQGDSLHEHIANLAGSPAIKKGILQTVKVVDELVKVMGRHKPENIVIEMARENQTTQKGQKNSRERMKRIEEGIKELGSQILKEHPVENTQLQNEKLYLYYLQNGRDMYVDQELDINRLSDYDVDHIVPQSFLKDDSIDNKVLTRSDKARGKSDNVPSEEVVKKMKNYWRQLLNAKLITQRKFDNLTKAERGGLSELDKAGFIKRQLVETRQITKHVAQILDSRMNTKYDENDKLIREVKVITLKSKLVSDFRKDFQFYKVREINNYHHAHDAYLNAVVGTALIKKYPKLESEFVYGDYKVYDVRKMIAKSEQEIGKATAKYFFYSNIMNFFKTEITLANGEIRKRPLIETNGETGEIVWDKGRDFATVRKVLSMPQVNIVKKTEVQTGGFSKESILPKRNSDKLIARKKDWDPKKYGGFDSPTVAYSVLVVAKVEKGKSKKLKSVKELLGITIMERSSFEKNPIDFLEAKGYKEVKKDLIIKLPKYSLFELENGRKRMLASAGELQKGNELALPSKYVNFLYLASHYEKLKGSPEDNEQKQLFVEQHKHYLDEIIEQISEFSKRVILADANLDKVLSAYNKHRDKPIREQAENIIHLFTLTNLGAPAAFKYFDTTIDRKRYTSTKEVLDATLIHQSITGLYETRIDLSQLGGDGGGGSEAAAKPAPGGTVSLQDEHRLFDIPVTTSLPDVWLQDFPQAWAETGGLGRAKCQAPIIIDLKPTAVPVSIKQYPMSLEAHMGIRQHIIKFLELGVLRPCRSPWNTPLLPVKKPGTQDYRPVQDLREINKRTVDIHPTVPNPYNLLSTLKPDYSWYTVLDLKDAFFCLPLAPQSQELFAFEWKDPERGISGQLTWTRLPQGFKNSPTLFNEALHRDLTDFRTQHPEVTLLQYVDDLLLAAPTKKACTQGTRHLLQELGEKGYRASAKKAQICQTKVTYLGYILSEGKRWLTPGRIETVARIPPPRNPREVREFLGKAGFCRLFIPGFAELAAPLYALTKPSTPFTWQTEHQLAFEALKKALLSAPALGLPDTSKPFTLFLDERQGIAKGVLTQKLGPWKRPVAYLSKKLDPVAAGWPPCLRIMAATAMLVKDSAKLTLGQPLTVITPHTLEAIVRQPPDRWITNARLTHYQALLLDTDRVQFGPPVTLNPATLLPVPENQPSPHDCRQVLAETHGTREDLKDQELPDADHTWYTDGSSYLDSGTRRAGAAVVDGHNTIWAQSLPPGTSAQKAELIALTKALELSKGKKANIYTDSRYAFATAHTHGSIYERRGWLTSEGKEIKNKAEIIALLKALFLPQEVAIIHCPGHQKGQDPVAVGNRQADRVARQAAMAEVLTLATEPDNTSHITAGKRTADGSEFEKRTADGSEFESPKKKAKVE

SEQ ID NO: 1990 - protein, 2100 aa, synthetic construct
MPAAKRVKLDGGDKKYSIGLDIGTNSVGWAVITDEYKVPSKKFKVLGNTDRHSIKKNLIGALLFDSGETAEATRLKRTARRRYTRRKNRICYLQEIFSNEMAKVDDSFFHRLEESFLVEEDKKHERHPIFGNIVDEVAYHEKYPTIYHLRKKLVDSTDKADLRLIYLALAHMIKFRGHFLIEGDLNPDNSDVDKLFIQLVQTYNQLFEENPINASGVDAKAILSARLSKSRRLENLIAQLPGEKKNGLFGNLIALSLGLTPNFKSNFDLAEDAKLQLSKDTYDDDLDNLLAQIGDQYADLFLAAKNLSDAILLSDILRVNTEITKAPLSASMIKRYDEHHQDLTLLKALVRQQLPEKYKEIFFDQSKNGYAGYIDGGASQEEFYKFIKPILEKMDGTEELLVKLNREDLLRKQRTFDNGSIPHQIHLGELHAILRRQEDFYPFLKDNREKIEKILTFRIPYYVGPLARGNSRFAWMTRKSEETITPWNFEEVVDKGASAQSFIERMTNFDKNLPNEKVLPKHSLLYEYFTVYNELTKVKYVTEGMRKPAFLSGEQKKAIVDLLFKTNRKVTVKQLKEDYFKKIECFDSVEISGVEDRFNASLGTYHDLLKIIKDKDFLDNEENEDILEDIVLTLTLFEDREMIEERLKTYAHLFDDKVMKQLKRRRYTGWGRLSRKLINGIRDKQSGKTILDFLKSDGFANRNFMQLIHDDSLTFKEDIQKAQVSGQGDSLHEHIANLAGSPAIKKGILQTVKVVDELVKVMGRHKPENIVIEMARENQTTQKGQKNSRERMKRIEEGIKELGSQILKEHPVENTQLQNEKLYLYYLQNGRDMYVDQELDINRLSDYDVDHIVPQSFLKDDSIDNKVLTRSDKARGKSDNVPSEEVVKKMKNYWRQLLNAKLITQRKFDNLTKAERGGLSELDKAGFIKRQLVETRQITKHVAQILDSRMNTKYDENDKLIREVKVITLKSKLVSDFRKDFQFYKVREINNYHHAHDAYLNAVVGTALIKKYPKLESEFVYGDYKVYDVRKMIAKSEQEIGKATAKYFFYSNIMNFFKTEITLANGEIRKRPLIETNGETGEIVWDKGRDFATVRKVLSMPQVNIVKKTEVQTGGFSKESILPKRNSDKLIARKKDWDPKKYGGFDSPTVAYSVLVVAKVEKGKSKKLKSVKELLGITIMERSSFEKNPIDFLEAKGYKEVKKDLIIKLPKYSLFELENGRKRMLASAGELQKGNELALPSKYVNFLYLASHYEKLKGSPEDNEQKQLFVEQHKHYLDEIIEQISEFSKRVILADANLDKVLSAYNKHRDKPIREQAENIIHLFTLTNLGAPAAFKYFDTTIDRKRYTSTKEVLDATLIHQSITGLYETRIDLSQLGGDGGPAPGGSGSSGGTVSLQDEHRLFDIPVTTSLPDVWLQDFPQAWAETGGLGRAKCQAPIIIDLKPTAVPVSIKQYPMSLEAHMGIRQHIIKFLELGVLRPCRSPWNTPLLPVKKPGTQDYRPVQDLREINKRTVDIHPTVPNPYNLLSTLKPDYSWYTVLDLKDAFFCLPLAPQSQELFAFEWKDPERGISGQLTWTRLPQGFKNSPTLFNEALHRDLTDFRTQHPEVTLLQYVDDLLLAAPTKKACTQGTRHLLQELGEKGYRASAKKAQICQTKVTYLGYILSEGKRWLTPGRIETVARIPPPRNPREVREFLGKAGFCRLFIPGFAELAAPLYALTKPSTPFTWQTEHQLAFEALKKALLSAPALGLPDTSKPFTLFLDERQGIAKGVLTQKLGPWKRPVAYLSKKLDPVAAGWPPCLRIMAATAMLVKDSAKLTLGQPLTVITPHTLEAIVRQPPDRWITNARLTHYQALLLDTDRVQFGPPVTLNPATLLPVPENQPSPHDCRQVLAETHGTREDLKDQELPDADHTWYTDGSSYLDSGTRRAGAAVVDGHNTIWAQSLPPGTSAQKAELIALTKALELSKGKKANIYTDSRYAFATAHTHGSIYERRGWLTSEGKEIKNKAEIIALLKALFLPQEVAIIHCPGHQKGQDPVAVGNRQADRVARQAAMAEVLTLATEPDNTSHITAGKRTADGSEFEKRTADGSEFESPKKKAKVE

SEQ ID NO: 1991 - protein, 2100 aa, synthetic construct
MPAAKRVKLDGGDKKYSIGLDIGTNSVGWAVITDEYKVPSKKFKVLGNTDRHSIKKNLIGALLFDSGETAEATRLKRTARRRYTRRKNRICYLQEIFSNEMAKVDDSFFHRLEESFLVEEDKKHERHPIFGNIVDEVAYHEKYPTIYHLRKKLVDSTDKADLRLIYLALAHMIKFRGHFLIEGDLNPDNSDVDKLFIQLVQTYNQLFEENPINASGVDAKAILSARLSKSRRLENLIAQLPGEKKNGLFGNLIALSLGLTPNFKSNFDLAEDAKLQLSKDTYDDDLDNLLAQIGDQYADLFLAAKNLSDAILLSDILRVNTEITKAPLSASMIKRYDEHHQDLTLLKALVRQQLPEKYKEIFFDQSKNGYAGYIDGGASQEEFYKFIKPILEKMDGTEELLVKLNREDLLRKQRTFDNGSIPHQIHLGELHAILRRQEDFYPFLKDNREKIEKILTFRIPYYVGPLARGNSRFAWMTRKSEETITPWNFEEVVDKGASAQSFIERMTNFDKNLPNEKVLPKHSLLYEYFTVYNELTKVKYVTEGMRKPAFLSGEQKKAIVDLLFKTNRKVTVKQLKEDYFKKIECFDSVEISGVEDRFNASLGTYHDLLKIIKDKDFLDNEENEDILEDIVLTLTLFEDREMIEERLKTYAHLFDDKVMKQLKRRRYTGWGRLSRKLINGIRDKQSGKTILDFLKSDGFANRNFMQLIHDDSLTFKEDIQKAQVSGQGDSLHEHIANLAGSPAIKKGILQTVKVVDELVKVMGRHKPENIVIEMARENQTTQKGQKNSRERMKRIEEGIKELGSQILKEHPVENTQLQNEKLYLYYLQNGRDMYVDQELDINRLSDYDVDHIVPQSFLKDDSIDNKVLTRSDKARGKSDNVPSEEVVKKMKNYWRQLLNAKLITQRKFDNLTKAERGGLSELDKAGFIKRQLVETRQITKHVAQILDSRMNTKYDENDKLIREVKVITLKSKLVSDFRKDFQFYKVREINNYHHAHDAYLNAVVGTALIKKYPKLESEFVYGDYKVYDVRKMIAKSEQEIGKATAKYFFYSNIMNFFKTEITLANGEIRKRPLIETNGETGEIVWDKGRDFATVRKVLSMPQVNIVKKTEVQTGGFSKESILPKRNSDKLIARKKDWDPKKYGGFDSPTVAYSVLVVAKVEKGKSKKLKSVKELLGITIMERSSFEKNPIDFLEAKGYKEVKKDLIIKLPKYSLFELENGRKRMLASAGELQKGNELALPSKYVNFLYLASHYEKLKGSPEDNEQKQLFVEQHKHYLDEIIEQISEFSKRVILADANLDKVLSAYNKHRDKPIREQAENIIHLFTLTNLGAPAAFKYFDTTIDRKRYTSTKEVLDATLIHQSITGLYETRIDLSQLGGDGGGGGGSSGGSGGTVSLQDEHRLFDIPVTTSLPDVWLQDFPQAWAETGGLGRAKCQAPIIIDLKPTAVPVSIKQYPMSLEAHMGIRQHIIKFLELGVLRPCRSPWNTPLLPVKKPGTQDYRPVQDLREINKRTVDIHPTVPNPYNLLSTLKPDYSWYTVLDLKDAFFCLPLAPQSQELFAFEWKDPERGISGQLTWTRLPQGFKNSPTLFNEALHRDLTDFRTQHPEVTLLQYVDDLLLAAPTKKACTQGTRHLLQELGEKGYRASAKKAQICQTKVTYLGYILSEGKRWLTPGRIETVARIPPPRNPREVREFLGKAGFCRLFIPGFAELAAPLYALTKPSTPFTWQTEHQLAFEALKKALLSAPALGLPDTSKPFTLFLDERQGIAKGVLTQKLGPWKRPVAYLSKKLDPVAAGWPPCLRIMAATAMLVKDSAKLTLGQPLTVITPHTLEAIVRQPPDRWITNARLTHYQALLLDTDRVQFGPPVTLNPATLLPVPENQPSPHDCRQVLAETHGTREDLKDQELPDADHTWYTDGSSYLDSGTRRAGAAVVDGHNTIWAQSLPPGTSAQKAELIALTKALELSKGKKANIYTDSRYAFATAHTHGSIYERRGWLTSEGKEIKNKAEIIALLKALFLPQEVAIIHCPGHQKGQDPVAVGNRQADRVARQAAMAEVLTLATEPDNTSHITAGKRTADGSEFEKRTADGSEFESPKKKAKVE

SEQ ID NO: 1992 - protein, 2106 aa, synthetic construct
MPAAKRVKLDGGDKKYSIGLDIGTNSVGWAVITDEYKVPSKKFKVLGNTDRHSIKKNLIGALLFDSGETAEATRLKRTARRRYTRRKNRICYLQEIFSNEMAKVDDSFFHRLEESFLVEEDKKHERHPIFGNIVDEVAYHEKYPTIYHLRKKLVDSTDKADLRLIYLALAHMIKFRGHFLIEGDLNPDNSDVDKLFIQLVQTYNQLFEENPINASGVDAKAILSARLSKSRRLENLIAQLPGEKKNGLFGNLIALSLGLTPNFKSNFDLAEDAKLQLSKDTYDDDLDNLLAQIGDQYADLFLAAKNLSDAILLSDILRVNTEITKAPLSASMIKRYDEHHQDLTLLKALVRQQLPEKYKEIFFDQSKNGYAGYIDGGASQEEFYKFIKPILEKMDGTEELLVKLNREDLLRKQRTFDNGSIPHQIHLGELHAILRRQEDFYPFLKDNREKIEKILTFRIPYYVGPLARGNSRFAWMTRKSEETITPWNFEEVVDKGASAQSFIERMTNFDKNLPNEKVLPKHSLLYEYFTVYNELTKVKYVTEGMRKPAFLSGEQKKAIVDLLFKTNRKVTVKQLKEDYFKKIECFDSVEISGVEDRFNASLGTYHDLLKIIKDKDFLDNEENEDILEDIVLTLTLFEDREMIEERLKTYAHLFDDKVMKQLKRRRYTGWGRLSRKLINGIRDKQSGKTILDFLKSDGFANRNFMQLIHDDSLTFKEDIQKAQVSGQGDSLHEHIANLAGSPAIKKGILQTVKVVDELVKVMGRHKPENIVIEMARENQTTQKGQKNSRERMKRIEEGIKELGSQILKEHPVENTQLQNEKLYLYYLQNGRDMYVDQELDINRLSDYDVDHIVPQSFLKDDSIDNKVLTRSDKARGKSDNVPSEEVVKKMKNYWRQLLNAKLITQRKFDNLTKAERGGLSELDKAGFIKRQLVETRQITKHVAQILDSRMNTKYDENDKLIREVKVITLKSKLVSDFRKDFQFYKVREINNYHHAHDAYLNAVVGTALIKKYPKLESEFVYGDYKVYDVRKMIAKSEQEIGKATAKYFFYSNIMNFFKTEITLANGEIRKRPLIETNGETGEIVWDKGRDFATVRKVLSMPQVNIVKKTEVQTGGFSKESILPKRNSDKLIARKKDWDPKKYGGFDSPTVAYSVLVVAKVEKGKSKKLKSVKELLGITIMERSSFEKNPIDFLEAKGYKEVKKDLIIKLPKYSLFELENGRKRMLASAGELQKGNELALPSKYVNFLYLASHYEKLKGSPEDNEQKQLFVEQHKHYLDEIIEQISEFSKRVILADANLDKVLSAYNKHRDKPIREQAENIIHLFTLTNLGAPAAFKYFDTTIDRKRYTSTKEVLDATLIHQSITGLYETRIDLSQLGGDGGGGSGGSGGSGGSGGSGGTVSLQDEHRLFDIPVTTSLPDVWLQDFPQAWAETGGLGRAKCQAPIIIDLKPTAVPVSIKQYPMSLEAHMGIRQHIIKFLELGVLRPCRSPWNTPLLPVKKPGTQDYRPVQDLREINKRTVDIHPTVPNPYNLLSTLKPDYSWYTVLDLKDAFFCLPLAPQSQELFAFEWKDPERGISGQLTWTRLPQGFKNSPTLFNEALHRDLTDFRTQHPEVTLLQYVDDLLLAAPTKKACTQGTRHLLQELGEKGYRASAKKAQICQTKVTYLGYILSEGKRWLTPGRIETVARIPPPRNPREVREFLGKAGFCRLFIPGFAELAAPLYALTKPSTPFTWQTEHQLAFEALKKALLSAPALGLPDTSKPFTLFLDERQGIAKGVLTQKLGPWKRPVAYLSKKLDPVAAGWPPCLRIMAATAMLVKDSAKLTLGQPLTVITPHTLEAIVRQPPDRWITNARLTHYQALLLDTDRVQFGPPVTLNPATLLPVPENQPSPHDCRQVLAETHGTREDLKDQELPDADHTWYTDGSSYLDSGTRRAGAAVVDGHNTIWAQSLPPGTSAQKAELIALTKALELSKGKKANIYTDSRYAFATAHTHGSIYERRGWLTSEGKEIKNKAEIIALLKALFLPQEVAIIHCPGHQKGQDPVAVGNRQADRVARQAAMAEVLTLATEPDNTSHITAGKRTADGSEFEKRTADGSEFESPKKKAKVE

SEQ ID NO: 1993 - protein, 2100 aa, synthetic construct
MPAAKRVKLDGGDKKYSIGLDIGTNSVGWAVITDEYKVPSKKFKVLGNTDRHSIKKNLIGALLFDSGETAEATRLKRTARRRYTRRKNRICYLQEIFSNEMAKVDDSFFHRLEESFLVEEDKKHERHPIFGNIVDEVAYHEKYPTIYHLRKKLVDSTDKADLRLIYLALAHMIKFRGHFLIEGDLNPDNSDVDKLFIQLVQTYNQLFEENPINASGVDAKAILSARLSKSRRLENLIAQLPGEKKNGLFGNLIALSLGLTPNFKSNFDLAEDAKLQLSKDTYDDDLDNLLAQIGDQYADLFLAAKNLSDAILLSDILRVNTEITKAPLSASMIKRYDEHHQDLTLLKALVRQQLPEKYKEIFFDQSKNGYAGYIDGGASQEEFYKFIKPILEKMDGTEELLVKLNREDLLRKQRTFDNGSIPHQIHLGELHAILRRQEDFYPFLKDNREKIEKILTFRIPYYVGPLARGNSRFAWMTRKSEETITPWNFEEVVDKGASAQSFIERMTNFDKNLPNEKVLPKHSLLYEYFTVYNELTKVKYVTEGMRKPAFLSGEQKKAIVDLLFKTNRKVTVKQLKEDYFKKIECFDSVEISGVEDRFNASLGTYHDLLKIIKDKDFLDNEENEDILEDIVLTLTLFEDREMIEERLKTYAHLFDDKVMKQLKRRRYTGWGRLSRKLINGIRDKQSGKTILDFLKSDGFANRNFMQLIHDDSLTFKEDIQKAQVSGQGDSLHEHIANLAGSPAIKKGILQTVKVVDELVKVMGRHKPENIVIEMARENQTTQKGQKNSRERMKRIEEGIKELGSQILKEHPVENTQLQNEKLYLYYLQNGRDMYVDQELDINRLSDYDVDHIVPQSFLKDDSIDNKVLTRSDKARGKSDNVPSEEVVKKMKNYWRQLLNAKLITQRKFDNLTKAERGGLSELDKAGFIKRQLVETRQITKHVAQILDSRMNTKYDENDKLIREVKVITLKSKLVSDFRKDFQFYKVREINNYHHAHDAYLNAVVGTALIKKYPKLESEFVYGDYKVYDVRKMIAKSEQEIGKATAKYFFYSNIMNFFKTEITLANGEIRKRPLIETNGETGEIVWDKGRDFATVRKVLSMPQVNIVKKTEVQTGGFSKESILPKRNSDKLIARKKDWDPKKYGGFDSPTVAYSVLVVAKVEKGKSKKLKSVKELLGITIMERSSFEKNPIDFLEAKGYKEVKKDLIIKLPKYSLFELENGRKRMLASAGELQKGNELALPSKYVNFLYLASHYEKLKGSPEDNEQKQLFVEQHKHYLDEIIEQISEFSKRVILADANLDKVLSAYNKHRDKPIREQAENIIHLFTLTNLGAPAAFKYFDTTIDRKRYTSTKEVLDATLIHQSITGLYETRIDLSQLGGDGGGSSGGSGGGGGTVSLQDEHRLFDIPVTTSLPDVWLQDFPQAWAETGGLGRAKCQAPIIIDLKPTAVPVSIKQYPMSLEAHMGIRQHIIKFLELGVLRPCRSPWNTPLLPVKKPGTQDYRPVQDLREINKRTVDIHPTVPNPYNLLSTLKPDYSWYTVLDLKDAFFCLPLAPQSQELFAFEWKDPERGISGQLTWTRLPQGFKNSPTLFNEALHRDLTDFRTQHPEVTLLQYVDDLLLAAPTKKACTQGTRHLLQELGEKGYRASAKKAQICQTKVTYLGYILSEGKRWLTPGRIETVARIPPPRNPREVREFLGKAGFCRLFIPGFAELAAPLYALTKPSTPFTWQTEHQLAFEALKKALLSAPALGLPDTSKPFTLFLDERQGIAKGVLTQKLGPWKRPVAYLSKKLDPVAAGWPPCLRIMAATAMLVKDSAKLTLGQPLTVITPHTLEAIVRQPPDRWITNARLTHYQALLLDTDRVQFGPPVTLNPATLLPVPENQPSPHDCRQVLAETHGTREDLKDQELPDADHTWYTDGSSYLDSGTRRAGAAVVDGHNTIWAQSLPPGTSAQKAELIALTKALELSKGKKANIYTDSRYAFATAHTHGSIYERRGWLTSEGKEIKNKAEIIALLKALFLPQEVAIIHCPGHQKGQDPVAVGNRQADRVARQAAMAEVLTLATEPDNTSHITAGKRTADGSEFEKRTADGSEFESPKKKAKVE

SEQ ID NO: 1994 - protein, 2103 aa, synthetic construct
MPAAKRVKLDGGDKKYSIGLDIGTNSVGWAVITDEYKVPSKKFKVLGNTDRHSIKKNLIGALLFDSGETAEATRLKRTARRRYTRRKNRICYLQEIFSNEMAKVDDSFFHRLEESFLVEEDKKHERHPIFGNIVDEVAYHEKYPTIYHLRKKLVDSTDKADLRLIYLALAHMIKFRGHFLIEGDLNPDNSDVDKLFIQLVQTYNQLFEENPINASGVDAKAILSARLSKSRRLENLIAQLPGEKKNGLFGNLIALSLGLTPNFKSNFDLAEDAKLQLSKDTYDDDLDNLLAQIGDQYADLFLAAKNLSDAILLSDILRVNTEITKAPLSASMIKRYDEHHQDLTLLKALVRQQLPEKYKEIFFDQSKNGYAGYIDGGASQEEFYKFIKPILEKMDGTEELLVKLNREDLLRKQRTFDNGSIPHQIHLGELHAILRRQEDFYPFLKDNREKIEKILTFRIPYYVGPLARGNSRFAWMTRKSEETITPWNFEEVVDKGASAQSFIERMTNFDKNLPNEKVLPKHSLLYEYFTVYNELTKVKYVTEGMRKPAFLSGEQKKAIVDLLFKTNRKVTVKQLKEDYFKKIECFDSVEISGVEDRFNASLGTYHDLLKIIKDKDFLDNEENEDILEDIVLTLTLFEDREMIEERLKTYAHLFDDKVMKQLKRRRYTGWGRLSRKLINGIRDKQSGKTILDFLKSDGFANRNFMQLIHDDSLTFKEDIQKAQVSGQGDSLHEHIANLAGSPAIKKGILQTVKVVDELVKVMGRHKPENIVIEMARENQTTQKGQKNSRERMKRIEEGIKELGSQILKEHPVENTQLQNEKLYLYYLQNGRDMYVDQELDINRLSDYDVDHIVPQSFLKDDSIDNKVLTRSDKARGKSDNVPSEEVVKKMKNYWRQLLNAKLITQRKFDNLTKAERGGLSELDKAGFIKRQLVETRQITKHVAQILDSRMNTKYDENDKLIREVKVITLKSKLVSDFRKDFQFYKVREINNYHHAHDAYLNAVVGTALIKKYPKLESEFVYGDYKVYDVRKMIAKSEQEIGKATAKYFFYSNIMNFFKTEITLANGEIRKRPLIETNGETGEIVWDKGRDFATVRKVLSMPQVNIVKKTEVQTGGFSKESILPKRNSDKLIARKKDWDPKKYGGFDSPTVAYSVLVVAKVEKGKSKKLKSVKELLGITIMERSSFEKNPIDFLEAKGYKEVKKDLIIKLPKYSLFELENGRKRMLASAGELQKGNELALPSKYVNFLYLASHYEKLKGSPEDNEQKQLFVEQHKHYLDEIIEQISEFSKRVILADANLDKVLSAYNKHRDKPIREQAENIIHLFTLTNLGAPAAFKYFDTTIDRKRYTSTKEVLDATLIHQSITGLYETRIDLSQLGGDGGGSSGSSGSSGSSGGTVSLQDEHRLFDIPVTTSLPDVWLQDFPQAWAETGGLGRAKCQAPIIIDLKPTAVPVSIKQYPMSLEAHMGIRQHIIKFLELGVLRPCRSPWNTPLLPVKKPGTQDYRPVQDLREINKRTVDIHPTVPNPYNLLSTLKPDYSWYTVLDLKDAFFCLPLAPQSQELFAFEWKDPERGISGQLTWTRLPQGFKNSPTLFNEALHRDLTDFRTQHPEVTLLQYVDDLLLAAPTKKACTQGTRHLLQELGEKGYRASAKKAQICQTKVTYLGYILSEGKRWLTPGRIETVARIPPPRNPREVREFLGKAGFCRLFIPGFAELAAPLYALTKPSTPFTWQTEHQLAFEALKKALLSAPALGLPDTSKPFTLFLDERQGIAKGVLTQKLGPWKRPVAYLSKKLDPVAAGWPPCLRIMAATAMLVKDSAKLTLGQPLTVITPHTLEAIVRQPPDRWITNARLTHYQALLLDTDRVQFGPPVTLNPATLLPVPENQPSPHDCRQVLAETHGTREDLKDQELPDADHTWYTDGSSYLDSGTRRAGAAVVDGHNTIWAQSLPPGTSAQKAELIALTKALELSKGKKANIYTDSRYAFATAHTHGSIYERRGWLTSEGKEIKNKAEIIALLKALFLPQEVAIIHCPGHQKGQDPVAVGNRQADRVARQAAMAEVLTLATEPDNTSHITAGKRTADGSEFEKRTADGSEFESPKKKAKVE

SEQ ID NO: 1995 - protein, 2099 aa, synthetic construct
MPAAKRVKLDGGDKKYSIGLDIGTNSVGWAVITDEYKVPSKKFKVLGNTDRHSIKKNLIGALLFDSGETAEATRLKRTARRRYTRRKNRICYLQEIFSNEMAKVDDSFFHRLEESFLVEEDKKHERHPIFGNIVDEVAYHEKYPTIYHLRKKLVDSTDKADLRLIYLALAHMIKFRGHFLIEGDLNPDNSDVDKLFIQLVQTYNQLFEENPINASGVDAKAILSARLSKSRRLENLIAQLPGEKKNGLFGNLIALSLGLTPNFKSNFDLAEDAKLQLSKDTYDDDLDNLLAQIGDQYADLFLAAKNLSDAILLSDILRVNTEITKAPLSASMIKRYDEHHQDLTLLKALVRQQLPEKYKEIFFDQSKNGYAGYIDGGASQEEFYKFIKPILEKMDGTEELLVKLNREDLLRKQRTFDNGSIPHQIHLGELHAILRRQEDFYPFLKDNREKIEKILTFRIPYYVGPLARGNSRFAWMTRKSEETITPWNFEEVVDKGASAQSFIERMTNFDKNLPNEKVLPKHSLLYEYFTVYNELTKVKYVTEGMRKPAFLSGEQKKAIVDLLFKTNRKVTVKQLKEDYFKKIECFDSVEISGVEDRFNASLGTYHDLLKIIKDKDFLDNEENEDILEDIVLTLTLFEDREMIEERLKTYAHLFDDKVMKQLKRRRYTGWGRLSRKLINGIRDKQSGKTILDFLKSDGFANRNFMQLIHDDSLTFKEDIQKAQVSGQGDSLHEHIANLAGSPAIKKGILQTVKVVDELVKVMGRHKPENIVIEMARENQTTQKGQKNSRERMKRIEEGIKELGSQILKEHPVENTQLQNEKLYLYYLQNGRDMYVDQELDINRLSDYDVDHIVPQSFLKDDSIDNKVLTRSDKARGKSDNVPSEEVVKKMKNYWRQLLNAKLITQRKFDNLTKAERGGLSELDKAGFIKRQLVETRQITKHVAQILDSRMNTKYDENDKLIREVKVITLKSKLVSDFRKDFQFYKVREINNYHHAHDAYLNAVVGTALIKKYPKLESEFVYGDYKVYDVRKMIAKSEQEIGKATAKYFFYSNIMNFFKTEITLANGEIRKRPLIETNGETGEIVWDKGRDFATVRKVLSMPQVNIVKKTEVQTGGFSKESILPKRNSDKLIARKKDWDPKKYGGFDSPTVAYSVLVVAKVEKGKSKKLKSVKELLGITIMERSSFEKNPIDFLEAKGYKEVKKDLIIKLPKYSLFELENGRKRMLASAGELQKGNELALPSKYVNFLYLASHYEKLKGSPEDNEQKQLFVEQHKHYLDEIIEQISEFSKRVILADANLDKVLSAYNKHRDKPIREQAENIIHLFTLTNLGAPAAFKYFDTTIDRKRYTSTKEVLDATLIHQSITGLYETRIDLSQLGGDGGPAPEAAAKGGTVSLQDEHRLFDIPVTTSLPDVWLQDFPQAWAETGGLGRAKCQAPIIIDLKPTAVPVSIKQYPMSLEAHMGIRQHIIKFLELGVLRPCRSPWNTPLLPVKKPGTQDYRPVQDLREINKRTVDIHPTVPNPYNLLSTLKPDYSWYTVLDLKDAFFCLPLAPQSQELFAFEWKDPERGISGQLTWTRLPQGFKNSPTLFNEALHRDLTDFRTQHPEVTLLQYVDDLLLAAPTKKACTQGTRHLLQELGEKGYRASAKKAQICQTKVTYLGYILSEGKRWLTPGRIETVARIPPPRNPREVREFLGKAGFCRLFIPGFAELAAPLYALTKPSTPFTWQTEHQLAFEALKKALLSAPALGLPDTSKPFTLFLDERQGIAKGVLTQKLGPWKRPVAYLSKKLDPVAAGWPPCLRIMAATAMLVKDSAKLTLGQPLTVITPHTLEAIVRQPPDRWITNARLTHYQALLLDTDRVQFGPPVTLNPATLLPVPENQPSPHDCRQVLAETHGTREDLKDQELPDADHTWYTDGSSYLDSGTRRAGAAVVDGHNTIWAQSLPPGTSAQKAELIALTKALELSKGKKANIYTDSRYAFATAHTHGSIYERRGWLTSEGKEIKNKAEIIALLKALFLPQEVAIIHCPGHQKGQDPVAVGNRQADRVARQAAMAEVLTLATEPDNTSHITAGKRTADGSEFEKRTADGSEFESPKKKAKVE

SEQ ID NO: 1996 - protein, 2097 aa, synthetic construct
MPAAKRVKLDGGDKKYSIGLDIGTNSVGWAVITDEYKVPSKKFKVLGNTDRHSIKKNLIGALLFDSGETAEATRLKRTARRRYTRRKNRICYLQEIFSNEMAKVDDSFFHRLEESFLVEEDKKHERHPIFGNIVDEVAYHEKYPTIYHLRKKLVDSTDKADLRLIYLALAHMIKFRGHFLIEGDLNPDNSDVDKLFIQLVQTYNQLFEENPINASGVDAKAILSARLSKSRRLENLIAQLPGEKKNGLFGNLIALSLGLTPNFKSNFDLAEDAKLQLSKDTYDDDLDNLLAQIGDQYADLFLAAKNLSDAILLSDILRVNTEITKAPLSASMIKRYDEHHQDLTLLKALVRQQLPEKYKEIFFDQSKNGYAGYIDGGASQEEFYKFIKPILEKMDGTEELLVKLNREDLLRKQRTFDNGSIPHQIHLGELHAILRRQEDFYPFLKDNREKIEKILTFRIPYYVGPLARGNSRFAWMTRKSEETITPWNFEEVVDKGASAQSFIERMTNFDKNLPNEKVLPKHSLLYEYFTVYNELTKVKYVTEGMRKPAFLSGEQKKAIVDLLFKTNRKVTVKQLKEDYFKKIECFDSVEISGVEDRFNASLGTYHDLLKIIKDKDFLDNEENEDILEDIVLTLTLFEDREMIEERLKTYAHLFDDKVMKQLKRRRYTGWGRLSRKLINGIRDKQSGKTILDFLKSDGFANRNFMQLIHDDSLTFKEDIQKAQVSGQGDSLHEHIANLAGSPAIKKGILQTVKVVDELVKVMGRHKPENIVIEMARENQTTQKGQKNSRERMKRIEEGIKELGSQILKEHPVENTQLQNEKLYLYYLQNGRDMYVDQELDINRLSDYDVDHIVPQSFLKDDSIDNKVLTRSDKARGKSDNVPSEEVVKKMKNYWRQLLNAKLITQRKFDNLTKAERGGLSELDKAGFIKRQLVETRQITKHVAQILDSRMNTKYDENDKLIREVKVITLKSKLVSDFRKDFQFYKVREINNYHHAHDAYLNAVVGTALIKKYPKLESEFVYGDYKVYDVRKMIAKSEQEIGKATAKYFFYSNIMNFFKTEITLANGEIRKRPLIETNGETGEIVWDKGRDFATVRKVLSMPQVNIVKKTEVQTGGFSKESILPKRNSDKLIARKKDWDPKKYGGFDSPTVAYSVLVVAKVEKGKSKKLKSVKELLGITIMERSSFEKNPIDFLEAKGYKEVKKDLIIKLPKYSLFELENGRKRMLASAGELQKGNELALPSKYVNFLYLASHYEKLKGSPEDNEQKQLFVEQHKHYLDEIIEQISEFSKRVILADANLDKVLSAYNKHRDKPIREQAENIIHLFTLTNLGAPAAFKYFDTTIDRKRYTSTKEVLDATLIHQSITGLYETRIDLSQLGGDGGGGGPAPGGTVSLQDEHRLFDIPVTTSLPDVWLQDFPQAWAETGGLGRAKCQAPIIIDLKPTAVPVSIKQYPMSLEAHMGIRQHIIKFLELGVLRPCRSPWNTPLLPVKKPGTQDYRPVQDLREINKRTVDIHPTVPNPYNLLSTLKPDYSWYTVLDLKDAFFCLPLAPQSQELFAFEWKDPERGISGQLTWTRLPQGFKNSPTLFNEALHRDLTDFRTQHPEVTLLQYVDDLLLAAPTKKACTQGTRHLLQELGEKGYRASAKKAQICQTKVTYLGYILSEGKRWLTPGRIETVARIPPPRNPREVREFLGKAGFCRLFIPGFAELAAPLYALTKPSTPFTWQTEHQLAFEALKKALLSAPALGLPDTSKPFTLFLDERQGIAKGVLTQKLGPWKRPVAYLSKKLDPVAAGWPPCLRIMAATAMLVKDSAKLTLGQPLTVITPHTLEAIVRQPPDRWITNARLTHYQALLLDTDRVQFGPPVTLNPATLLPVPENQPSPHDCRQVLAETHGTREDLKDQELPDADHTWYTDGSSYLDSGTRRAGAAVVDGHNTIWAQSLPPGTSAQKAELIALTKALELSKGKKANIYTDSRYAFATAHTHGSIYERRGWLTSEGKEIKNKAEIIALLKALFLPQEVAIIHCPGHQKGQDPVAVGNRQADRVARQAAMAEVLTLATEPDNTSHITAGKRTADGSEFEKRTADGSEFESPKKKAKVE

SEQ ID NO: 1997 - protein, 2099 aa, synthetic construct
MPAAKRVKLDGGDKKYSIGLDIGTNSVGWAVITDEYKVPSKKFKVLGNTDRHSIKKNLIGALLFDSGETAEATRLKRTARRRYTRRKNRICYLQEIFSNEMAKVDDSFFHRLEESFLVEEDKKHERHPIFGNIVDEVAYHEKYPTIYHLRKKLVDSTDKADLRLIYLALAHMIKFRGHFLIEGDLNPDNSDVDKLFIQLVQTYNQLFEENPINASGVDAKAILSARLSKSRRLENLIAQLPGEKKNGLFGNLIALSLGLTPNFKSNFDLAEDAKLQLSKDTYDDDLDNLLAQIGDQYADLFLAAKNLSDAILLSDILRVNTEITKAPLSASMIKRYDEHHQDLTLLKALVRQQLPEKYKEIFFDQSKNGYAGYIDGGASQEEFYKFIKPILEKMDGTEELLVKLNREDLLRKQRTFDNGSIPHQIHLGELHAILRRQEDFYPFLKDNREKIEKILTFRIPYYVGPLARGNSRFAWMTRKSEETITPWNFEEVVDKGASAQSFIERMTNFDKNLPNEKVLPKHSLLYEYFTVYNELTKVKYVTEGMRKPAFLSGEQKKAIVDLLFKTNRKVTVKQLKEDYFKKIECFDSVEISGVEDRFNASLGTYHDLLKIIKDKDFLDNEENEDILEDIVLTLTLFEDREMIEERLKTYAHLFDDKVMKQLKRRRYTGWGRLSRKLINGIRDKQSGKTILDFLKSDGFANRNFMQLIHDDSLTFKEDIQKAQVSGQGDSLHEHIANLAGSPAIKKGILQTVKVVDELVKVMGRHKPENIVIEMARENQTTQKGQKNSRERMKRIEEGIKELGSQILKEHPVENTQLQNEKLYLYYLQNGRDMYVDQELDINRLSDYDVDHIVPQSFLKDDSIDNKVLTRSDKARGKSDNVPSEEVVKKMKNYWRQLLNAKLITQRKFDNLTKAERGGLSELDKAGFIKRQLVETRQITKHVAQILDSRMNTKYDENDKLIREVKVITLKSKLVSDFRKDFQFYKVREINNYHHAHDAYLNAVVGTALIKKYPKLESEFVYGDYKVYDVRKMIAKSEQEIGKATAKYFFYSNIMNFFKTEITLANGEIRKRPLIETNGETGEIVWDKGRDFATVRKVLSMPQVNIVKKTEVQTGGFSKESILPKRNSDKLIARKKDWDPKKYGGFDSPTVAYSVLVVAKVEKGKSKKLKSVKELLGITIMERSSFEKNPIDFLEAKGYKEVKKDLIIKLPKYSLFELENGRKRMLASAGELQKGNELALPSKYVNFLYLASHYEKLKGSPEDNEQKQLFVEQHKHYLDEIIEQISEFSKRVILADANLDKVLSAYNKHRDKPIREQAENIIHLFTLTNLGAPAAFKYFDTTIDRKRYTSTKEVLDATLIHQSITGLYETRIDLSQLGGDGGGGSEAAAKGGTVSLQDEHRLFDIPVTTSLPDVWLQDFPQAWAETGGLGRAKCQAPIIIDLKPTAVPVSIKQYPMSLEAHMGIRQHIIKFLELGVLRPCRSPWNTPLLPVKKPGTQDYRPVQDLREINKRTVDIHPTVPNPYNLLSTLKPDYSWYTVLDLKDAFFCLPLAPQSQELFAFEWKDPERGISGQLTWTRLPQGFKNSPTLFNEALHRDLTDFRTQHPEVTLLQYVDDLLLAAPTKKACTQGTRHLLQELGEKGYRASAKKAQICQTKVTYLGYILSEGKRWLTPGRIETVARIPPPRNPREVREFLGKAGFCRLFIPGFAELAAPLYALTKPSTPFTWQTEHQLAFEALKKALLSAPALGLPDTSKPFTLFLDERQGIAKGVLTQKLGPWKRPVAYLSKKLDPVAAGWPPCLRIMAATAMLVKDSAKLTLGQPLTVITPHTLEAIVRQPPDRWITNARLTHYQALLLDTDRVQFGPPVTLNPATLLPVPENQPSPHDCRQVLAETHGTREDLKDQELPDADHTWYTDGSSYLDSGTRRAGAAVVDGHNTIWAQSLPPGTSAQKAELIALTKALELSKGKKANIYTDSRYAFATAHTHGSIYERRGWLTSEGKEIKNKAEIIALLKALFLPQEVAIIHCPGHQKGQDPVAVGNRQADRVARQAAMAEVLTLATEPDNTSHITAGKRTADGSEFEKRTADGSEFESPKKKAKVE

SEQ ID NO: 1998 - protein, 2096 aa, synthetic construct
MPAAKRVKLDGGDKKYSIGLDIGTNSVGWAVITDEYKVPSKKFKVLGNTDRHSIKKNLIGALLFDSGETAEATRLKRTARRRYTRRKNRICYLQEIFSNEMAKVDDSFFHRLEESFLVEEDKKHERHPIFGNIVDEVAYHEKYPTIYHLRKKLVDSTDKADLRLIYLALAHMIKFRGHFLIEGDLNPDNSDVDKLFIQLVQTYNQLFEENPINASGVDAKAILSARLSKSRRLENLIAQLPGEKKNGLFGNLIALSLGLTPNFKSNFDLAEDAKLQLSKDTYDDDLDNLLAQIGDQYADLFLAAKNLSDAILLSDILRVNTEITKAPLSASMIKRYDEHHQDLTLLKALVRQQLPEKYKEIFFDQSKNGYAGYIDGGASQEEFYKFIKPILEKMDGTEELLVKLNREDLLRKQRTFDNGSIPHQIHLGELHAILRRQEDFYPFLKDNREKIEKILTFRIPYYVGPLARGNSRFAWMTRKSEETITPWNFEEVVDKGASAQSFIERMTNFDKNLPNEKVLPKHSLLYEYFTVYNELTKVKYVTEGMRKPAFLSGEQKKAIVDLLFKTNRKVTVKQLKEDYFKKIECFDSVEISGVEDRFNASLGTYHDLLKIIKDKDFLDNEENEDILEDIVLTLTLFEDREMIEERLKTYAHLFDDKVMKQLKRRRYTGWGRLSRKLINGIRDKQSGKTILDFLKSDGFANRNFMQLIHDDSLTFKEDIQKAQVSGQGDSLHEHIANLAGSPAIKKGILQTVKVVDELVKVMGRHKPENIVIEMARENQTTQKGQKNSRERMKRIEEGIKELGSQILKEHPVENTQLQNEKLYLYYLQNGRDMYVDQELDINRLSDYDVDHIVPQSFLKDDSIDNKVLTRSDKARGKSDNVPSEEVVKKMKNYWRQLLNAKLITQRKFDNLTKAERGGLSELDKAGFIKRQLVETRQITKHVAQILDSRMNTKYDENDKLIREVKVITLKSKLVSDFRKDFQFYKVREINNYHHAHDAYLNAVVGTALIKKYPKLESEFVYGDYKVYDVRKMIAKSEQEIGKATAKYFFYSNIMNFFKTEITLANGEIRKRPLIETNGETGEIVWDKGRDFATVRKVLSMPQVNIVKKTEVQTGGFSKESILPKRNSDKLIARKKDWDPKKYGGFDSPTVAYSVLVVAKVEKGKSKKLKSVKELLGITIMERSSFEKNPIDFLEAKGYKEVKKDLIIKLPKYSLFELENGRKRMLASAGELQKGNELALPSKYVNFLYLASHYEKLKGSPEDNEQKQLFVEQHKHYLDEIIEQISEFSKRVILADANLDKVLSAYNKHRDKPIREQAENIIHLFTLTNLGAPAAFKYFDTTIDRKRYTSTKEVLDATLIHQSITGLYETRIDLSQLGGDGGGGGGGGGTVSLQDEHRLFDIPVTTSLPDVWLQDFPQAWAETGGLGRAKCQAPIIIDLKPTAVPVSIKQYPMSLEAHMGIRQHIIKFLELGVLRPCRSPWNTPLLPVKKPGTQDYRPVQDLREINKRTVDIHPTVPNPYNLLSTLKPDYSWYTVLDLKDAFFCLPLAPQSQELFAFEWKDPERGISGQLTWTRLPQGFKNSPTLFNEALHRDLTDFRTQHPEVTLLQYVDDLLLAAPTKKACTQGTRHLLQELGEKGYRASAKKAQICQTKVTYLGYILSEGKRWLTPGRIETVARIPPPRNPREVREFLGKAGFCRLFIPGFAELAAPLYALTKPSTPFTWQTEHQLAFEALKKALLSAPALGLPDTSKPFTLFLDERQGIAKGVLTQKLGPWKRPVAYLSKKLDPVAAGWPPCLRIMAATAMLVKDSAKLTLGQPLTVITPHTLEAIVRQPPDRWITNARLTHYQALLLDTDRVQFGPPVTLNPATLLPVPENQPSPHDCRQVLAETHGTREDLKDQELPDADHTWYTDGSSYLDSGTRRAGAAVVDGHNTIWAQSLPPGTSAQKAELIALTKALELSKGKKANIYTDSRYAFATAHTHGSIYERRGWLTSEGKEIKNKAEIIALLKALFLPQEVAIIHCPGHQKGQDPVAVGNRQADRVARQAAMAEVLTLATEPDNTSHITAGKRTADGSEFEKRTADGSEFESPKKKAKVE

SEQ ID NO: 1999 - protein, 2094 aa, synthetic construct
MPAAKRVKLDGGDKKYSIGLDIGTNSVGWAVITDEYKVPSKKFKVLGNTDRHSIKKNLIGALLFDSGETAEATRLKRTARRRYTRRKNRICYLQEIFSNEMAKVDDSFFHRLEESFLVEEDKKHERHPIFGNIVDEVAYHEKYPTIYHLRKKLVDSTDKADLRLIYLALAHMIKFRGHFLIEGDLNPDNSDVDKLFIQLVQTYNQLFEENPINASGVDAKAILSARLSKSRRLENLIAQLPGEKKNGLFGNLIALSLGLTPNFKSNFDLAEDAKLQLSKDTYDDDLDNLLAQIGDQYADLFLAAKNLSDAILLSDILRVNTEITKAPLSASMIKRYDEHHQDLTLLKALVRQQLPEKYKEIFFDQSKNGYAGYIDGGASQEEFYKFIKPILEKMDGTEELLVKLNREDLLRKQRTFDNGSIPHQIHLGELHAILRRQEDFYPFLKDNREKIEKILTFRIPYYVGPLARGNSRFAWMTRKSEETITPWNFEEVVDKGASAQSFIERMTNFDKNLPNEKVLPKHSLLYEYFTVYNELTKVKYVTEGMRKPAFLSGEQKKAIVDLLFKTNRKVTVKQLKEDYFKKIECFDSVEISGVEDRFNASLGTYHDLLKIIKDKDFLDNEENEDILEDIVLTLTLFEDREMIEERLKTYAHLFDDKVMKQLKRRRYTGWGRLSRKLINGIRDKQSGKTILDFLKSDGFANRNFMQLIHDDSLTFKEDIQKAQVSGQGDSLHEHIANLAGSPAIKKGILQTVKVVDELVKVMGRHKPENIVIEMARENQTTQKGQKNSRERMKRIEEGIKELGSQILKEHPVENTQLQNEKLYLYYLQNGRDMYVDQELDINRLSDYDVDHIVPQSFLKDDSIDNKVLTRSDKARGKSDNVPSEEVVKKMKNYWRQLLNAKLITQRKFDNLTKAERGGLSELDKAGFIKRQLVETRQITKHVAQILDSRMNTKYDENDKLIREVKVITLKSKLVSDFRKDFQFYKVREINNYHHAHDAYLNAVVGTALIKKYPKLESEFVYGDYKVYDVRKMIAKSEQEIGKATAKYFFYSNIMNFFKTEITLANGEIRKRPLIETNGETGEIVWDKGRDFATVRKVLSMPQVNIVKKTEVQTGGFSKESILPKRNSDKLIARKKDWDPKKYGGFDSPTVAYSVLVVAKVEKGKSKKLKSVKELLGITIMERSSFEKNPIDFLEAKGYKEVKKDLIIKLPKYSLFELENGRKRMLASAGELQKGNELALPSKYVNFLYLASHYEKLKGSPEDNEQKQLFVEQHKHYLDEIIEQISEFSKRVILADANLDKVLSAYNKHRDKPIREQAENIIHLFTLTNLGAPAAFKYFDTTIDRKRYTSTKEVLDATLIHQSITGLYETRIDLSQLGGDGGGGSGGTVSLQDEHRLFDIPVTTSLPDVWLQDFPQAWAETGGLGRAKCQAPIIIDLKPTAVPVSIKQYPMSLEAHMGIRQHIIKFLELGVLRPCRSPWNTPLLPVKKPGTQDYRPVQDLREINKRTVDIHPTVPNPYNLLSTLKPDYSWYTVLDLKDAFFCLPLAPQSQELFAFEWKDPERGISGQLTWTRLPQGFKNSPTLFNEALHRDLTDFRTQHPEVTLLQYVDDLLLAAPTKKACTQGTRHLLQELGEKGYRASAKKAQICQTKVTYLGYILSEGKRWLTPGRIETVARIPPPRNPREVREFLGKAGFCRLFIPGFAELAAPLYALTKPSTPFTWQTEHQLAFEALKKALLSAPALGLPDTSKPFTLFLDERQGIAKGVLTQKLGPWKRPVAYLSKKLDPVAAGWPPCLRIMAATAMLVKDSAKLTLGQPLTVITPHTLEAIVRQPPDRWITNARLTHYQALLLDTDRVQFGPPVTLNPATLLPVPENQPSPHDCRQVLAETHGTREDLKDQELPDADHTWYTDGSSYLDSGTRRAGAAVVDGHNTIWAQSLPPGTSAQKAELIALTKALELSKGKKANIYTDSRYAFATAHTHGSIYERRGWLTSEGKEIKNKAEIIALLKALFLPQEVAIIHCPGHQKGQDPVAVGNRQADRVARQAAMAEVLTLATEPDNTSHITAGKRTADGSEFEKRTADGSEFESPKKKAKVE

SEQ ID NO: 2000 - protein, 2121 aa, synthetic construct
MPAAKRVKLDGGDKKYSIGLDIGTNSVGWAVITDEYKVPSKKFKVLGNTDRHSIKKNLIGALLFDSGETAEATRLKRTARRRYTRRKNRICYLQEIFSNEMAKVDDSFFHRLEESFLVEEDKKHERHPIFGNIVDEVAYHEKYPTIYHLRKKLVDSTDKADLRLIYLALAHMIKFRGHFLIEGDLNPDNSDVDKLFIQLVQTYNQLFEENPINASGVDAKAILSARLSKSRRLENLIAQLPGEKKNGLFGNLIALSLGLTPNFKSNFDLAEDAKLQLSKDTYDDDLDNLLAQIGDQYADLFLAAKNLSDAILLSDILRVNTEITKAPLSASMIKRYDEHHQDLTLLKALVRQQLPEKYKEIFFDQSKNGYAGYIDGGASQEEFYKFIKPILEKMDGTEELLVKLNREDLLRKQRTFDNGSIPHQIHLGELHAILRRQEDFYPFLKDNREKIEKILTFRIPYYVGPLARGNSRFAWMTRKSEETITPWNFEEVVDKGASAQSFIERMTNFDKNLPNEKVLPKHSLLYEYFTVYNELTKVKYVTEGMRKPAFLSGEQKKAIVDLLFKTNRKVTVKQLKEDYFKKIECFDSVEISGVEDRFNASLGTYHDLLKIIKDKDFLDNEENEDILEDIVLTLTLFEDREMIEERLKTYAHLFDDKVMKQLKRRRYTGWGRLSRKLINGIRDKQSGKTILDFLKSDGFANRNFMQLIHDDSLTFKEDIQKAQVSGQGDSLHEHIANLAGSPAIKKGILQTVKVVDELVKVMGRHKPENIVIEMARENQTTQKGQKNSRERMKRIEEGIKELGSQILKEHPVENTQLQNEKLYLYYLQNGRDMYVDQELDINRLSDYDVDHIVPQSFLKDDSIDNKVLTRSDKARGKSDNVPSEEVVKKMKNYWRQLLNAKLITQRKFDNLTKAERGGLSELDKAGFIKRQLVETRQITKHVAQILDSRMNTKYDENDKLIREVKVITLKSKLVSDFRKDFQFYKVREINNYHHAHDAYLNAVVGTALIKKYPKLESEFVYGDYKVYDVRKMIAKSEQEIGKATAKYFFYSNIMNFFKTEITLANGEIRKRPLIETNGETGEIVWDKGRDFATVRKVLSMPQVNIVKKTEVQTGGFSKESILPKRNSDKLIARKKDWDPKKYGGFDSPTVAYSVLVVAKVEKGKSKKLKSVKELLGITIMERSSFEKNPIDFLEAKGYKEVKKDLIIKLPKYSLFELENGRKRMLASAGELQKGNELALPSKYVNFLYLASHYEKLKGSPEDNEQKQLFVEQHKHYLDEIIEQISEFSKRVILADANLDKVLSAYNKHRDKPIREQAENIIHLFTLTNLGAPAAFKYFDTTIDRKRYTSTKEVLDATLIHQSITGLYETRIDLSQLGGDGGEAAAKEAAAKEAAAKEAAAKEAAAKEAAAKGGTVSLQDEHRLFDIPVTTSLPDVWLQDFPQAWAETGGLGRAKCQAPIIIDLKPTAVPVSIKQYPMSLEAHMGIRQHIIKFLELGVLRPCRSPWNTPLLPVKKPGTQDYRPVQDLREINKRTVDIHPTVPNPYNLLSTLKPDYSWYTVLDLKDAFFCLPLAPQSQELFAFEWKDPERGISGQLTWTRLPQGFKNSPTLFNEALHRDLTDFRTQHPEVTLLQYVDDLLLAAPTKKACTQGTRHLLQELGEKGYRASAKKAQICQTKVTYLGYILSEGKRWLTPGRIETVARIPPPRNPREVREFLGKAGFCRLFIPGFAELAAPLYALTKPSTPFTWQTEHQLAFEALKKALLSAPALGLPDTSKPFTLFLDERQGIAKGVLTQKLGPWKRPVAYLSKKLDPVAAGWPPCLRIMAATAMLVKDSAKLTLGQPLTVITPHTLEAIVRQPPDRWITNARLTHYQALLLDTDRVQFGPPVTLNPATLLPVPENQPSPHDCRQVLAETHGTREDLKDQELPDADHTWYTDGSSYLDSGTRRAGAAVVDGHNTIWAQSLPPGTSAQKAELIALTKALELSKGKKANIYTDSRYAFATAHTHGSIYERRGWLTSEGKEIKNKAEIIALLKALFLPQEVAIIHCPGHQKGQDPVAVGNRQADRVARQAAMAEVLTLATEPDNTSHITAGKRTADGSEFEKRTADGSEFESPKKKAKVE

SEQ ID NO: 2001 - protein, 2102 aa, synthetic construct
MPAAKRVKLDGGDKKYSIGLDIGTNSVGWAVITDEYKVPSKKFKVLGNTDRHSIKKNLIGALLFDSGETAEATRLKRTARRRYTRRKNRICYLQEIFSNEMAKVDDSFFHRLEESFLVEEDKKHERHPIFGNIVDEVAYHEKYPTIYHLRKKLVDSTDKADLRLIYLALAHMIKFRGHFLIEGDLNPDNSDVDKLFIQLVQTYNQLFEENPINASGVDAKAILSARLSKSRRLENLIAQLPGEKKNGLFGNLIALSLGLTPNFKSNFDLAEDAKLQLSKDTYDDDLDNLLAQIGDQYADLFLAAKNLSDAILLSDILRVNTEITKAPLSASMIKRYDEHHQDLTLLKALVRQQLPEKYKEIFFDQSKNGYAGYIDGGASQEEFYKFIKPILEKMDGTEELLVKLNREDLLRKQRTFDNGSIPHQIHLGELHAILRRQEDFYPFLKDNREKIEKILTFRIPYYVGPLARGNSRFAWMTRKSEETITPWNFEEVVDKGASAQSFIERMTNFDKNLPNEKVLPKHSLLYEYFTVYNELTKVKYVTEGMRKPAFLSGEQKKAIVDLLFKTNRKVTVKQLKEDYFKKIECFDSVEISGVEDRFNASLGTYHDLLKIIKDKDFLDNEENEDILEDIVLTLTLFEDREMIEERLKTYAHLFDDKVMKQLKRRRYTGWGRLSRKLINGIRDKQSGKTILDFLKSDGFANRNFMQLIHDDSLTFKEDIQKAQVSGQGDSLHEHIANLAGSPAIKKGILQTVKVVDELVKVMGRHKPENIVIEMARENQTTQKGQKNSRERMKRIEEGIKELGSQILKEHPVENTQLQNEKLYLYYLQNGRDMYVDQELDINRLSDYDVDHIVPQSFLKDDSIDNKVLTRSDKARGKSDNVPSEEVVKKMKNYWRQLLNAKLITQRKFDNLTKAERGGLSELDKAGFIKRQLVETRQITKHVAQILDSRMNTKYDENDKLIREVKVITLKSKLVSDFRKDFQFYKVREINNYHHAHDAYLNAVVGTALIKKYPKLESEFVYGDYKVYDVRKMIAKSEQEIGKATAKYFFYSNIMNFFKTEITLANGEIRKRPLIETNGETGEIVWDKGRDFATVRKVLSMPQVNIVKKTEVQTGGFSKESILPKRNSDKLIARKKDWDPKKYGGFDSPTVAYSVLVVAKVEKGKSKKLKSVKELLGITIMERSSFEKNPIDFLEAKGYKEVKKDLIIKLPKYSLFELENGRKRMLASAGELQKGNELALPSKYVNFLYLASHYEKLKGSPEDNEQKQLFVEQHKHYLDEIIEQISEFSKRVILADANLDKVLSAYNKHRDKPIREQAENIIHLFTLTNLGAPAAFKYFDTTIDRKRYTSTKEVLDATLIHQSITGLYETRIDLSQLGGDGGEAAAKGGSGSSGGTVSLQDEHRLFDIPVTTSLPDVWLQDFPQAWAETGGLGRAKCQAPIIIDLKPTAVPVSIKQYPMSLEAHMGIRQHIIKFLELGVLRPCRSPWNTPLLPVKKPGTQDYRPVQDLREINKRTVDIHPTVPNPYNLLSTLKPDYSWYTVLDLKDAFFCLPLAPQSQELFAFEWKDPERGISGQLTWTRLPQGFKNSPTLFNEALHRDLTDFRTQHPEVTLLQYVDDLLLAAPTKKACTQGTRHLLQELGEKGYRASAKKAQICQTKVTYLGYILSEGKRWLTPGRIETVARIPPPRNPREVREFLGKAGFCRLFIPGFAELAAPLYALTKPSTPFTWQTEHQLAFEALKKALLSAPALGLPDTSKPFTLFLDERQGIAKGVLTQKLGPWKRPVAYLSKKLDPVAAGWPPCLRIMAATAMLVKDSAKLTLGQPLTVITPHTLEAIVRQPPDRWITNARLTHYQALLLDTDRVQFGPPVTLNPATLLPVPENQPSPHDCRQVLAETHGTREDLKDQELPDADHTWYTDGSSYLDSGTRRAGAAVVDGHNTIWAQSLPPGTSAQKAELIALTKALELSKGKKANIYTDSRYAFATAHTHGSIYERRGWLTSEGKEIKNKAEIIALLKALFLPQEVAIIHCPGHQKGQDPVAVGNRQADRVARQAAMAEVLTLATEPDNTSHITAGKRTADGSEFEKRTADGSEFESPKKKAKVE

SEQ ID NO: 2002 - protein, 2100 aa, synthetic construct
MPAAKRVKLDGGDKKYSIGLDIGTNSVGWAVITDEYKVPSKKFKVLGNTDRHSIKKNLIGALLFDSGETAEATRLKRTARRRYTRRKNRICYLQEIFSNEMAKVDDSFFHRLEESFLVEEDKKHERHPIFGNIVDEVAYHEKYPTIYHLRKKLVDSTDKADLRLIYLALAHMIKFRGHFLIEGDLNPDNSDVDKLFIQLVQTYNQLFEENPINASGVDAKAILSARLSKSRRLENLIAQLPGEKKNGLFGNLIALSLGLTPNFKSNFDLAEDAKLQLSKDTYDDDLDNLLAQIGDQYADLFLAAKNLSDAILLSDILRVNTEITKAPLSASMIKRYDEHHQDLTLLKALVRQQLPEKYKEIFFDQSKNGYAGYIDGGASQEEFYKFIKPILEKMDGTEELLVKLNREDLLRKQRTFDNGSIPHQIHLGELHAILRRQEDFYPFLKDNREKIEKILTFRIPYYVGPLARGNSRFAWMTRKSEETITPWNFEEVVDKGASAQSFIERMTNFDKNLPNEKVLPKHSLLYEYFTVYNELTKVKYVTEGMRKPAFLSGEQKKAIVDLLFKTNRKVTVKQLKEDYFKKIECFDSVEISGVEDRFNASLGTYHDLLKIIKDKDFLDNEENEDILEDIVLTLTLFEDREMIEERLKTYAHLFDDKVMKQLKRRRYTGWGRLSRKLINGIRDKQSGKTILDFLKSDGFANRNFMQLIHDDSLTFKEDIQKAQVSGQGDSLHEHIANLAGSPAIKKGILQTVKVVDELVKVMGRHKPENIVIEMARENQTTQKGQKNSRERMKRIEEGIKELGSQILKEHPVENTQLQNEKLYLYYLQNGRDMYVDQELDINRLSDYDVDHIVPQSFLKDDSIDNKVLTRSDKARGKSDNVPSEEVVKKMKNYWRQLLNAKLITQRKFDNLTKAERGGLSELDKAGFIKRQLVETRQITKHVAQILDSRMNTKYDENDKLIREVKVITLKSKLVSDFRKDFQFYKVREINNYHHAHDAYLNAVVGTALIKKYPKLESEFVYGDYKVYDVRKMIAKSEQEIGKATAKYFFYSNIMNFFKTEITLANGEIRKRPLIETNGETGEIVWDKGRDFATVRKVLSMPQVNIVKKTEVQTGGFSKESILPKRNSDKLIARKKDWDPKKYGGFDSPTVAYSVLVVAKVEKGKSKKLKSVKELLGITIMERSSFEKNPIDFLEAKGYKEVKKDLIIKLPKYSLFELENGRKRMLASAGELQKGNELALPSKYVNFLYLASHYEKLKGSPEDNEQKQLFVEQHKHYLDEIIEQISEFSKRVILADANLDKVLSAYNKHRDKPIREQAENIIHLFTLTNLGAPAAFKYFDTTIDRKRYTSTKEVLDATLIHQSITGLYETRIDLSQLGGDGGGGGGSSPAPGGTVSLQDEHRLFDIPVTTSLPDVWLQDFPQAWAETGGLGRAKCQAPIIIDLKPTAVPVSIKQYPMSLEAHMGIRQHIIKFLELGVLRPCRSPWNTPLLPVKKPGTQDYRPVQDLREINKRTVDIHPTVPNPYNLLSTLKPDYSWYTVLDLKDAFFCLPLAPQSQELFAFEWKDPERGISGQLTWTRLPQGFKNSPTLFNEALHRDLTDFRTQHPEVTLLQYVDDLLLAAPTKKACTQGTRHLLQELGEKGYRASAKKAQICQTKVTYLGYILSEGKRWLTPGRIETVARIPPPRNPREVREFLGKAGFCRLFIPGFAELAAPLYALTKPSTPFTWQTEHQLAFEALKKALLSAPALGLPDTSKPFTLFLDERQGIAKGVLTQKLGPWKRPVAYLSKKLDPVAAGWPPCLRIMAATAMLVKDSAKLTLGQPLTVITPHTLEAIVRQPPDRWITNARLTHYQALLLDTDRVQFGPPVTLNPATLLPVPENQPSPHDCRQVLAETHGTREDLKDQELPDADHTWYTDGSSYLDSGTRRAGAAVVDGHNTIWAQSLPPGTSAQKAELIALTKALELSKGKKANIYTDSRYAFATAHTHGSIYERRGWLTSEGKEIKNKAEIIALLKALFLPQEVAIIHCPGHQKGQDPVAVGNRQADRVARQAAMAEVLTLATEPDNTSHITAGKRTADGSEFEKRTADGSEFESPKKKAKVE

SEQ ID NO: 2003 - protein, 2102 aa, synthetic construct
MPAAKRVKLDGGDKKYSIGLDIGTNSVGWAVITDEYKVPSKKFKVLGNTDRHSIKKNLIGALLFDSGETAEATRLKRTARRRYTRRKNRICYLQEIFSNEMAKVDDSFFHRLEESFLVEEDKKHERHPIFGNIVDEVAYHEKYPTIYHLRKKLVDSTDKADLRLIYLALAHMIKFRGHFLIEGDLNPDNSDVDKLFIQLVQTYNQLFEENPINASGVDAKAILSARLSKSRRLENLIAQLPGEKKNGLFGNLIALSLGLTPNFKSNFDLAEDAKLQLSKDTYDDDLDNLLAQIGDQYADLFLAAKNLSDAILLSDILRVNTEITKAPLSASMIKRYDEHHQDLTLLKALVRQQLPEKYKEIFFDQSKNGYAGYIDGGASQEEFYKFIKPILEKMDGTEELLVKLNREDLLRKQRTFDNGSIPHQIHLGELHAILRRQEDFYPFLKDNREKIEKILTFRIPYYVGPLARGNSRFAWMTRKSEETITPWNFEEVVDKGASAQSFIERMTNFDKNLPNEKVLPKHSLLYEYFTVYNELTKVKYVTEGMRKPAFLSGEQKKAIVDLLFKTNRKVTVKQLKEDYFKKIECFDSVEISGVEDRFNASLGTYHDLLKIIKDKDFLDNEENEDILEDIVLTLTLFEDREMIEERLKTYAHLFDDKVMKQLKRRRYTGWGRLSRKLINGIRDKQSGKTILDFLKSDGFANRNFMQLIHDDSLTFKEDIQKAQVSGQGDSLHEHIANLAGSPAIKKGILQTVKVVDELVKVMGRHKPENIVIEMARENQTTQKGQKNSRERMKRIEEGIKELGSQILKEHPVENTQLQNEKLYLYYLQNGRDMYVDQELDINRLSDYDVDHIVPQSFLKDDSIDNKVLTRSDKARGKSDNVPSEEVVKKMKNYWRQLLNAKLITQRKFDNLTKAERGGLSELDKAGFIKRQLVETRQITKHVAQILDSRMNTKYDENDKLIREVKVITLKSKLVSDFRKDFQFYKVREINNYHHAHDAYLNAVVGTALIKKYPKLESEFVYGDYKVYDVRKMIAKSEQEIGKATAKYFFYSNIMNFFKTEITLANGEIRKRPLIETNGETGEIVWDKGRDFATVRKVLSMPQVNIVKKTEVQTGGFSKESILPKRNSDKLIARKKDWDPKKYGGFDSPTVAYSVLVVAKVEKGKSKKLKSVKELLGITIMERSSFEKNPIDFLEAKGYKEVKKDLIIKLPKYSLFELENGRKRMLASAGELQKGNELALPSKYVNFLYLASHYEKLKGSPEDNEQKQLFVEQHKHYLDEIIEQISEFSKRVILADANLDKVLSAYNKHRDKPIREQAENIIHLFTLTNLGAPAAFKYFDTTIDRKRYTSTKEVLDATLIHQSITGLYETRIDLSQLGGDGGGGSGGGEAAAKGGTVSLQDEHRLFDIPVTTSLPDVWLQDFPQAWAETGGLGRAKCQAPIIIDLKPTAVPVSIKQYPMSLEAHMGIRQHIIKFLELGVLRPCRSPWNTPLLPVKKPGTQDYRPVQDLREINKRTVDIHPTVPNPYNLLSTLKPDYSWYTVLDLKDAFFCLPLAPQSQELFAFEWKDPERGISGQLTWTRLPQGFKNSPTLFNEALHRDLTDFRTQHPEVTLLQYVDDLLLAAPTKKACTQGTRHLLQELGEKGYRASAKKAQICQTKVTYLGYILSEGKRWLTPGRIETVARIPPPRNPREVREFLGKAGFCRLFIPGFAELAAPLYALTKPSTPFTWQTEHQLAFEALKKALLSAPALGLPDTSKPFTLFLDERQGIAKGVLTQKLGPWKRPVAYLSKKLDPVAAGWPPCLRIMAATAMLVKDSAKLTLGQPLTVITPHTLEAIVRQPPDRWITNARLTHYQALLLDTDRVQFGPPVTLNPATLLPVPENQPSPHDCRQVLAETHGTREDLKDQELPDADHTWYTDGSSYLDSGTRRAGAAVVDGHNTIWAQSLPPGTSAQKAELIALTKALELSKGKKANIYTDSRYAFATAHTHGSIYERRGWLTSEGKEIKNKAEIIALLKALFLPQEVAIIHCPGHQKGQDPVAVGNRQADRVARQAAMAEVLTLATEPDNTSHITAGKRTADGSEFEKRTADGSEFESPKKKAKVE

SEQ ID NO: 2004 - protein, 2099 aa, synthetic construct
MPAAKRVKLDGGDKKYSIGLDIGTNSVGWAVITDEYKVPSKKFKVLGNTDRHSIKKNLIGALLFDSGETAEATRLKRTARRRYTRRKNRICYLQEIFSNEMAKVDDSFFHRLEESFLVEEDKKHERHPIFGNIVDEVAYHEKYPTIYHLRKKLVDSTDKADLRLIYLALAHMIKFRGHFLIEGDLNPDNSDVDKLFIQLVQTYNQLFEENPINASGVDAKAILSARLSKSRRLENLIAQLPGEKKNGLFGNLIALSLGLTPNFKSNFDLAEDAKLQLSKDTYDDDLDNLLAQIGDQYADLFLAAKNLSDAILLSDILRVNTEITKAPLSASMIKRYDEHHQDLTLLKALVRQQLPEKYKEIFFDQSKNGYAGYIDGGASQEEFYKFIKPILEKMDGTEELLVKLNREDLLRKQRTFDNGSIPHQIHLGELHAILRRQEDFYPFLKDNREKIEKILTFRIPYYVGPLARGNSRFAWMTRKSEETITPWNFEEVVDKGASAQSFIERMTNFDKNLPNEKVLPKHSLLYEYFTVYNELTKVKYVTEGMRKPAFLSGEQKKAIVDLLFKTNRKVTVKQLKEDYFKKIECFDSVEISGVEDRFNASLGTYHDLLKIIKDKDFLDNEENEDILEDIVLTLTLFEDREMIEERLKTYAHLFDDKVMKQLKRRRYTGWGRLSRKLINGIRDKQSGKTILDFLKSDGFANRNFMQLIHDDSLTFKEDIQKAQVSGQGDSLHEHIANLAGSPAIKKGILQTVKVVDELVKVMGRHKPENIVIEMARENQTTQKGQKNSRERMKRIEEGIKELGSQILKEHPVENTQLQNEKLYLYYLQNGRDMYVDQELDINRLSDYDVDHIVPQSFLKDDSIDNKVLTRSDKARGKSDNVPSEEVVKKMKNYWRQLLNAKLITQRKFDNLTKAERGGLSELDKAGFIKRQLVETRQITKHVAQILDSRMNTKYDENDKLIREVKVITLKSKLVSDFRKDFQFYKVREINNYHHAHDAYLNAVVGTALIKKYPKLESEFVYGDYKVYDVRKMIAKSEQEIGKATAKYFFYSNIMNFFKTEITLANGEIRKRPLIETNGETGEIVWDKGRDFATVRKVLSMPQVNIVKKTEVQTGGFSKESILPKRNSDKLIARKKDWDPKKYGGFDSPTVAYSVLVVAKVEKGKSKKLKSVKELLGITIMERSSFEKNPIDFLEAKGYKEVKKDLIIKLPKYSLFELENGRKRMLASAGELQKGNELALPSKYVNFLYLASHYEKLKGSPEDNEQKQLFVEQHKHYLDEIIEQISEFSKRVILADANLDKVLSAYNKHRDKPIREQAENIIHLFTLTNLGAPAAFKYFDTTIDRKRYTSTKEVLDATLIHQSITGLYETRIDLSQLGGDGGGGGEAAAKGGTVSLQDEHRLFDIPVTTSLPDVWLQDFPQAWAETGGLGRAKCQAPIIIDLKPTAVPVSIKQYPMSLEAHMGIRQHIIKFLELGVLRPCRSPWNTPLLPVKKPGTQDYRPVQDLREINKRTVDIHPTVPNPYNLLSTLKPDYSWYTVLDLKDAFFCLPLAPQSQELFAFEWKDPERGISGQLTWTRLPQGFKNSPTLFNEALHRDLTDFRTQHPEVTLLQYVDDLLLAAPTKKACTQGTRHLLQELGEKGYRASAKKAQICQTKVTYLGYILSEGKRWLTPGRIETVARIPPPRNPREVREFLGKAGFCRLFIPGFAELAAPLYALTKPSTPFTWQTEHQLAFEALKKALLSAPALGLPDTSKPFTLFLDERQGIAKGVLTQKLGPWKRPVAYLSKKLDPVAAGWPPCLRIMAATAMLVKDSAKLTLGQPLTVITPHTLEAIVRQPPDRWITNARLTHYQALLLDTDRVQFGPPVTLNPATLLPVPENQPSPHDCRQVLAETHGTREDLKDQELPDADHTWYTDGSSYLDSGTRRAGAAVVDGHNTIWAQSLPPGTSAQKAELIALTKALELSKGKKANIYTDSRYAFATAHTHGSIYERRGWLTSEGKEIKNKAEIIALLKALFLPQEVAIIHCPGHQKGQDPVAVGNRQADRVARQAAMAEVLTLATEPDNTSHITAGKRTADGSEFEKRTADGSEFESPKKKAKVE

SEQ ID NO: 2005 - protein, 2103 aa, synthetic construct
MPAAKRVKLDGGDKKYSIGLDIGTNSVGWAVITDEYKVPSKKFKVLGNTDRHSIKKNLIGALLFDSGETAEATRLKRTARRRYTRRKNRICYLQEIFSNEMAKVDDSFFHRLEESFLVEEDKKHERHPIFGNIVDEVAYHEKYPTIYHLRKKLVDSTDKADLRLIYLALAHMIKFRGHFLIEGDLNPDNSDVDKLFIQLVQTYNQLFEENPINASGVDAKAILSARLSKSRRLENLIAQLPGEKKNGLFGNLIALSLGLTPNFKSNFDLAEDAKLQLSKDTYDDDLDNLLAQIGDQYADLFLAAKNLSDAILLSDILRVNTEITKAPLSASMIKRYDEHHQDLTLLKALVRQQLPEKYKEIFFDQSKNGYAGYIDGGASQEEFYKFIKPILEKMDGTEELLVKLNREDLLRKQRTFDNGSIPHQIHLGELHAILRRQEDFYPFLKDNREKIEKILTFRIPYYVGPLARGNSRFAWMTRKSEETITPWNFEEVVDKGASAQSFIERMTNFDKNLPNEKVLPKHSLLYEYFTVYNELTKVKYVTEGMRKPAFLSGEQKKAIVDLLFKTNRKVTVKQLKEDYFKKIECFDSVEISGVEDRFNASLGTYHDLLKIIKDKDFLDNEENEDILEDIVLTLTLFEDREMIEERLKTYAHLFDDKVMKQLKRRRYTGWGRLSRKLINGIRDKQSGKTILDFLKSDGFANRNFMQLIHDDSLTFKEDIQKAQVSGQGDSLHEHIANLAGSPAIKKGILQTVKVVDELVKVMGRHKPENIVIEMARENQTTQKGQKNSRERMKRIEEGIKELGSQILKEHPVENTQLQNEKLYLYYLQNGRDMYVDQELDINRLSDYDVDHIVPQSFLKDDSIDNKVLTRSDKARGKSDNVPSEEVVKKMKNYWRQLLNAKLITQRKFDNLTKAERGGLSELDKAGFIKRQLVETRQITKHVAQILDSRMNTKYDENDKLIREVKVITLKSKLVSDFRKDFQFYKVREINNYHHAHDAYLNAVVGTALIKKYPKLESEFVYGDYKVYDVRKMIAKSEQEIGKATAKYFFYSNIMNFFKTEITLANGEIRKRPLIETNGETGEIVWDKGRDFATVRKVLSMPQVNIVKKTEVQTGGFSKESILPKRNSDKLIARKKDWDPKKYGGFDSPTVAYSVLVVAKVEKGKSKKLKSVKELLGITIMERSSFEKNPIDFLEAKGYKEVKKDLIIKLPKYSLFELENGRKRMLASAGELQKGNELALPSKYVNFLYLASHYEKLKGSPEDNEQKQLFVEQHKHYLDEIIEQISEFSKRVILADANLDKVLSAYNKHRDKPIREQAENIIHLFTLTNLGAPAAFKYFDTTIDRKRYTSTKEVLDATLIHQSITGLYETRIDLSQLGGDGGGSAGSAAGSGEFGGTVSLQDEHRLFDIPVTTSLPDVWLQDFPQAWAETGGLGRAKCQAPIIIDLKPTAVPVSIKQYPMSLEAHMGIRQHIIKFLELGVLRPCRSPWNTPLLPVKKPGTQDYRPVQDLREINKRTVDIHPTVPNPYNLLSTLKPDYSWYTVLDLKDAFFCLPLAPQSQELFAFEWKDPERGISGQLTWTRLPQGFKNSPTLFNEALHRDLTDFRTQHPEVTLLQYVDDLLLAAPTKKACTQGTRHLLQELGEKGYRASAKKAQICQTKVTYLGYILSEGKRWLTPGRIETVARIPPPRNPREVREFLGKAGFCRLFIPGFAELAAPLYALTKPSTPFTWQTEHQLAFEALKKALLSAPALGLPDTSKPFTLFLDERQGIAKGVLTQKLGPWKRPVAYLSKKLDPVAAGWPPCLRIMAATAMLVKDSAKLTLGQPLTVITPHTLEAIVRQPPDRWITNARLTHYQALLLDTDRVQFGPPVTLNPATLLPVPENQPSPHDCRQVLAETHGTREDLKDQELPDADHTWYTDGSSYLDSGTRRAGAAVVDGHNTIWAQSLPPGTSAQKAELIALTKALELSKGKKANIYTDSRYAFATAHTHGSIYERRGWLTSEGKEIKNKAEIIALLKALFLPQEVAIIHCPGHQKGQDPVAVGNRQADRVARQAAMAEVLTLATEPDNTSHITAGKRTADGSEFEKRTADGSEFESPKKKAKVE

SEQ ID NO: 2006 - protein, 2096 aa, synthetic construct
MPAAKRVKLDGGDKKYSIGLDIGTNSVGWAVITDEYKVPSKKFKVLGNTDRHSIKKNLIGALLFDSGETAEATRLKRTARRRYTRRKNRICYLQEIFSNEMAKVDDSFFHRLEESFLVEEDKKHERHPIFGNIVDEVAYHEKYPTIYHLRKKLVDSTDKADLRLIYLALAHMIKFRGHFLIEGDLNPDNSDVDKLFIQLVQTYNQLFEENPINASGVDAKAILSARLSKSRRLENLIAQLPGEKKNGLFGNLIALSLGLTPNFKSNFDLAEDAKLQLSKDTYDDDLDNLLAQIGDQYADLFLAAKNLSDAILLSDILRVNTEITKAPLSASMIKRYDEHHQDLTLLKALVRQQLPEKYKEIFFDQSKNGYAGYIDGGASQEEFYKFIKPILEKMDGTEELLVKLNREDLLRKQRTFDNGSIPHQIHLGELHAILRRQEDFYPFLKDNREKIEKILTFRIPYYVGPLARGNSRFAWMTRKSEETITPWNFEEVVDKGASAQSFIERMTNFDKNLPNEKVLPKHSLLYEYFTVYNELTKVKYVTEGMRKPAFLSGEQKKAIVDLLFKTNRKVTVKQLKEDYFKKIECFDSVEISGVEDRFNASLGTYHDLLKIIKDKDFLDNEENEDILEDIVLTLTLFEDREMIEERLKTYAHLFDDKVMKQLKRRRYTGWGRLSRKLINGIRDKQSGKTILDFLKSDGFANRNFMQLIHDDSLTFKEDIQKAQVSGQGDSLHEHIANLAGSPAIKKGILQTVKVVDELVKVMGRHKPENIVIEMARENQTTQKGQKNSRERMKRIEEGIKELGSQILKEHPVENTQLQNEKLYLYYLQNGRDMYVDQELDINRLSDYDVDHIVPQSFLKDDSIDNKVLTRSDKARGKSDNVPSEEVVKKMKNYWRQLLNAKLITQRKFDNLTKAERGGLSELDKAGFIKRQLVETRQITKHVAQILDSRMNTKYDENDKLIREVKVITLKSKLVSDFRKDFQFYKVREINNYHHAHDAYLNAVVGTALIKKYPKLESEFVYGDYKVYDVRKMIAKSEQEIGKATAKYFFYSNIMNFFKTEITLANGEIRKRPLIETNGETGEIVWDKGRDFATVRKVLSMPQVNIVKKTEVQTGGFSKESILPKRNSDKLIARKKDWDPKKYGGFDSPTVAYSVLVVAKVEKGKSKKLKSVKELLGITIMERSSFEKNPIDFLEAKGYKEVKKDLIIKLPKYSLFELENGRKRMLASAGELQKGNELALPSKYVNFLYLASHYEKLKGSPEDNEQKQLFVEQHKHYLDEIIEQISEFSKRVILADANLDKVLSAYNKHRDKPIREQAENIIHLFTLTNLGAPAAFKYFDTTIDRKRYTSTKEVLDATLIHQSITGLYETRIDLSQLGGDGGGGGGSGGTVSLQDEHRLFDIPVTTSLPDVWLQDFPQAWAETGGLGRAKCQAPIIIDLKPTAVPVSIKQYPMSLEAHMGIRQHIIKFLELGVLRPCRSPWNTPLLPVKKPGTQDYRPVQDLREINKRTVDIHPTVPNPYNLLSTLKPDYSWYTVLDLKDAFFCLPLAPQSQELFAFEWKDPERGISGQLTWTRLPQGFKNSPTLFNEALHRDLTDFRTQHPEVTLLQYVDDLLLAAPTKKACTQGTRHLLQELGEKGYRASAKKAQICQTKVTYLGYILSEGKRWLTPGRIETVARIPPPRNPREVREFLGKAGFCRLFIPGFAELAAPLYALTKPSTPFTWQTEHQLAFEALKKALLSAPALGLPDTSKPFTLFLDERQGIAKGVLTQKLGPWKRPVAYLSKKLDPVAAGWPPCLRIMAATAMLVKDSAKLTLGQPLTVITPHTLEAIVRQPPDRWITNARLTHYQALLLDTDRVQFGPPVTLNPATLLPVPENQPSPHDCRQVLAETHGTREDLKDQELPDADHTWYTDGSSYLDSGTRRAGAAVVDGHNTIWAQSLPPGTSAQKAELIALTKALELSKGKKANIYTDSRYAFATAHTHGSIYERRGWLTSEGKEIKNKAEIIALLKALFLPQEVAIIHCPGHQKGQDPVAVGNRQADRVARQAAMAEVLTLATEPDNTSHITAGKRTADGSEFEKRTADGSEFESPKKKAKVE

SEQ ID NO: 2007 - protein, 2100 aa, synthetic construct
MPAAKRVKLDGGDKKYSIGLDIGTNSVGWAVITDEYKVPSKKFKVLGNTDRHSIKKNLIGALLFDSGETAEATRLKRTARRRYTRRKNRICYLQEIFSNEMAKVDDSFFHRLEESFLVEEDKKHERHPIFGNIVDEVAYHEKYPTIYHLRKKLVDSTDKADLRLIYLALAHMIKFRGHFLIEGDLNPDNSDVDKLFIQLVQTYNQLFEENPINASGVDAKAILSARLSKSRRLENLIAQLPGEKKNGLFGNLIALSLGLTPNFKSNFDLAEDAKLQLSKDTYDDDLDNLLAQIGDQYADLFLAAKNLSDAILLSDILRVNTEITKAPLSASMIKRYDEHHQDLTLLKALVRQQLPEKYKEIFFDQSKNGYAGYIDGGASQEEFYKFIKPILEKMDGTEELLVKLNREDLLRKQRTFDNGSIPHQIHLGELHAILRRQEDFYPFLKDNREKIEKILTFRIPYYVGPLARGNSRFAWMTRKSEETITPWNFEEVVDKGASAQSFIERMTNFDKNLPNEKVLPKHSLLYEYFTVYNELTKVKYVTEGMRKPAFLSGEQKKAIVDLLFKTNRKVTVKQLKEDYFKKIECFDSVEISGVEDRFNASLGTYHDLLKIIKDKDFLDNEENEDILEDIVLTLTLFEDREMIEERLKTYAHLFDDKVMKQLKRRRYTGWGRLSRKLINGIRDKQSGKTILDFLKSDGFANRNFMQLIHDDSLTFKEDIQKAQVSGQGDSLHEHIANLAGSPAIKKGILQTVKVVDELVKVMGRHKPENIVIEMARENQTTQKGQKNSRERMKRIEEGIKELGSQILKEHPVENTQLQNEKLYLYYLQNGRDMYVDQELDINRLSDYDVDHIVPQSFLKDDSIDNKVLTRSDKARGKSDNVPSEEVVKKMKNYWRQLLNAKLITQRKFDNLTKAERGGLSELDKAGFIKRQLVETRQITKHVAQILDSRMNTKYDENDKLIREVKVITLKSKLVSDFRKDFQFYKVREINNYHHAHDAYLNAVVGTALIKKYPKLESEFVYGDYKVYDVRKMIAKSEQEIGKATAKYFFYSNIMNFFKTEITLANGEIRKRPLIETNGETGEIVWDKGRDFATVRKVLSMPQVNIVKKTEVQTGGFSKESILPKRNSDKLIARKKDWDPKKYGGFDSPTVAYSVLVVAKVEKGKSKKLKSVKELLGITIMERSSFEKNPIDFLEAKGYKEVKKDLIIKLPKYSLFELENGRKRMLASAGELQKGNELALPSKYVNFLYLASHYEKLKGSPEDNEQKQLFVEQHKHYLDEIIEQISEFSKRVILADANLDKVLSAYNKHRDKPIREQAENIIHLFTLTNLGAPAAFKYFDTTIDRKRYTSTKEVLDATLIHQSITGLYETRIDLSQLGGDGGGSSGGGPAPGGTVSLQDEHRLFDIPVTTSLPDVWLQDFPQAWAETGGLGRAKCQAPIIIDLKPTAVPVSIKQYPMSLEAHMGIRQHIIKFLELGVLRPCRSPWNTPLLPVKKPGTQDYRPVQDLREINKRTVDIHPTVPNPYNLLSTLKPDYSWYTVLDLKDAFFCLPLAPQSQELFAFEWKDPERGISGQLTWTRLPQGFKNSPTLFNEALHRDLTDFRTQHPEVTLLQYVDDLLLAAPTKKACTQGTRHLLQELGEKGYRASAKKAQICQTKVTYLGYILSEGKRWLTPGRIETVARIPPPRNPREVREFLGKAGFCRLFIPGFAELAAPLYALTKPSTPFTWQTEHQLAFEALKKALLSAPALGLPDTSKPFTLFLDERQGIAKGVLTQKLGPWKRPVAYLSKKLDPVAAGWPPCLRIMAATAMLVKDSAKLTLGQPLTVITPHTLEAIVRQPPDRWITNARLTHYQALLLDTDRVQFGPPVTLNPATLLPVPENQPSPHDCRQVLAETHGTREDLKDQELPDADHTWYTDGSSYLDSGTRRAGAAVVDGHNTIWAQSLPPGTSAQKAELIALTKALELSKGKKANIYTDSRYAFATAHTHGSIYERRGWLTSEGKEIKNKAEIIALLKALFLPQEVAIIHCPGHQKGQDPVAVGNRQADRVARQAAMAEVLTLATEPDNTSHITAGKRTADGSEFEKRTADGSEFESPKKKAKVE

SEQ ID NO: 2008 - protein, 2096 aa, synthetic construct
MPAAKRVKLDGGDKKYSIGLDIGTNSVGWAVITDEYKVPSKKFKVLGNTDRHSIKKNLIGALLFDSGETAEATRLKRTARRRYTRRKNRICYLQEIFSNEMAKVDDSFFHRLEESFLVEEDKKHERHPIFGNIVDEVAYHEKYPTIYHLRKKLVDSTDKADLRLIYLALAHMIKFRGHFLIEGDLNPDNSDVDKLFIQLVQTYNQLFEENPINASGVDAKAILSARLSKSRRLENLIAQLPGEKKNGLFGNLIALSLGLTPNFKSNFDLAEDAKLQLSKDTYDDDLDNLLAQIGDQYADLFLAAKNLSDAILLSDILRVNTEITKAPLSASMIKRYDEHHQDLTLLKALVRQQLPEKYKEIFFDQSKNGYAGYIDGGASQEEFYKFIKPILEKMDGTEELLVKLNREDLLRKQRTFDNGSIPHQIHLGELHAILRRQEDFYPFLKDNREKIEKILTFRIPYYVGPLARGNSRFAWMTRKSEETITPWNFEEVVDKGASAQSFIERMTNFDKNLPNEKVLPKHSLLYEYFTVYNELTKVKYVTEGMRKPAFLSGEQKKAIVDLLFKTNRKVTVKQLKEDYFKKIECFDSVEISGVEDRFNASLGTYHDLLKIIKDKDFLDNEENEDILEDIVLTLTLFEDREMIEERLKTYAHLFDDKVMKQLKRRRYTGWGRLSRKLINGIRDKQSGKTILDFLKSDGFANRNFMQLIHDDSLTFKEDIQKAQVSGQGDSLHEHIANLAGSPAIKKGILQTVKVVDELVKVMGRHKPENIVIEMARENQTTQKGQKNSRERMKRIEEGIKELGSQILKEHPVENTQLQNEKLYLYYLQNGRDMYVDQELDINRLSDYDVDHIVPQSFLKDDSIDNKVLTRSDKARGKSDNVPSEEVVKKMKNYWRQLLNAKLITQRKFDNLTKAERGGLSELDKAGFIKRQLVETRQITKHVAQILDSRMNTKYDENDKLIREVKVITLKSKLVSDFRKDFQFYKVREINNYHHAHDAYLNAVVGTALIKKYPKLESEFVYGDYKVYDVRKMIAKSEQEIGKATAKYFFYSNIMNFFKTEITLANGEIRKRPLIETNGETGEIVWDKGRDFATVRKVLSMPQVNIVKKTEVQTGGFSKESILPKRNSDKLIARKKDWDPKKYGGFDSPTVAYSVLVVAKVEKGKSKKLKSVKELLGITIMERSSFEKNPIDFLEAKGYKEVKKDLIIKLPKYSLFELENGRKRMLASAGELQKGNELALPSKYVNFLYLASHYEKLKGSPEDNEQKQLFVEQHKHYLDEIIEQISEFSKRVILADANLDKVLSAYNKHRDKPIREQAENIIHLFTLTNLGAPAAFKYFDTTIDRKRYTSTKEVLDATLIHQSITGLYETRIDLSQLGGDGGEAAAKGGTVSLQDEHRLFDIPVTTSLPDVWLQDFPQAWAETGGLGRAKCQAPIIIDLKPTAVPVSIKQYPMSLEAHMGIRQHIIKFLELGVLRPCRSPWNTPLLPVKKPGTQDYRPVQDLREINKRTVDIHPTVPNPYNLLSTLKPDYSWYTVLDLKDAFFCLPLAPQSQELFAFEWKDPERGISGQLTWTRLPQGFKNSPTLFNEALHRDLTDFRTQHPEVTLLQYVDDLLLAAPTKKACTQGTRHLLQELGEKGYRASAKKAQICQTKVTYLGYILSEGKRWLTPGRIETVARIPPPRNPREVREFLGKAGFCRLFIPGFAELAAPLYALTKPSTPFTWQTEHQLAFEALKKALLSAPALGLPDTSKPFTLFLDERQGIAKGVLTQKLGPWKRPVAYLSKKLDPVAAGWPPCLRIMAATAMLVKDSAKLTLGQPLTVITPHTLEAIVRQPPDRWITNARLTHYQALLLDTDRVQFGPPVTLNPATLLPVPENQPSPHDCRQVLAETHGTREDLKDQELPDADHTWYTDGSSYLDSGTRRAGAAVVDGHNTIWAQSLPPGTSAQKAELIALTKALELSKGKKANIYTDSRYAFATAHTHGSIYERRGWLTSEGKEIKNKAEIIALLKALFLPQEVAIIHCPGHQKGQDPVAVGNRQADRVARQAAMAEVLTLATEPDNTSHITAGKRTADGSEFEKRTADGSEFESPKKKAKVE

SEQ ID NO: 2009 - protein, 2102 aa, synthetic construct
MPAAKRVKLDGGDKKYSIGLDIGTNSVGWAVITDEYKVPSKKFKVLGNTDRHSIKKNLIGALLFDSGETAEATRLKRTARRRYTRRKNRICYLQEIFSNEMAKVDDSFFHRLEESFLVEEDKKHERHPIFGNIVDEVAYHEKYPTIYHLRKKLVDSTDKADLRLIYLALAHMIKFRGHFLIEGDLNPDNSDVDKLFIQLVQTYNQLFEENPINASGVDAKAILSARLSKSRRLENLIAQLPGEKKNGLFGNLIALSLGLTPNFKSNFDLAEDAKLQLSKDTYDDDLDNLLAQIGDQYADLFLAAKNLSDAILLSDILRVNTEITKAPLSASMIKRYDEHHQDLTLLKALVRQQLPEKYKEIFFDQSKNGYAGYIDGGASQEEFYKFIKPILEKMDGTEELLVKLNREDLLRKQRTFDNGSIPHQIHLGELHAILRRQEDFYPFLKDNREKIEKILTFRIPYYVGPLARGNSRFAWMTRKSEETITPWNFEEVVDKGASAQSFIERMTNFDKNLPNEKVLPKHSLLYEYFTVYNELTKVKYVTEGMRKPAFLSGEQKKAIVDLLFKTNRKVTVKQLKEDYFKKIECFDSVEISGVEDRFNASLGTYHDLLKIIKDKDFLDNEENEDILEDIVLTLTLFEDREMIEERLKTYAHLFDDKVMKQLKRRRYTGWGRLSRKLINGIRDKQSGKTILDFLKSDGFANRNFMQLIHDDSLTFKEDIQKAQVSGQGDSLHEHIANLAGSPAIKKGILQTVKVVDELVKVMGRHKPENIVIEMARENQTTQKGQKNSRERMKRIEEGIKELGSQILKEHPVENTQLQNEKLYLYYLQNGRDMYVDQELDINRLSDYDVDHIVPQSFLKDDSIDNKVLTRSDKARGKSDNVPSEEVVKKMKNYWRQLLNAKLITQRKFDNLTKAERGGLSELDKAGFIKRQLVETRQITKHVAQILDSRMNTKYDENDKLIREVKVITLKSKLVSDFRKDFQFYKVREINNYHHAHDAYLNAVVGTALIKKYPKLESEFVYGDYKVYDVRKMIAKSEQEIGKATAKYFFYSNIMNFFKTEITLANGEIRKRPLIETNGETGEIVWDKGRDFATVRKVLSMPQVNIVKKTEVQTGGFSKESILPKRNSDKLIARKKDWDPKKYGGFDSPTVAYSVLVVAKVEKGKSKKLKSVKELLGITIMERSSFEKNPIDFLEAKGYKEVKKDLIIKLPKYSLFELENGRKRMLASAGELQKGNELALPSKYVNFLYLASHYEKLKGSPEDNEQKQLFVEQHKHYLDEIIEQISEFSKRVILADANLDKVLSAYNKHRDKPIREQAENIIHLFTLTNLGAPAAFKYFDTTIDRKRYTSTKEVLDATLIHQSITGLYETRIDLSQLGGDGGEAAAKGGGGSSGGTVSLQDEHRLFDIPVTTSLPDVWLQDFPQAWAETGGLGRAKCQAPIIIDLKPTAVPVSIKQYPMSLEAHMGIRQHIIKFLELGVLRPCRSPWNTPLLPVKKPGTQDYRPVQDLREINKRTVDIHPTVPNPYNLLSTLKPDYSWYTVLDLKDAFFCLPLAPQSQELFAFEWKDPERGISGQLTWTRLPQGFKNSPTLFNEALHRDLTDFRTQHPEVTLLQYVDDLLLAAPTKKACTQGTRHLLQELGEKGYRASAKKAQICQTKVTYLGYILSEGKRWLTPGRIETVARIPPPRNPREVREFLGKAGFCRLFIPGFAELAAPLYALTKPSTPFTWQTEHQLAFEALKKALLSAPALGLPDTSKPFTLFLDERQGIAKGVLTQKLGPWKRPVAYLSKKLDPVAAGWPPCLRIMAATAMLVKDSAKLTLGQPLTVITPHTLEAIVRQPPDRWITNARLTHYQALLLDTDRVQFGPPVTLNPATLLPVPENQPSPHDCRQVLAETHGTREDLKDQELPDADHTWYTDGSSYLDSGTRRAGAAVVDGHNTIWAQSLPPGTSAQKAELIALTKALELSKGKKANIYTDSRYAFATAHTHGSIYERRGWLTSEGKEIKNKAEIIALLKALFLPQEVAIIHCPGHQKGQDPVAVGNRQADRVARQAAMAEVLTLATEPDNTSHITAGKRTADGSEFEKRTADGSEFESPKKKAKVE

SEQ ID NO: 2010 - protein, 2100 aa, synthetic construct
MPAAKRVKLDGGDKKYSIGLDIGTNSVGWAVITDEYKVPSKKFKVLGNTDRHSIKKNLIGALLFDSGETAEATRLKRTARRRYTRRKNRICYLQEIFSNEMAKVDDSFFHRLEESFLVEEDKKHERHPIFGNIVDEVAYHEKYPTIYHLRKKLVDSTDKADLRLIYLALAHMIKFRGHFLIEGDLNPDNSDVDKLFIQLVQTYNQLFEENPINASGVDAKAILSARLSKSRRLENLIAQLPGEKKNGLFGNLIALSLGLTPNFKSNFDLAEDAKLQLSKDTYDDDLDNLLAQIGDQYADLFLAAKNLSDAILLSDILRVNTEITKAPLSASMIKRYDEHHQDLTLLKALVRQQLPEKYKEIFFDQSKNGYAGYIDGGASQEEFYKFIKPILEKMDGTEELLVKLNREDLLRKQRTFDNGSIPHQIHLGELHAILRRQEDFYPFLKDNREKIEKILTFRIPYYVGPLARGNSRFAWMTRKSEETITPWNFEEVVDKGASAQSFIERMTNFDKNLPNEKVLPKHSLLYEYFTVYNELTKVKYVTEGMRKPAFLSGEQKKAIVDLLFKTNRKVTVKQLKEDYFKKIECFDSVEISGVEDRFNASLGTYHDLLKIIKDKDFLDNEENEDILEDIVLTLTLFEDREMIEERLKTYAHLFDDKVMKQLKRRRYTGWGRLSRKLINGIRDKQSGKTILDFLKSDGFANRNFMQLIHDDSLTFKEDIQKAQVSGQGDSLHEHIANLAGSPAIKKGILQTVKVVDELVKVMGRHKPENIVIEMARENQTTQKGQKNSRERMKRIEEGIKELGSQILKEHPVENTQLQNEKLYLYYLQNGRDMYVDQELDINRLSDYDVDHIVPQSFLKDDSIDNKVLTRSDKARGKSDNVPSEEVVKKMKNYWRQLLNAKLITQRKFDNLTKAERGGLSELDKAGFIKRQLVETRQITKHVAQILDSRMNTKYDENDKLIREVKVITLKSKLVSDFRKDFQFYKVREINNYHHAHDAYLNAVVGTALIKKYPKLESEFVYGDYKVYDVRKMIAKSEQEIGKATAKYFFYSNIMNFFKTEITLANGEIRKRPLIETNGETGEIVWDKGRDFATVRKVLSMPQVNIVKKTEVQTGGFSKESILPKRNSDKLIARKKDWDPKKYGGFDSPTVAYSVLVVAKVEKGKSKKLKSVKELLGITIMERSSFEKNPIDFLEAKGYKEVKKDLIIKLPKYSLFELENGRKRMLASAGELQKGNELALPSKYVNFLYLASHYEKLKGSPEDNEQKQLFVEQHKHYLDEIIEQISEFSKRVILADANLDKVLSAYNKHRDKPIREQAENIIHLFTLTNLGAPAAFKYFDTTIDRKRYTSTKEVLDATLIHQSITGLYETRIDLSQLGGDGGPAPGGSGGGGGTVSLQDEHRLFDIPVTTSLPDVWLQDFPQAWAETGGLGRAKCQAPIIIDLKPTAVPVSIKQYPMSLEAHMGIRQHIIKFLELGVLRPCRSPWNTPLLPVKKPGTQDYRPVQDLREINKRTVDIHPTVPNPYNLLSTLKPDYSWYTVLDLKDAFFCLPLAPQSQELFAFEWKDPERGISGQLTWTRLPQGFKNSPTLFNEALHRDLTDFRTQHPEVTLLQYVDDLLLAAPTKKACTQGTRHLLQELGEKGYRASAKKAQICQTKVTYLGYILSEGKRWLTPGRIETVARIPPPRNPREVREFLGKAGFCRLFIPGFAELAAPLYALTKPSTPFTWQTEHQLAFEALKKALLSAPALGLPDTSKPFTLFLDERQGIAKGVLTQKLGPWKRPVAYLSKKLDPVAAGWPPCLRIMAATAMLVKDSAKLTLGQPLTVITPHTLEAIVRQPPDRWITNARLTHYQALLLDTDRVQFGPPVTLNPATLLPVPENQPSPHDCRQVLAETHGTREDLKDQELPDADHTWYTDGSSYLDSGTRRAGAAVVDGHNTIWAQSLPPGTSAQKAELIALTKALELSKGKKANIYTDSRYAFATAHTHGSIYERRGWLTSEGKEIKNKAEIIALLKALFLPQEVAIIHCPGHQKGQDPVAVGNRQADRVARQAAMAEVLTLATEPDNTSHITAGKRTADGSEFEKRTADGSEFESPKKKAKVE

SEQ ID NO: 2011 - protein, 2100 aa, synthetic construct
MPAAKRVKLDGGDKKYSIGLDIGTNSVGWAVITDEYKVPSKKFKVLGNTDRHSIKKNLIGALLFDSGETAEATRLKRTARRRYTRRKNRICYLQEIFSNEMAKVDDSFFHRLEESFLVEEDKKHERHPIFGNIVDEVAYHEKYPTIYHLRKKLVDSTDKADLRLIYLALAHMIKFRGHFLIEGDLNPDNSDVDKLFIQLVQTYNQLFEENPINASGVDAKAILSARLSKSRRLENLIAQLPGEKKNGLFGNLIALSLGLTPNFKSNFDLAEDAKLQLSKDTYDDDLDNLLAQIGDQYADLFLAAKNLSDAILLSDILRVNTEITKAPLSASMIKRYDEHHQDLTLLKALVRQQLPEKYKEIFFDQSKNGYAGYIDGGASQEEFYKFIKPILEKMDGTEELLVKLNREDLLRKQRTFDNGSIPHQIHLGELHAILRRQEDFYPFLKDNREKIEKILTFRIPYYVGPLARGNSRFAWMTRKSEETITPWNFEEVVDKGASAQSFIERMTNFDKNLPNEKVLPKHSLLYEYFTVYNELTKVKYVTEGMRKPAFLSGEQKKAIVDLLFKTNRKVTVKQLKEDYFKKIECFDSVEISGVEDRFNASLGTYHDLLKIIKDKDFLDNEENEDILEDIVLTLTLFEDREMIEERLKTYAHLFDDKVMKQLKRRRYTGWGRLSRKLINGIRDKQSGKTILDFLKSDGFANRNFMQLIHDDSLTFKEDIQKAQVSGQGDSLHEHIANLAGSPAIKKGILQTVKVVDELVKVMGRHKPENIVIEMARENQTTQKGQKNSRERMKRIEEGIKELGSQILKEHPVENTQLQNEKLYLYYLQNGRDMYVDQELDINRLSDYDVDHIVPQSFLKDDSIDNKVLTRSDKARGKSDNVPSEEVVKKMKNYWRQLLNAKLITQRKFDNLTKAERGGLSELDKAGFIKRQLVETRQITKHVAQILDSRMNTKYDENDKLIREVKVITLKSKLVSDFRKDFQFYKVREINNYHHAHDAYLNAVVGTALIKKYPKLESEFVYGDYKVYDVRKMIAKSEQEIGKATAKYFFYSNIMNFFKTEITLANGEIRKRPLIETNGETGEIVWDKGRDFATVRKVLSMPQVNIVKKTEVQTGGFSKESILPKRNSDKLIARKKDWDPKKYGGFDSPTVAYSVLVVAKVEKGKSKKLKSVKELLGITIMERSSFEKNPIDFLEAKGYKEVKKDLIIKLPKYSLFELENGRKRMLASAGELQKGNELALPSKYVNFLYLASHYEKLKGSPEDNEQKQLFVEQHKHYLDEIIEQISEFSKRVILADANLDKVLSAYNKHRDKPIREQAENIIHLFTLTNLGAPAAFKYFDTTIDRKRYTSTKEVLDATLIHQSITGLYETRIDLSQLGGDGGGGGPAPGGSGGTVSLQDEHRLFDIPVTTSLPDVWLQDFPQAWAETGGLGRAKCQAPIIIDLKPTAVPVSIKQYPMSLEAHMGIRQHIIKFLELGVLRPCRSPWNTPLLPVKKPGTQDYRPVQDLREINKRTVDIHPTVPNPYNLLSTLKPDYSWYTVLDLKDAFFCLPLAPQSQELFAFEWKDPERGISGQLTWTRLPQGFKNSPTLFNEALHRDLTDFRTQHPEVTLLQYVDDLLLAAPTKKACTQGTRHLLQELGEKGYRASAKKAQICQTKVTYLGYILSEGKRWLTPGRIETVARIPPPRNPREVREFLGKAGFCRLFIPGFAELAAPLYALTKPSTPFTWQTEHQLAFEALKKALLSAPALGLPDTSKPFTLFLDERQGIAKGVLTQKLGPWKRPVAYLSKKLDPVAAGWPPCLRIMAATAMLVKDSAKLTLGQPLTVITPHTLEAIVRQPPDRWITNARLTHYQALLLDTDRVQFGPPVTLNPATLLPVPENQPSPHDCRQVLAETHGTREDLKDQELPDADHTWYTDGSSYLDSGTRRAGAAVVDGHNTIWAQSLPPGTSAQKAELIALTKALELSKGKKANIYTDSRYAFATAHTHGSIYERRGWLTSEGKEIKNKAEIIALLKALFLPQEVAIIHCPGHQKGQDPVAVGNRQADRVARQAAMAEVLTLATEPDNTSHITAGKRTADGSEFEKRTADGSEFESPKKKAKVE

SEQ ID NO: 2012 - protein, 2099 aa, synthetic construct
MPAAKRVKLDGGDKKYSIGLDIGTNSVGWAVITDEYKVPSKKFKVLGNTDRHSIKKNLIGALLFDSGETAEATRLKRTARRRYTRRKNRICYLQEIFSNEMAKVDDSFFHRLEESFLVEEDKKHERHPIFGNIVDEVAYHEKYPTIYHLRKKLVDSTDKADLRLIYLALAHMIKFRGHFLIEGDLNPDNSDVDKLFIQLVQTYNQLFEENPINASGVDAKAILSARLSKSRRLENLIAQLPGEKKNGLFGNLIALSLGLTPNFKSNFDLAEDAKLQLSKDTYDDDLDNLLAQIGDQYADLFLAAKNLSDAILLSDILRVNTEITKAPLSASMIKRYDEHHQDLTLLKALVRQQLPEKYKEIFFDQSKNGYAGYIDGGASQEEFYKFIKPILEKMDGTEELLVKLNREDLLRKQRTFDNGSIPHQIHLGELHAILRRQEDFYPFLKDNREKIEKILTFRIPYYVGPLARGNSRFAWMTRKSEETITPWNFEEVVDKGASAQSFIERMTNFDKNLPNEKVLPKHSLLYEYFTVYNELTKVKYVTEGMRKPAFLSGEQKKAIVDLLFKTNRKVTVKQLKEDYFKKIECFDSVEISGVEDRFNASLGTYHDLLKIIKDKDFLDNEENEDILEDIVLTLTLFEDREMIEERLKTYAHLFDDKVMKQLKRRRYTGWGRLSRKLINGIRDKQSGKTILDFLKSDGFANRNFMQLIHDDSLTFKEDIQKAQVSGQGDSLHEHIANLAGSPAIKKGILQTVKVVDELVKVMGRHKPENIVIEMARENQTTQKGQKNSRERMKRIEEGIKELGSQILKEHPVENTQLQNEKLYLYYLQNGRDMYVDQELDINRLSDYDVDHIVPQSFLKDDSIDNKVLTRSDKARGKSDNVPSEEVVKKMKNYWRQLLNAKLITQRKFDNLTKAERGGLSELDKAGFIKRQLVETRQITKHVAQILDSRMNTKYDENDKLIREVKVITLKSKLVSDFRKDFQFYKVREINNYHHAHDAYLNAVVGTALIKKYPKLESEFVYGDYKVYDVRKMIAKSEQEIGKATAKYFFYSNIMNFFKTEITLANGEIRKRPLIETNGETGEIVWDKGRDFATVRKVLSMPQVNIVKKTEVQTGGFSKESILPKRNSDKLIARKKDWDPKKYGGFDSPTVAYSVLVVAKVEKGKSKKLKSVKELLGITIMERSSFEKNPIDFLEAKGYKEVKKDLIIKLPKYSLFELENGRKRMLASAGELQKGNELALPSKYVNFLYLASHYEKLKGSPEDNEQKQLFVEQHKHYLDEIIEQISEFSKRVILADANLDKVLSAYNKHRDKPIREQAENIIHLFTLTNLGAPAAFKYFDTTIDRKRYTSTKEVLDATLIHQSITGLYETRIDLSQLGGDGGEAAAKGGSGGTVSLQDEHRLFDIPVTTSLPDVWLQDFPQAWAETGGLGRAKCQAPIIIDLKPTAVPVSIKQYPMSLEAHMGIRQHIIKFLELGVLRPCRSPWNTPLLPVKKPGTQDYRPVQDLREINKRTVDIHPTVPNPYNLLSTLKPDYSWYTVLDLKDAFFCLPLAPQSQELFAFEWKDPERGISGQLTWTRLPQGFKNSPTLFNEALHRDLTDFRTQHPEVTLLQYVDDLLLAAPTKKACTQGTRHLLQELGEKGYRASAKKAQICQTKVTYLGYILSEGKRWLTPGRIETVARIPPPRNPREVREFLGKAGFCRLFIPGFAELAAPLYALTKPSTPFTWQTEHQLAFEALKKALLSAPALGLPDTSKPFTLFLDERQGIAKGVLTQKLGPWKRPVAYLSKKLDPVAAGWPPCLRIMAATAMLVKDSAKLTLGQPLTVITPHTLEAIVRQPPDRWITNARLTHYQALLLDTDRVQFGPPVTLNPATLLPVPENQPSPHDCRQVLAETHGTREDLKDQELPDADHTWYTDGSSYLDSGTRRAGAAVVDGHNTIWAQSLPPGTSAQKAELIALTKALELSKGKKANIYTDSRYAFATAHTHGSIYERRGWLTSEGKEIKNKAEIIALLKALFLPQEVAIIHCPGHQKGQDPVAVGNRQADRVARQAAMAEVLTLATEPDNTSHITAGKRTADGSEFEKRTADGSEFESPKKKAKVE

SEQ ID NO: 2013 - protein, 2100 aa, synthetic construct
MPAAKRVKLDGGDKKYSIGLDIGTNSVGWAVITDEYKVPSKKFKVLGNTDRHSIKKNLIGALLFDSGETAEATRLKRTARRRYTRRKNRICYLQEIFSNEMAKVDDSFFHRLEESFLVEEDKKHERHPIFGNIVDEVAYHEKYPTIYHLRKKLVDSTDKADLRLIYLALAHMIKFRGHFLIEGDLNPDNSDVDKLFIQLVQTYNQLFEENPINASGVDAKAILSARLSKSRRLENLIAQLPGEKKNGLFGNLIALSLGLTPNFKSNFDLAEDAKLQLSKDTYDDDLDNLLAQIGDQYADLFLAAKNLSDAILLSDILRVNTEITKAPLSASMIKRYDEHHQDLTLLKALVRQQLPEKYKEIFFDQSKNGYAGYIDGGASQEEFYKFIKPILEKMDGTEELLVKLNREDLLRKQRTFDNGSIPHQIHLGELHAILRRQEDFYPFLKDNREKIEKILTFRIPYYVGPLARGNSRFAWMTRKSEETITPWNFEEVVDKGASAQSFIERMTNFDKNLPNEKVLPKHSLLYEYFTVYNELTKVKYVTEGMRKPAFLSGEQKKAIVDLLFKTNRKVTVKQLKEDYFKKIECFDSVEISGVEDRFNASLGTYHDLLKIIKDKDFLDNEENEDILEDIVLTLTLFEDREMIEERLKTYAHLFDDKVMKQLKRRRYTGWGRLSRKLINGIRDKQSGKTILDFLKSDGFANRNFMQLIHDDSLTFKEDIQKAQVSGQGDSLHEHIANLAGSPAIKKGILQTVKVVDELVKVMGRHKPENIVIEMARENQTTQKGQKNSRERMKRIEEGIKELGSQILKEHPVENTQLQNEKLYLYYLQNGRDMYVDQELDINRLSDYDVDHIVPQSFLKDDSIDNKVLTRSDKARGKSDNVPSEEVVKKMKNYWRQLLNAKLITQRKFDNLTKAERGGLSELDKAGFIKRQLVETRQITKHVAQILDSRMNTKYDENDKLIREVKVITLKSKLVSDFRKDFQFYKVREINNYHHAHDAYLNAVVGTALIKKYPKLESEFVYGDYKVYDVRKMIAKSEQEIGKATAKYFFYSNIMNFFKTEITLANGEIRKRPLIETNGETGEIVWDKGRDFATVRKVLSMPQVNIVKKTEVQTGGFSKESILPKRNSDKLIARKKDWDPKKYGGFDSPTVAYSVLVVAKVEKGKSKKLKSVKELLGITIMERSSFEKNPIDFLEAKGYKEVKKDLIIKLPKYSLFELENGRKRMLASAGELQKGNELALPSKYVNFLYLASHYEKLKGSPEDNEQKQLFVEQHKHYLDEIIEQISEFSKRVILADANLDKVLSAYNKHRDKPIREQAENIIHLFTLTNLGAPAAFKYFDTTIDRKRYTSTKEVLDATLIHQSITGLYETRIDLSQLGGDGGPAPGGGGSSGGTVSLQDEHRLFDIPVTTSLPDVWLQDFPQAWAETGGLGRAKCQAPIIIDLKPTAVPVSIKQYPMSLEAHMGIRQHIIKFLELGVLRPCRSPWNTPLLPVKKPGTQDYRPVQDLREINKRTVDIHPTVPNPYNLLSTLKPDYSWYTVLDLKDAFFCLPLAPQSQELFAFEWKDPERGISGQLTWTRLPQGFKNSPTLFNEALHRDLTDFRTQHPEVTLLQYVDDLLLAAPTKKACTQGTRHLLQELGEKGYRASAKKAQICQTKVTYLGYILSEGKRWLTPGRIETVARIPPPRNPREVREFLGKAGFCRLFIPGFAELAAPLYALTKPSTPFTWQTEHQLAFEALKKALLSAPALGLPDTSKPFTLFLDERQGIAKGVLTQKLGPWKRPVAYLSKKLDPVAAGWPPCLRIMAATAMLVKDSAKLTLGQPLTVITPHTLEAIVRQPPDRWITNARLTHYQALLLDTDRVQFGPPVTLNPATLLPVPENQPSPHDCRQVLAETHGTREDLKDQELPDADHTWYTDGSSYLDSGTRRAGAAVVDGHNTIWAQSLPPGTSAQKAELIALTKALELSKGKKANIYTDSRYAFATAHTHGSIYERRGWLTSEGKEIKNKAEIIALLKALFLPQEVAIIHCPGHQKGQDPVAVGNRQADRVARQAAMAEVLTLATEPDNTSHITAGKRTADGSEFEKRTADGSEFESPKKKAKVE

SEQ ID NO: 2014 - protein, 2102 aa, synthetic construct
MPAAKRVKLDGGDKKYSIGLDIGTNSVGWAVITDEYKVPSKKFKVLGNTDRHSIKKNLIGALLFDSGETAEATRLKRTARRRYTRRKNRICYLQEIFSNEMAKVDDSFFHRLEESFLVEEDKKHERHPIFGNIVDEVAYHEKYPTIYHLRKKLVDSTDKADLRLIYLALAHMIKFRGHFLIEGDLNPDNSDVDKLFIQLVQTYNQLFEENPINASGVDAKAILSARLSKSRRLENLIAQLPGEKKNGLFGNLIALSLGLTPNFKSNFDLAEDAKLQLSKDTYDDDLDNLLAQIGDQYADLFLAAKNLSDAILLSDILRVNTEITKAPLSASMIKRYDEHHQDLTLLKALVRQQLPEKYKEIFFDQSKNGYAGYIDGGASQEEFYKFIKPILEKMDGTEELLVKLNREDLLRKQRTFDNGSIPHQIHLGELHAILRRQEDFYPFLKDNREKIEKILTFRIPYYVGPLARGNSRFAWMTRKSEETITPWNFEEVVDKGASAQSFIERMTNFDKNLPNEKVLPKHSLLYEYFTVYNELTKVKYVTEGMRKPAFLSGEQKKAIVDLLFKTNRKVTVKQLKEDYFKKIECFDSVEISGVEDRFNASLGTYHDLLKIIKDKDFLDNEENEDILEDIVLTLTLFEDREMIEERLKTYAHLFDDKVMKQLKRRRYTGWGRLSRKLINGIRDKQSGKTILDFLKSDGFANRNFMQLIHDDSLTFKEDIQKAQVSGQGDSLHEHIANLAGSPAIKKGILQTVKVVDELVKVMGRHKPENIVIEMARENQTTQKGQKNSRERMKRIEEGIKELGSQILKEHPVENTQLQNEKLYLYYLQNGRDMYVDQELDINRLSDYDVDHIVPQSFLKDDSIDNKVLTRSDKARGKSDNVPSEEVVKKMKNYWRQLLNAKLITQRKFDNLTKAERGGLSELDKAGFIKRQLVETRQITKHVAQILDSRMNTKYDENDKLIREVKVITLKSKLVSDFRKDFQFYKVREINNYHHAHDAYLNAVVGTALIKKYPKLESEFVYGDYKVYDVRKMIAKSEQEIGKATAKYFFYSNIMNFFKTEITLANGEIRKRPLIETNGETGEIVWDKGRDFATVRKVLSMPQVNIVKKTEVQTGGFSKESILPKRNSDKLIARKKDWDPKKYGGFDSPTVAYSVLVVAKVEKGKSKKLKSVKELLGITIMERSSFEKNPIDFLEAKGYKEVKKDLIIKLPKYSLFELENGRKRMLASAGELQKGNELALPSKYVNFLYLASHYEKLKGSPEDNEQKQLFVEQHKHYLDEIIEQISEFSKRVILADANLDKVLSAYNKHRDKPIREQAENIIHLFTLTNLGAPAAFKYFDTTIDRKRYTSTKEVLDATLIHQSITGLYETRIDLSQLGGDGGEAAAKGSSGGGGGTVSLQDEHRLFDIPVTTSLPDVWLQDFPQAWAETGGLGRAKCQAPIIIDLKPTAVPVSIKQYPMSLEAHMGIRQHIIKFLELGVLRPCRSPWNTPLLPVKKPGTQDYRPVQDLREINKRTVDIHPTVPNPYNLLSTLKPDYSWYTVLDLKDAFFCLPLAPQSQELFAFEWKDPERGISGQLTWTRLPQGFKNSPTLFNEALHRDLTDFRTQHPEVTLLQYVDDLLLAAPTKKACTQGTRHLLQELGEKGYRASAKKAQICQTKVTYLGYILSEGKRWLTPGRIETVARIPPPRNPREVREFLGKAGFCRLFIPGFAELAAPLYALTKPSTPFTWQTEHQLAFEALKKALLSAPALGLPDTSKPFTLFLDERQGIAKGVLTQKLGPWKRPVAYLSKKLDPVAAGWPPCLRIMAATAMLVKDSAKLTLGQPLTVITPHTLEAIVRQPPDRWITNARLTHYQALLLDTDRVQFGPPVTLNPATLLPVPENQPSPHDCRQVLAETHGTREDLKDQELPDADHTWYTDGSSYLDSGTRRAGAAVVDGHNTIWAQSLPPGTSAQKAELIALTKALELSKGKKANIYTDSRYAFATAHTHGSIYERRGWLTSEGKEIKNKAEIIALLKALFLPQEVAIIHCPGHQKGQDPVAVGNRQADRVARQAAMAEVLTLATEPDNTSHITAGKRTADGSEFEKRTADGSEFESPKKKAKVE

SEQ ID NO: 2015 - protein, 2100 aa, synthetic construct
MPAAKRVKLDGGDKKYSIGLDIGTNSVGWAVITDEYKVPSKKFKVLGNTDRHSIKKNLIGALLFDSGETAEATRLKRTARRRYTRRKNRICYLQEIFSNEMAKVDDSFFHRLEESFLVEEDKKHERHPIFGNIVDEVAYHEKYPTIYHLRKKLVDSTDKADLRLIYLALAHMIKFRGHFLIEGDLNPDNSDVDKLFIQLVQTYNQLFEENPINASGVDAKAILSARLSKSRRLENLIAQLPGEKKNGLFGNLIALSLGLTPNFKSNFDLAEDAKLQLSKDTYDDDLDNLLAQIGDQYADLFLAAKNLSDAILLSDILRVNTEITKAPLSASMIKRYDEHHQDLTLLKALVRQQLPEKYKEIFFDQSKNGYAGYIDGGASQEEFYKFIKPILEKMDGTEELLVKLNREDLLRKQRTFDNGSIPHQIHLGELHAILRRQEDFYPFLKDNREKIEKILTFRIPYYVGPLARGNSRFAWMTRKSEETITPWNFEEVVDKGASAQSFIERMTNFDKNLPNEKVLPKHSLLYEYFTVYNELTKVKYVTEGMRKPAFLSGEQKKAIVDLLFKTNRKVTVKQLKEDYFKKIECFDSVEISGVEDRFNASLGTYHDLLKIIKDKDFLDNEENEDILEDIVLTLTLFEDREMIEERLKTYAHLFDDKVMKQLKRRRYTGWGRLSRKLINGIRDKQSGKTILDFLKSDGFANRNFMQLIHDDSLTFKEDIQKAQVSGQGDSLHEHIANLAGSPAIKKGILQTVKVVDELVKVMGRHKPENIVIEMARENQTTQKGQKNSRERMKRIEEGIKELGSQILKEHPVENTQLQNEKLYLYYLQNGRDMYVDQELDINRLSDYDVDHIVPQSFLKDDSIDNKVLTRSDKARGKSDNVPSEEVVKKMKNYWRQLLNAKLITQRKFDNLTKAERGGLSELDKAGFIKRQLVETRQITKHVAQILDSRMNTKYDENDKLIREVKVITLKSKLVSDFRKDFQFYKVREINNYHHAHDAYLNAVVGTALIKKYPKLESEFVYGDYKVYDVRKMIAKSEQEIGKATAKYFFYSNIMNFFKTEITLANGEIRKRPLIETNGETGEIVWDKGRDFATVRKVLSMPQVNIVKKTEVQTGGFSKESILPKRNSDKLIARKKDWDPKKYGGFDSPTVAYSVLVVAKVEKGKSKKLKSVKELLGITIMERSSFEKNPIDFLEAKGYKEVKKDLIIKLPKYSLFELENGRKRMLASAGELQKGNELALPSKYVNFLYLASHYEKLKGSPEDNEQKQLFVEQHKHYLDEIIEQISEFSKRVILADANLDKVLSAYNKHRDKPIREQAENIIHLFTLTNLGAPAAFKYFDTTIDRKRYTSTKEVLDATLIHQSITGLYETRIDLSQLGGDGGPAPGGGGGSGGTVSLQDEHRLFDIPVTTSLPDVWLQDFPQAWAETGGLGRAKCQAPIIIDLKPTAVPVSIKQYPMSLEAHMGIRQHIIKFLELGVLRPCRSPWNTPLLPVKKPGTQDYRPVQDLREINKRTVDIHPTVPNPYNLLSTLKPDYSWYTVLDLKDAFFCLPLAPQSQELFAFEWKDPERGISGQLTWTRLPQGFKNSPTLFNEALHRDLTDFRTQHPEVTLLQYVDDLLLAAPTKKACTQGTRHLLQELGEKGYRASAKKAQICQTKVTYLGYILSEGKRWLTPGRIETVARIPPPRNPREVREFLGKAGFCRLFIPGFAELAAPLYALTKPSTPFTWQTEHQLAFEALKKALLSAPALGLPDTSKPFTLFLDERQGIAKGVLTQKLGPWKRPVAYLSKKLDPVAAGWPPCLRIMAATAMLVKDSAKLTLGQPLTVITPHTLEAIVRQPPDRWITNARLTHYQALLLDTDRVQFGPPVTLNPATLLPVPENQPSPHDCRQVLAETHGTREDLKDQELPDADHTWYTDGSSYLDSGTRRAGAAVVDGHNTIWAQSLPPGTSAQKAELIALTKALELSKGKKANIYTDSRYAFATAHTHGSIYERRGWLTSEGKEIKNKAEIIALLKALFLPQEVAIIHCPGHQKGQDPVAVGNRQADRVARQAAMAEVLTLATEPDNTSHITAGKRTADGSEFEKRTADGSEFESPKKKAKVE

SEQ ID NO: 2016 - protein, 2095 aa, synthetic construct
MPAAKRVKLDGGDKKYSIGLDIGTNSVGWAVITDEYKVPSKKFKVLGNTDRHSIKKNLIGALLFDSGETAEATRLKRTARRRYTRRKNRICYLQEIFSNEMAKVDDSFFHRLEESFLVEEDKKHERHPIFGNIVDEVAYHEKYPTIYHLRKKLVDSTDKADLRLIYLALAHMIKFRGHFLIEGDLNPDNSDVDKLFIQLVQTYNQLFEENPINASGVDAKAILSARLSKSRRLENLIAQLPGEKKNGLFGNLIALSLGLTPNFKSNFDLAEDAKLQLSKDTYDDDLDNLLAQIGDQYADLFLAAKNLSDAILLSDILRVNTEITKAPLSASMIKRYDEHHQDLTLLKALVRQQLPEKYKEIFFDQSKNGYAGYIDGGASQEEFYKFIKPILEKMDGTEELLVKLNREDLLRKQRTFDNGSIPHQIHLGELHAILRRQEDFYPFLKDNREKIEKILTFRIPYYVGPLARGNSRFAWMTRKSEETITPWNFEEVVDKGASAQSFIERMTNFDKNLPNEKVLPKHSLLYEYFTVYNELTKVKYVTEGMRKPAFLSGEQKKAIVDLLFKTNRKVTVKQLKEDYFKKIECFDSVEISGVEDRFNASLGTYHDLLKIIKDKDFLDNEENEDILEDIVLTLTLFEDREMIEERLKTYAHLFDDKVMKQLKRRRYTGWGRLSRKLINGIRDKQSGKTILDFLKSDGFANRNFMQLIHDDSLTFKEDIQKAQVSGQGDSLHEHIANLAGSPAIKKGILQTVKVVDELVKVMGRHKPENIVIEMARENQTTQKGQKNSRERMKRIEEGIKELGSQILKEHPVENTQLQNEKLYLYYLQNGRDMYVDQELDINRLSDYDVDHIVPQSFLKDDSIDNKVLTRSDKARGKSDNVPSEEVVKKMKNYWRQLLNAKLITQRKFDNLTKAERGGLSELDKAGFIKRQLVETRQITKHVAQILDSRMNTKYDENDKLIREVKVITLKSKLVSDFRKDFQFYKVREINNYHHAHDAYLNAVVGTALIKKYPKLESEFVYGDYKVYDVRKMIAKSEQEIGKATAKYFFYSNIMNFFKTEITLANGEIRKRPLIETNGETGEIVWDKGRDFATVRKVLSMPQVNIVKKTEVQTGGFSKESILPKRNSDKLIARKKDWDPKKYGGFDSPTVAYSVLVVAKVEKGKSKKLKSVKELLGITIMERSSFEKNPIDFLEAKGYKEVKKDLIIKLPKYSLFELENGRKRMLASAGELQKGNELALPSKYVNFLYLASHYEKLKGSPEDNEQKQLFVEQHKHYLDEIIEQISEFSKRVILADANLDKVLSAYNKHRDKPIREQAENIIHLFTLTNLGAPAAFKYFDTTIDRKRYTSTKEVLDATLIHQSITGLYETRIDLSQLGGDGGGGGGGGTVSLQDEHRLFDIPVTTSLPDVWLQDFPQAWAETGGLGRAKCQAPIIIDLKPTAVPVSIKQYPMSLEAHMGIRQHIIKFLELGVLRPCRSPWNTPLLPVKKPGTQDYRPVQDLREINKRTVDIHPTVPNPYNLLSTLKPDYSWYTVLDLKDAFFCLPLAPQSQELFAFEWKDPERGISGQLTWTRLPQGFKNSPTLFNEALHRDLTDFRTQHPEVTLLQYVDDLLLAAPTKKACTQGTRHLLQELGEKGYRASAKKAQICQTKVTYLGYILSEGKRWLTPGRIETVARIPPPRNPREVREFLGKAGFCRLFIPGFAELAAPLYALTKPSTPFTWQTEHQLAFEALKKALLSAPALGLPDTSKPFTLFLDERQGIAKGVLTQKLGPWKRPVAYLSKKLDPVAAGWPPCLRIMAATAMLVKDSAKLTLGQPLTVITPHTLEAIVRQPPDRWITNARLTHYQALLLDTDRVQFGPPVTLNPATLLPVPENQPSPHDCRQVLAETHGTREDLKDQELPDADHTWYTDGSSYLDSGTRRAGAAVVDGHNTIWAQSLPPGTSAQKAELIALTKALELSKGKKANIYTDSRYAFATAHTHGSIYERRGWLTSEGKEIKNKAEIIALLKALFLPQEVAIIHCPGHQKGQDPVAVGNRQADRVARQAAMAEVLTLATEPDNTSHITAGKRTADGSEFEKRTADGSEFESPKKKAKVE

SEQ ID NO: 2017 - protein, 2102 aa, synthetic construct
MPAAKRVKLDGGDKKYSIGLDIGTNSVGWAVITDEYKVPSKKFKVLGNTDRHSIKKNLIGALLFDSGETAEATRLKRTARRRYTRRKNRICYLQEIFSNEMAKVDDSFFHRLEESFLVEEDKKHERHPIFGNIVDEVAYHEKYPTIYHLRKKLVDSTDKADLRLIYLALAHMIKFRGHFLIEGDLNPDNSDVDKLFIQLVQTYNQLFEENPINASGVDAKAILSARLSKSRRLENLIAQLPGEKKNGLFGNLIALSLGLTPNFKSNFDLAEDAKLQLSKDTYDDDLDNLLAQIGDQYADLFLAAKNLSDAILLSDILRVNTEITKAPLSASMIKRYDEHHQDLTLLKALVRQQLPEKYKEIFFDQSKNGYAGYIDGGASQEEFYKFIKPILEKMDGTEELLVKLNREDLLRKQRTFDNGSIPHQIHLGELHAILRRQEDFYPFLKDNREKIEKILTFRIPYYVGPLARGNSRFAWMTRKSEETITPWNFEEVVDKGASAQSFIERMTNFDKNLPNEKVLPKHSLLYEYFTVYNELTKVKYVTEGMRKPAFLSGEQKKAIVDLLFKTNRKVTVKQLKEDYFKKIECFDSVEISGVEDRFNASLGTYHDLLKIIKDKDFLDNEENEDILEDIVLTLTLFEDREMIEERLKTYAHLFDDKVMKQLKRRRYTGWGRLSRKLINGIRDKQSGKTILDFLKSDGFANRNFMQLIHDDSLTFKEDIQKAQVSGQGDSLHEHIANLAGSPAIKKGILQTVKVVDELVKVMGRHKPENIVIEMARENQTTQKGQKNSRERMKRIEEGIKELGSQILKEHPVENTQLQNEKLYLYYLQNGRDMYVDQELDINRLSDYDVDHIVPQSFLKDDSIDNKVLTRSDKARGKSDNVPSEEVVKKMKNYWRQLLNAKLITQRKFDNLTKAERGGLSELDKAGFIKRQLVETRQITKHVAQILDSRMNTKYDENDKLIREVKVITLKSKLVSDFRKDFQFYKVREINNYHHAHDAYLNAVVGTALIKKYPKLESEFVYGDYKVYDVRKMIAKSEQEIGKATAKYFFYSNIMNFFKTEITLANGEIRKRPLIETNGETGEIVWDKGRDFATVRKVLSMPQVNIVKKTEVQTGGFSKESILPKRNSDKLIARKKDWDPKKYGGFDSPTVAYSVLVVAKVEKGKSKKLKSVKELLGITIMERSSFEKNPIDFLEAKGYKEVKKDLIIKLPKYSLFELENGRKRMLASAGELQKGNELALPSKYVNFLYLASHYEKLKGSPEDNEQKQLFVEQHKHYLDEIIEQISEFSKRVILADANLDKVLSAYNKHRDKPIREQAENIIHLFTLTNLGAPAAFKYFDTTIDRKRYTSTKEVLDATLIHQSITGLYETRIDLSQLGGDGGGGGEAAAKGSSGGTVSLQDEHRLFDIPVTTSLPDVWLQDFPQAWAETGGLGRAKCQAPIIIDLKPTAVPVSIKQYPMSLEAHMGIRQHIIKFLELGVLRPCRSPWNTPLLPVKKPGTQDYRPVQDLREINKRTVDIHPTVPNPYNLLSTLKPDYSWYTVLDLKDAFFCLPLAPQSQELFAFEWKDPERGISGQLTWTRLPQGFKNSPTLFNEALHRDLTDFRTQHPEVTLLQYVDDLLLAAPTKKACTQGTRHLLQELGEKGYRASAKKAQICQTKVTYLGYILSEGKRWLTPGRIETVARIPPPRNPREVREFLGKAGFCRLFIPGFAELAAPLYALTKPSTPFTWQTEHQLAFEALKKALLSAPALGLPDTSKPFTLFLDERQGIAKGVLTQKLGPWKRPVAYLSKKLDPVAAGWPPCLRIMAATAMLVKDSAKLTLGQPLTVITPHTLEAIVRQPPDRWITNARLTHYQALLLDTDRVQFGPPVTLNPATLLPVPENQPSPHDCRQVLAETHGTREDLKDQELPDADHTWYTDGSSYLDSGTRRAGAAVVDGHNTIWAQSLPPGTSAQKAELIALTKALELSKGKKANIYTDSRYAFATAHTHGSIYERRGWLTSEGKEIKNKAEIIALLKALFLPQEVAIIHCPGHQKGQDPVAVGNRQADRVARQAAMAEVLTLATEPDNTSHITAGKRTADGSEFEKRTADGSEFESPKKKAKVE

SEQ ID NO: 2018 - protein, 2104 aa, synthetic construct
MPAAKRVKLDGGDKKYSIGLDIGTNSVGWAVITDEYKVPSKKFKVLGNTDRHSIKKNLIGALLFDSGETAEATRLKRTARRRYTRRKNRICYLQEIFSNEMAKVDDSFFHRLEESFLVEEDKKHERHPIFGNIVDEVAYHEKYPTIYHLRKKLVDSTDKADLRLIYLALAHMIKFRGHFLIEGDLNPDNSDVDKLFIQLVQTYNQLFEENPINASGVDAKAILSARLSKSRRLENLIAQLPGEKKNGLFGNLIALSLGLTPNFKSNFDLAEDAKLQLSKDTYDDDLDNLLAQIGDQYADLFLAAKNLSDAILLSDILRVNTEITKAPLSASMIKRYDEHHQDLTLLKALVRQQLPEKYKEIFFDQSKNGYAGYIDGGASQEEFYKFIKPILEKMDGTEELLVKLNREDLLRKQRTFDNGSIPHQIHLGELHAILRRQEDFYPFLKDNREKIEKILTFRIPYYVGPLARGNSRFAWMTRKSEETITPWNFEEVVDKGASAQSFIERMTNFDKNLPNEKVLPKHSLLYEYFTVYNELTKVKYVTEGMRKPAFLSGEQKKAIVDLLFKTNRKVTVKQLKEDYFKKIECFDSVEISGVEDRFNASLGTYHDLLKIIKDKDFLDNEENEDILEDIVLTLTLFEDREMIEERLKTYAHLFDDKVMKQLKRRRYTGWGRLSRKLINGIRDKQSGKTILDFLKSDGFANRNFMQLIHDDSLTFKEDIQKAQVSGQGDSLHEHIANLAGSPAIKKGILQTVKVVDELVKVMGRHKPENIVIEMARENQTTQKGQKNSRERMKRIEEGIKELGSQILKEHPVENTQLQNEKLYLYYLQNGRDMYVDQELDINRLSDYDVDHIVPQSFLKDDSIDNKVLTRSDKARGKSDNVPSEEVVKKMKNYWRQLLNAKLITQRKFDNLTKAERGGLSELDKAGFIKRQLVETRQITKHVAQILDSRMNTKYDENDKLIREVKVITLKSKLVSDFRKDFQFYKVREINNYHHAHDAYLNAVVGTALIKKYPKLESEFVYGDYKVYDVRKMIAKSEQEIGKATAKYFFYSNIMNFFKTEITLANGEIRKRPLIETNGETGEIVWDKGRDFATVRKVLSMPQVNIVKKTEVQTGGFSKESILPKRNSDKLIARKKDWDPKKYGGFDSPTVAYSVLVVAKVEKGKSKKLKSVKELLGITIMERSSFEKNPIDFLEAKGYKEVKKDLIIKLPKYSLFELENGRKRMLASAGELQKGNELALPSKYVNFLYLASHYEKLKGSPEDNEQKQLFVEQHKHYLDEIIEQISEFSKRVILADANLDKVLSAYNKHRDKPIREQAENIIHLFTLTNLGAPAAFKYFDTTIDRKRYTSTKEVLDATLIHQSITGLYETRIDLSQLGGDGGPAPAPAPAPAPAPGGTVSLQDEHRLFDIPVTTSLPDVWLQDFPQAWAETGGLGRAKCQAPIIIDLKPTAVPVSIKQYPMSLEAHMGIRQHIIKFLELGVLRPCRSPWNTPLLPVKKPGTQDYRPVQDLREINKRTVDIHPTVPNPYNLLSTLKPDYSWYTVLDLKDAFFCLPLAPQSQELFAFEWKDPERGISGQLTWTRLPQGFKNSPTLFNEALHRDLTDFRTQHPEVTLLQYVDDLLLAAPTKKACTQGTRHLLQELGEKGYRASAKKAQICQTKVTYLGYILSEGKRWLTPGRIETVARIPPPRNPREVREFLGKAGFCRLFIPGFAELAAPLYALTKPSTPFTWQTEHQLAFEALKKALLSAPALGLPDTSKPFTLFLDERQGIAKGVLTQKLGPWKRPVAYLSKKLDPVAAGWPPCLRIMAATAMLVKDSAKLTLGQPLTVITPHTLEAIVRQPPDRWITNARLTHYQALLLDTDRVQFGPPVTLNPATLLPVPENQPSPHDCRQVLAETHGTREDLKDQELPDADHTWYTDGSSYLDSGTRRAGAAVVDGHNTIWAQSLPPGTSAQKAELIALTKALELSKGKKANIYTDSRYAFATAHTHGSIYERRGWLTSEGKEIKNKAEIIALLKALFLPQEVAIIHCPGHQKGQDPVAVGNRQADRVARQAAMAEVLTLATEPDNTSHITAGKRTADGSEFEKRTADGSEFESPKKKAKVE

SEQ ID NO: 2019 - protein, 2100 aa, synthetic construct
MPAAKRVKLDGGDKKYSIGLDIGTNSVGWAVITDEYKVPSKKFKVLGNTDRHSIKKNLIGALLFDSGETAEATRLKRTARRRYTRRKNRICYLQEIFSNEMAKVDDSFFHRLEESFLVEEDKKHERHPIFGNIVDEVAYHEKYPTIYHLRKKLVDSTDKADLRLIYLALAHMIKFRGHFLIEGDLNPDNSDVDKLFIQLVQTYNQLFEENPINASGVDAKAILSARLSKSRRLENLIAQLPGEKKNGLFGNLIALSLGLTPNFKSNFDLAEDAKLQLSKDTYDDDLDNLLAQIGDQYADLFLAAKNLSDAILLSDILRVNTEITKAPLSASMIKRYDEHHQDLTLLKALVRQQLPEKYKEIFFDQSKNGYAGYIDGGASQEEFYKFIKPILEKMDGTEELLVKLNREDLLRKQRTFDNGSIPHQIHLGELHAILRRQEDFYPFLKDNREKIEKILTFRIPYYVGPLARGNSRFAWMTRKSEETITPWNFEEVVDKGASAQSFIERMTNFDKNLPNEKVLPKHSLLYEYFTVYNELTKVKYVTEGMRKPAFLSGEQKKAIVDLLFKTNRKVTVKQLKEDYFKKIECFDSVEISGVEDRFNASLGTYHDLLKIIKDKDFLDNEENEDILEDIVLTLTLFEDREMIEERLKTYAHLFDDKVMKQLKRRRYTGWGRLSRKLINGIRDKQSGKTILDFLKSDGFANRNFMQLIHDDSLTFKEDIQKAQVSGQGDSLHEHIANLAGSPAIKKGILQTVKVVDELVKVMGRHKPENIVIEMARENQTTQKGQKNSRERMKRIEEGIKELGSQILKEHPVENTQLQNEKLYLYYLQNGRDMYVDQELDINRLSDYDVDHIVPQSFLKDDSIDNKVLTRSDKARGKSDNVPSEEVVKKMKNYWRQLLNAKLITQRKFDNLTKAERGGLSELDKAGFIKRQLVETRQITKHVAQILDSRMNTKYDENDKLIREVKVITLKSKLVSDFRKDFQFYKVREINNYHHAHDAYLNAVVGTALIKKYPKLESEFVYGDYKVYDVRKMIAKSEQEIGKATAKYFFYSNIMNFFKTEITLANGEIRKRPLIETNGETGEIVWDKGRDFATVRKVLSMPQVNIVKKTEVQTGGFSKESILPKRNSDKLIARKKDWDPKKYGGFDSPTVAYSVLVVAKVEKGKSKKLKSVKELLGITIMERSSFEKNPIDFLEAKGYKEVKKDLIIKLPKYSLFELENGRKRMLASAGELQKGNELALPSKYVNFLYLASHYEKLKGSPEDNEQKQLFVEQHKHYLDEIIEQISEFSKRVILADANLDKVLSAYNKHRDKPIREQAENIIHLFTLTNLGAPAAFKYFDTTIDRKRYTSTKEVLDATLIHQSITGLYETRIDLSQLGGDGGPAPGSSGGGGGTVSLQDEHRLFDIPVTTSLPDVWLQDFPQAWAETGGLGRAKCQAPIIIDLKPTAVPVSIKQYPMSLEAHMGIRQHIIKFLELGVLRPCRSPWNTPLLPVKKPGTQDYRPVQDLREINKRTVDIHPTVPNPYNLLSTLKPDYSWYTVLDLKDAFFCLPLAPQSQELFAFEWKDPERGISGQLTWTRLPQGFKNSPTLFNEALHRDLTDFRTQHPEVTLLQYVDDLLLAAPTKKACTQGTRHLLQELGEKGYRASAKKAQICQTKVTYLGYILSEGKRWLTPGRIETVARIPPPRNPREVREFLGKAGFCRLFIPGFAELAAPLYALTKPSTPFTWQTEHQLAFEALKKALLSAPALGLPDTSKPFTLFLDERQGIAKGVLTQKLGPWKRPVAYLSKKLDPVAAGWPPCLRIMAATAMLVKDSAKLTLGQPLTVITPHTLEAIVRQPPDRWITNARLTHYQALLLDTDRVQFGPPVTLNPATLLPVPENQPSPHDCRQVLAETHGTREDLKDQELPDADHTWYTDGSSYLDSGTRRAGAAVVDGHNTIWAQSLPPGTSAQKAELIALTKALELSKGKKANIYTDSRYAFATAHTHGSIYERRGWLTSEGKEIKNKAEIIALLKALFLPQEVAIIHCPGHQKGQDPVAVGNRQADRVARQAAMAEVLTLATEPDNTSHITAGKRTADGSEFEKRTADGSEFESPKKKAKVE

SEQ ID NO: 2020 - protein, 2100 aa, synthetic construct
MPAAKRVKLDGGDKKYSIGLDIGTNSVGWAVITDEYKVPSKKFKVLGNTDRHSIKKNLIGALLFDSGETAEATRLKRTARRRYTRRKNRICYLQEIFSNEMAKVDDSFFHRLEESFLVEEDKKHERHPIFGNIVDEVAYHEKYPTIYHLRKKLVDSTDKADLRLIYLALAHMIKFRGHFLIEGDLNPDNSDVDKLFIQLVQTYNQLFEENPINASGVDAKAILSARLSKSRRLENLIAQLPGEKKNGLFGNLIALSLGLTPNFKSNFDLAEDAKLQLSKDTYDDDLDNLLAQIGDQYADLFLAAKNLSDAILLSDILRVNTEITKAPLSASMIKRYDEHHQDLTLLKALVRQQLPEKYKEIFFDQSKNGYAGYIDGGASQEEFYKFIKPILEKMDGTEELLVKLNREDLLRKQRTFDNGSIPHQIHLGELHAILRRQEDFYPFLKDNREKIEKILTFRIPYYVGPLARGNSRFAWMTRKSEETITPWNFEEVVDKGASAQSFIERMTNFDKNLPNEKVLPKHSLLYEYFTVYNELTKVKYVTEGMRKPAFLSGEQKKAIVDLLFKTNRKVTVKQLKEDYFKKIECFDSVEISGVEDRFNASLGTYHDLLKIIKDKDFLDNEENEDILEDIVLTLTLFEDREMIEERLKTYAHLFDDKVMKQLKRRRYTGWGRLSRKLINGIRDKQSGKTILDFLKSDGFANRNFMQLIHDDSLTFKEDIQKAQVSGQGDSLHEHIANLAGSPAIKKGILQTVKVVDELVKVMGRHKPENIVIEMARENQTTQKGQKNSRERMKRIEEGIKELGSQILKEHPVENTQLQNEKLYLYYLQNGRDMYVDQELDINRLSDYDVDHIVPQSFLKDDSIDNKVLTRSDKARGKSDNVPSEEVVKKMKNYWRQLLNAKLITQRKFDNLTKAERGGLSELDKAGFIKRQLVETRQITKHVAQILDSRMNTKYDENDKLIREVKVITLKSKLVSDFRKDFQFYKVREINNYHHAHDAYLNAVVGTALIKKYPKLESEFVYGDYKVYDVRKMIAKSEQEIGKATAKYFFYSNIMNFFKTEITLANGEIRKRPLIETNGETGEIVWDKGRDFATVRKVLSMPQVNIVKKTEVQTGGFSKESILPKRNSDKLIARKKDWDPKKYGGFDSPTVAYSVLVVAKVEKGKSKKLKSVKELLGITIMERSSFEKNPIDFLEAKGYKEVKKDLIIKLPKYSLFELENGRKRMLASAGELQKGNELALPSKYVNFLYLASHYEKLKGSPEDNEQKQLFVEQHKHYLDEIIEQISEFSKRVILADANLDKVLSAYNKHRDKPIREQAENIIHLFTLTNLGAPAAFKYFDTTIDRKRYTSTKEVLDATLIHQSITGLYETRIDLSQLGGDGGGSSGGSPAPGGTVSLQDEHRLFDIPVTTSLPDVWLQDFPQAWAETGGLGRAKCQAPIIIDLKPTAVPVSIKQYPMSLEAHMGIRQHIIKFLELGVLRPCRSPWNTPLLPVKKPGTQDYRPVQDLREINKRTVDIHPTVPNPYNLLSTLKPDYSWYTVLDLKDAFFCLPLAPQSQELFAFEWKDPERGISGQLTWTRLPQGFKNSPTLFNEALHRDLTDFRTQHPEVTLLQYVDDLLLAAPTKKACTQGTRHLLQELGEKGYRASAKKAQICQTKVTYLGYILSEGKRWLTPGRIETVARIPPPRNPREVREFLGKAGFCRLFIPGFAELAAPLYALTKPSTPFTWQTEHQLAFEALKKALLSAPALGLPDTSKPFTLFLDERQGIAKGVLTQKLGPWKRPVAYLSKKLDPVAAGWPPCLRIMAATAMLVKDSAKLTLGQPLTVITPHTLEAIVRQPPDRWITNARLTHYQALLLDTDRVQFGPPVTLNPATLLPVPENQPSPHDCRQVLAETHGTREDLKDQELPDADHTWYTDGSSYLDSGTRRAGAAVVDGHNTIWAQSLPPGTSAQKAELIALTKALELSKGKKANIYTDSRYAFATAHTHGSIYERRGWLTSEGKEIKNKAEIIALLKALFLPQEVAIIHCPGHQKGQDPVAVGNRQADRVARQAAMAEVLTLATEPDNTSHITAGKRTADGSEFEKRTADGSEFESPKKKAKVE

SEQ ID NO: 2021 - protein, 2097 aa, synthetic construct
MPAAKRVKLDGGDKKYSIGLDIGTNSVGWAVITDEYKVPSKKFKVLGNTDRHSIKKNLIGALLFDSGETAEATRLKRTARRRYTRRKNRICYLQEIFSNEMAKVDDSFFHRLEESFLVEEDKKHERHPIFGNIVDEVAYHEKYPTIYHLRKKLVDSTDKADLRLIYLALAHMIKFRGHFLIEGDLNPDNSDVDKLFIQLVQTYNQLFEENPINASGVDAKAILSARLSKSRRLENLIAQLPGEKKNGLFGNLIALSLGLTPNFKSNFDLAEDAKLQLSKDTYDDDLDNLLAQIGDQYADLFLAAKNLSDAILLSDILRVNTEITKAPLSASMIKRYDEHHQDLTLLKALVRQQLPEKYKEIFFDQSKNGYAGYIDGGASQEEFYKFIKPILEKMDGTEELLVKLNREDLLRKQRTFDNGSIPHQIHLGELHAILRRQEDFYPFLKDNREKIEKILTFRIPYYVGPLARGNSRFAWMTRKSEETITPWNFEEVVDKGASAQSFIERMTNFDKNLPNEKVLPKHSLLYEYFTVYNELTKVKYVTEGMRKPAFLSGEQKKAIVDLLFKTNRKVTVKQLKEDYFKKIECFDSVEISGVEDRFNASLGTYHDLLKIIKDKDFLDNEENEDILEDIVLTLTLFEDREMIEERLKTYAHLFDDKVMKQLKRRRYTGWGRLSRKLINGIRDKQSGKTILDFLKSDGFANRNFMQLIHDDSLTFKEDIQKAQVSGQGDSLHEHIANLAGSPAIKKGILQTVKVVDELVKVMGRHKPENIVIEMARENQTTQKGQKNSRERMKRIEEGIKELGSQILKEHPVENTQLQNEKLYLYYLQNGRDMYVDQELDINRLSDYDVDHIVPQSFLKDDSIDNKVLTRSDKARGKSDNVPSEEVVKKMKNYWRQLLNAKLITQRKFDNLTKAERGGLSELDKAGFIKRQLVETRQITKHVAQILDSRMNTKYDENDKLIREVKVITLKSKLVSDFRKDFQFYKVREINNYHHAHDAYLNAVVGTALIKKYPKLESEFVYGDYKVYDVRKMIAKSEQEIGKATAKYFFYSNIMNFFKTEITLANGEIRKRPLIETNGETGEIVWDKGRDFATVRKVLSMPQVNIVKKTEVQTGGFSKESILPKRNSDKLIARKKDWDPKKYGGFDSPTVAYSVLVVAKVEKGKSKKLKSVKELLGITIMERSSFEKNPIDFLEAKGYKEVKKDLIIKLPKYSLFELENGRKRMLASAGELQKGNELALPSKYVNFLYLASHYEKLKGSPEDNEQKQLFVEQHKHYLDEIIEQISEFSKRVILADANLDKVLSAYNKHRDKPIREQAENIIHLFTLTNLGAPAAFKYFDTTIDRKRYTSTKEVLDATLIHQSITGLYETRIDLSQLGGDGGGGSPAPGGTVSLQDEHRLFDIPVTTSLPDVWLQDFPQAWAETGGLGRAKCQAPIIIDLKPTAVPVSIKQYPMSLEAHMGIRQHIIKFLELGVLRPCRSPWNTPLLPVKKPGTQDYRPVQDLREINKRTVDIHPTVPNPYNLLSTLKPDYSWYTVLDLKDAFFCLPLAPQSQELFAFEWKDPERGISGQLTWTRLPQGFKNSPTLFNEALHRDLTDFRTQHPEVTLLQYVDDLLLAAPTKKACTQGTRHLLQELGEKGYRASAKKAQICQTKVTYLGYILSEGKRWLTPGRIETVARIPPPRNPREVREFLGKAGFCRLFIPGFAELAAPLYALTKPSTPFTWQTEHQLAFEALKKALLSAPALGLPDTSKPFTLFLDERQGIAKGVLTQKLGPWKRPVAYLSKKLDPVAAGWPPCLRIMAATAMLVKDSAKLTLGQPLTVITPHTLEAIVRQPPDRWITNARLTHYQALLLDTDRVQFGPPVTLNPATLLPVPENQPSPHDCRQVLAETHGTREDLKDQELPDADHTWYTDGSSYLDSGTRRAGAAVVDGHNTIWAQSLPPGTSAQKAELIALTKALELSKGKKANIYTDSRYAFATAHTHGSIYERRGWLTSEGKEIKNKAEIIALLKALFLPQEVAIIHCPGHQKGQDPVAVGNRQADRVARQAAMAEVLTLATEPDNTSHITAGKRTADGSEFEKRTADGSEFESPKKKAKVE

SEQ ID NO: 2022 - protein, 2102 aa, synthetic construct
MPAAKRVKLDGGDKKYSIGLDIGTNSVGWAVITDEYKVPSKKFKVLGNTDRHSIKKNLIGALLFDSGETAEATRLKRTARRRYTRRKNRICYLQEIFSNEMAKVDDSFFHRLEESFLVEEDKKHERHPIFGNIVDEVAYHEKYPTIYHLRKKLVDSTDKADLRLIYLALAHMIKFRGHFLIEGDLNPDNSDVDKLFIQLVQTYNQLFEENPINASGVDAKAILSARLSKSRRLENLIAQLPGEKKNGLFGNLIALSLGLTPNFKSNFDLAEDAKLQLSKDTYDDDLDNLLAQIGDQYADLFLAAKNLSDAILLSDILRVNTEITKAPLSASMIKRYDEHHQDLTLLKALVRQQLPEKYKEIFFDQSKNGYAGYIDGGASQEEFYKFIKPILEKMDGTEELLVKLNREDLLRKQRTFDNGSIPHQIHLGELHAILRRQEDFYPFLKDNREKIEKILTFRIPYYVGPLARGNSRFAWMTRKSEETITPWNFEEVVDKGASAQSFIERMTNFDKNLPNEKVLPKHSLLYEYFTVYNELTKVKYVTEGMRKPAFLSGEQKKAIVDLLFKTNRKVTVKQLKEDYFKKIECFDSVEISGVEDRFNASLGTYHDLLKIIKDKDFLDNEENEDILEDIVLTLTLFEDREMIEERLKTYAHLFDDKVMKQLKRRRYTGWGRLSRKLINGIRDKQSGKTILDFLKSDGFANRNFMQLIHDDSLTFKEDIQKAQVSGQGDSLHEHIANLAGSPAIKKGILQTVKVVDELVKVMGRHKPENIVIEMARENQTTQKGQKNSRERMKRIEEGIKELGSQILKEHPVENTQLQNEKLYLYYLQNGRDMYVDQELDINRLSDYDVDHIVPQSFLKDDSIDNKVLTRSDKARGKSDNVPSEEVVKKMKNYWRQLLNAKLITQRKFDNLTKAERGGLSELDKAGFIKRQLVETRQITKHVAQILDSRMNTKYDENDKLIREVKVITLKSKLVSDFRKDFQFYKVREINNYHHAHDAYLNAVVGTALIKKYPKLESEFVYGDYKVYDVRKMIAKSEQEIGKATAKYFFYSNIMNFFKTEITLANGEIRKRPLIETNGETGEIVWDKGRDFATVRKVLSMPQVNIVKKTEVQTGGFSKESILPKRNSDKLIARKKDWDPKKYGGFDSPTVAYSVLVVAKVEKGKSKKLKSVKELLGITIMERSSFEKNPIDFLEAKGYKEVKKDLIIKLPKYSLFELENGRKRMLASAGELQKGNELALPSKYVNFLYLASHYEKLKGSPEDNEQKQLFVEQHKHYLDEIIEQISEFSKRVILADANLDKVLSAYNKHRDKPIREQAENIIHLFTLTNLGAPAAFKYFDTTIDRKRYTSTKEVLDATLIHQSITGLYETRIDLSQLGGDGGEAAAKPAPGSSGGTVSLQDEHRLFDIPVTTSLPDVWLQDFPQAWAETGGLGRAKCQAPIIIDLKPTAVPVSIKQYPMSLEAHMGIRQHIIKFLELGVLRPCRSPWNTPLLPVKKPGTQDYRPVQDLREINKRTVDIHPTVPNPYNLLSTLKPDYSWYTVLDLKDAFFCLPLAPQSQELFAFEWKDPERGISGQLTWTRLPQGFKNSPTLFNEALHRDLTDFRTQHPEVTLLQYVDDLLLAAPTKKACTQGTRHLLQELGEKGYRASAKKAQICQTKVTYLGYILSEGKRWLTPGRIETVARIPPPRNPREVREFLGKAGFCRLFIPGFAELAAPLYALTKPSTPFTWQTEHQLAFEALKKALLSAPALGLPDTSKPFTLFLDERQGIAKGVLTQKLGPWKRPVAYLSKKLDPVAAGWPPCLRIMAATAMLVKDSAKLTLGQPLTVITPHTLEAIVRQPPDRWITNARLTHYQALLLDTDRVQFGPPVTLNPATLLPVPENQPSPHDCRQVLAETHGTREDLKDQELPDADHTWYTDGSSYLDSGTRRAGAAVVDGHNTIWAQSLPPGTSAQKAELIALTKALELSKGKKANIYTDSRYAFATAHTHGSIYERRGWLTSEGKEIKNKAEIIALLKALFLPQEVAIIHCPGHQKGQDPVAVGNRQADRVARQAAMAEVLTLATEPDNTSHITAGKRTADGSEFEKRTADGSEFESPKKKAKVE

SEQ ID NO: 2023 - protein, 2094 aa, synthetic construct
MPAAKRVKLDGGDKKYSIGLDIGTNSVGWAVITDEYKVPSKKFKVLGNTDRHSIKKNLIGALLFDSGETAEATRLKRTARRRYTRRKNRICYLQEIFSNEMAKVDDSFFHRLEESFLVEEDKKHERHPIFGNIVDEVAYHEKYPTIYHLRKKLVDSTDKADLRLIYLALAHMIKFRGHFLIEGDLNPDNSDVDKLFIQLVQTYNQLFEENPINASGVDAKAILSARLSKSRRLENLIAQLPGEKKNGLFGNLIALSLGLTPNFKSNFDLAEDAKLQLSKDTYDDDLDNLLAQIGDQYADLFLAAKNLSDAILLSDILRVNTEITKAPLSASMIKRYDEHHQDLTLLKALVRQQLPEKYKEIFFDQSKNGYAGYIDGGASQEEFYKFIKPILEKMDGTEELLVKLNREDLLRKQRTFDNGSIPHQIHLGELHAILRRQEDFYPFLKDNREKIEKILTFRIPYYVGPLARGNSRFAWMTRKSEETITPWNFEEVVDKGASAQSFIERMTNFDKNLPNEKVLPKHSLLYEYFTVYNELTKVKYVTEGMRKPAFLSGEQKKAIVDLLFKTNRKVTVKQLKEDYFKKIECFDSVEISGVEDRFNASLGTYHDLLKIIKDKDFLDNEENEDILEDIVLTLTLFEDREMIEERLKTYAHLFDDKVMKQLKRRRYTGWGRLSRKLINGIRDKQSGKTILDFLKSDGFANRNFMQLIHDDSLTFKEDIQKAQVSGQGDSLHEHIANLAGSPAIKKGILQTVKVVDELVKVMGRHKPENIVIEMARENQTTQKGQKNSRERMKRIEEGIKELGSQILKEHPVENTQLQNEKLYLYYLQNGRDMYVDQELDINRLSDYDVDHIVPQSFLKDDSIDNKVLTRSDKARGKSDNVPSEEVVKKMKNYWRQLLNAKLITQRKFDNLTKAERGGLSELDKAGFIKRQLVETRQITKHVAQILDSRMNTKYDENDKLIREVKVITLKSKLVSDFRKDFQFYKVREINNYHHAHDAYLNAVVGTALIKKYPKLESEFVYGDYKVYDVRKMIAKSEQEIGKATAKYFFYSNIMNFFKTEITLANGEIRKRPLIETNGETGEIVWDKGRDFATVRKVLSMPQVNIVKKTEVQTGGFSKESILPKRNSDKLIARKKDWDPKKYGGFDSPTVAYSVLVVAKVEKGKSKKLKSVKELLGITIMERSSFEKNPIDFLEAKGYKEVKKDLIIKLPKYSLFELENGRKRMLASAGELQKGNELALPSKYVNFLYLASHYEKLKGSPEDNEQKQLFVEQHKHYLDEIIEQISEFSKRVILADANLDKVLSAYNKHRDKPIREQAENIIHLFTLTNLGAPAAFKYFDTTIDRKRYTSTKEVLDATLIHQSITGLYETRIDLSQLGGDGGPAPGGTVSLQDEHRLFDIPVTTSLPDVWLQDFPQAWAETGGLGRAKCQAPIIIDLKPTAVPVSIKQYPMSLEAHMGIRQHIIKFLELGVLRPCRSPWNTPLLPVKKPGTQDYRPVQDLREINKRTVDIHPTVPNPYNLLSTLKPDYSWYTVLDLKDAFFCLPLAPQSQELFAFEWKDPERGISGQLTWTRLPQGFKNSPTLFNEALHRDLTDFRTQHPEVTLLQYVDDLLLAAPTKKACTQGTRHLLQELGEKGYRASAKKAQICQTKVTYLGYILSEGKRWLTPGRIETVARIPPPRNPREVREFLGKAGFCRLFIPGFAELAAPLYALTKPSTPFTWQTEHQLAFEALKKALLSAPALGLPDTSKPFTLFLDERQGIAKGVLTQKLGPWKRPVAYLSKKLDPVAAGWPPCLRIMAATAMLVKDSAKLTLGQPLTVITPHTLEAIVRQPPDRWITNARLTHYQALLLDTDRVQFGPPVTLNPATLLPVPENQPSPHDCRQVLAETHGTREDLKDQELPDADHTWYTDGSSYLDSGTRRAGAAVVDGHNTIWAQSLPPGTSAQKAELIALTKALELSKGKKANIYTDSRYAFATAHTHGSIYERRGWLTSEGKEIKNKAEIIALLKALFLPQEVAIIHCPGHQKGQDPVAVGNRQADRVARQAAMAEVLTLATEPDNTSHITAGKRTADGSEFEKRTADGSEFESPKKKAKVE

SEQ ID NO: 2024 - protein, 2097 aa, synthetic construct
MPAAKRVKLDGGDKKYSIGLDIGTNSVGWAVITDEYKVPSKKFKVLGNTDRHSIKKNLIGALLFDSGETAEATRLKRTARRRYTRRKNRICYLQEIFSNEMAKVDDSFFHRLEESFLVEEDKKHERHPIFGNIVDEVAYHEKYPTIYHLRKKLVDSTDKADLRLIYLALAHMIKFRGHFLIEGDLNPDNSDVDKLFIQLVQTYNQLFEENPINASGVDAKAILSARLSKSRRLENLIAQLPGEKKNGLFGNLIALSLGLTPNFKSNFDLAEDAKLQLSKDTYDDDLDNLLAQIGDQYADLFLAAKNLSDAILLSDILRVNTEITKAPLSASMIKRYDEHHQDLTLLKALVRQQLPEKYKEIFFDQSKNGYAGYIDGGASQEEFYKFIKPILEKMDGTEELLVKLNREDLLRKQRTFDNGSIPHQIHLGELHAILRRQEDFYPFLKDNREKIEKILTFRIPYYVGPLARGNSRFAWMTRKSEETITPWNFEEVVDKGASAQSFIERMTNFDKNLPNEKVLPKHSLLYEYFTVYNELTKVKYVTEGMRKPAFLSGEQKKAIVDLLFKTNRKVTVKQLKEDYFKKIECFDSVEISGVEDRFNASLGTYHDLLKIIKDKDFLDNEENEDILEDIVLTLTLFEDREMIEERLKTYAHLFDDKVMKQLKRRRYTGWGRLSRKLINGIRDKQSGKTILDFLKSDGFANRNFMQLIHDDSLTFKEDIQKAQVSGQGDSLHEHIANLAGSPAIKKGILQTVKVVDELVKVMGRHKPENIVIEMARENQTTQKGQKNSRERMKRIEEGIKELGSQILKEHPVENTQLQNEKLYLYYLQNGRDMYVDQELDINRLSDYDVDHIVPQSFLKDDSIDNKVLTRSDKARGKSDNVPSEEVVKKMKNYWRQLLNAKLITQRKFDNLTKAERGGLSELDKAGFIKRQLVETRQITKHVAQILDSRMNTKYDENDKLIREVKVITLKSKLVSDFRKDFQFYKVREINNYHHAHDAYLNAVVGTALIKKYPKLESEFVYGDYKVYDVRKMIAKSEQEIGKATAKYFFYSNIMNFFKTEITLANGEIRKRPLIETNGETGEIVWDKGRDFATVRKVLSMPQVNIVKKTEVQTGGFSKESILPKRNSDKLIARKKDWDPKKYGGFDSPTVAYSVLVVAKVEKGKSKKLKSVKELLGITIMERSSFEKNPIDFLEAKGYKEVKKDLIIKLPKYSLFELENGRKRMLASAGELQKGNELALPSKYVNFLYLASHYEKLKGSPEDNEQKQLFVEQHKHYLDEIIEQISEFSKRVILADANLDKVLSAYNKHRDKPIREQAENIIHLFTLTNLGAPAAFKYFDTTIDRKRYTSTKEVLDATLIHQSITGLYETRIDLSQLGGDGGGGSGGSGGTVSLQDEHRLFDIPVTTSLPDVWLQDFPQAWAETGGLGRAKCQAPIIIDLKPTAVPVSIKQYPMSLEAHMGIRQHIIKFLELGVLRPCRSPWNTPLLPVKKPGTQDYRPVQDLREINKRTVDIHPTVPNPYNLLSTLKPDYSWYTVLDLKDAFFCLPLAPQSQELFAFEWKDPERGISGQLTWTRLPQGFKNSPTLFNEALHRDLTDFRTQHPEVTLLQYVDDLLLAAPTKKACTQGTRHLLQELGEKGYRASAKKAQICQTKVTYLGYILSEGKRWLTPGRIETVARIPPPRNPREVREFLGKAGFCRLFIPGFAELAAPLYALTKPSTPFTWQTEHQLAFEALKKALLSAPALGLPDTSKPFTLFLDERQGIAKGVLTQKLGPWKRPVAYLSKKLDPVAAGWPPCLRIMAATAMLVKDSAKLTLGQPLTVITPHTLEAIVRQPPDRWITNARLTHYQALLLDTDRVQFGPPVTLNPATLLPVPENQPSPHDCRQVLAETHGTREDLKDQELPDADHTWYTDGSSYLDSGTRRAGAAVVDGHNTIWAQSLPPGTSAQKAELIALTKALELSKGKKANIYTDSRYAFATAHTHGSIYERRGWLTSEGKEIKNKAEIIALLKALFLPQEVAIIHCPGHQKGQDPVAVGNRQADRVARQAAMAEVLTLATEPDNTSHITAGKRTADGSEFEKRTADGSEFESPKKKAKVE

SEQ ID NO: 2025 - protein, 2102 aa, synthetic construct
MPAAKRVKLDGGDKKYSIGLDIGTNSVGWAVITDEYKVPSKKFKVLGNTDRHSIKKNLIGALLFDSGETAEATRLKRTARRRYTRRKNRICYLQEIFSNEMAKVDDSFFHRLEESFLVEEDKKHERHPIFGNIVDEVAYHEKYPTIYHLRKKLVDSTDKADLRLIYLALAHMIKFRGHFLIEGDLNPDNSDVDKLFIQLVQTYNQLFEENPINASGVDAKAILSARLSKSRRLENLIAQLPGEKKNGLFGNLIALSLGLTPNFKSNFDLAEDAKLQLSKDTYDDDLDNLLAQIGDQYADLFLAAKNLSDAILLSDILRVNTEITKAPLSASMIKRYDEHHQDLTLLKALVRQQLPEKYKEIFFDQSKNGYAGYIDGGASQEEFYKFIKPILEKMDGTEELLVKLNREDLLRKQRTFDNGSIPHQIHLGELHAILRRQEDFYPFLKDNREKIEKILTFRIPYYVGPLARGNSRFAWMTRKSEETITPWNFEEVVDKGASAQSFIERMTNFDKNLPNEKVLPKHSLLYEYFTVYNELTKVKYVTEGMRKPAFLSGEQKKAIVDLLFKTNRKVTVKQLKEDYFKKIECFDSVEISGVEDRFNASLGTYHDLLKIIKDKDFLDNEENEDILEDIVLTLTLFEDREMIEERLKTYAHLFDDKVMKQLKRRRYTGWGRLSRKLINGIRDKQSGKTILDFLKSDGFANRNFMQLIHDDSLTFKEDIQKAQVSGQGDSLHEHIANLAGSPAIKKGILQTVKVVDELVKVMGRHKPENIVIEMARENQTTQKGQKNSRERMKRIEEGIKELGSQILKEHPVENTQLQNEKLYLYYLQNGRDMYVDQELDINRLSDYDVDHIVPQSFLKDDSIDNKVLTRSDKARGKSDNVPSEEVVKKMKNYWRQLLNAKLITQRKFDNLTKAERGGLSELDKAGFIKRQLVETRQITKHVAQILDSRMNTKYDENDKLIREVKVITLKSKLVSDFRKDFQFYKVREINNYHHAHDAYLNAVVGTALIKKYPKLESEFVYGDYKVYDVRKMIAKSEQEIGKATAKYFFYSNIMNFFKTEITLANGEIRKRPLIETNGETGEIVWDKGRDFATVRKVLSMPQVNIVKKTEVQTGGFSKESILPKRNSDKLIARKKDWDPKKYGGFDSPTVAYSVLVVAKVEKGKSKKLKSVKELLGITIMERSSFEKNPIDFLEAKGYKEVKKDLIIKLPKYSLFELENGRKRMLASAGELQKGNELALPSKYVNFLYLASHYEKLKGSPEDNEQKQLFVEQHKHYLDEIIEQISEFSKRVILADANLDKVLSAYNKHRDKPIREQAENIIHLFTLTNLGAPAAFKYFDTTIDRKRYTSTKEVLDATLIHQSITGLYETRIDLSQLGGDGGGSSGGSEAAAKGGTVSLQDEHRLFDIPVTTSLPDVWLQDFPQAWAETGGLGRAKCQAPIIIDLKPTAVPVSIKQYPMSLEAHMGIRQHIIKFLELGVLRPCRSPWNTPLLPVKKPGTQDYRPVQDLREINKRTVDIHPTVPNPYNLLSTLKPDYSWYTVLDLKDAFFCLPLAPQSQELFAFEWKDPERGISGQLTWTRLPQGFKNSPTLFNEALHRDLTDFRTQHPEVTLLQYVDDLLLAAPTKKACTQGTRHLLQELGEKGYRASAKKAQICQTKVTYLGYILSEGKRWLTPGRIETVARIPPPRNPREVREFLGKAGFCRLFIPGFAELAAPLYALTKPSTPFTWQTEHQLAFEALKKALLSAPALGLPDTSKPFTLFLDERQGIAKGVLTQKLGPWKRPVAYLSKKLDPVAAGWPPCLRIMAATAMLVKDSAKLTLGQPLTVITPHTLEAIVRQPPDRWITNARLTHYQALLLDTDRVQFGPPVTLNPATLLPVPENQPSPHDCRQVLAETHGTREDLKDQELPDADHTWYTDGSSYLDSGTRRAGAAVVDGHNTIWAQSLPPGTSAQKAELIALTKALELSKGKKANIYTDSRYAFATAHTHGSIYERRGWLTSEGKEIKNKAEIIALLKALFLPQEVAIIHCPGHQKGQDPVAVGNRQADRVARQAAMAEVLTLATEPDNTSHITAGKRTADGSEFEKRTADGSEFESPKKKAKVE

SEQ ID NO: 2026 - protein, 2100 aa, synthetic construct
MPAAKRVKLDGGDKKYSIGLDIGTNSVGWAVITDEYKVPSKKFKVLGNTDRHSIKKNLIGALLFDSGETAEATRLKRTARRRYTRRKNRICYLQEIFSNEMAKVDDSFFHRLEESFLVEEDKKHERHPIFGNIVDEVAYHEKYPTIYHLRKKLVDSTDKADLRLIYLALAHMIKFRGHFLIEGDLNPDNSDVDKLFIQLVQTYNQLFEENPINASGVDAKAILSARLSKSRRLENLIAQLPGEKKNGLFGNLIALSLGLTPNFKSNFDLAEDAKLQLSKDTYDDDLDNLLAQIGDQYADLFLAAKNLSDAILLSDILRVNTEITKAPLSASMIKRYDEHHQDLTLLKALVRQQLPEKYKEIFFDQSKNGYAGYIDGGASQEEFYKFIKPILEKMDGTEELLVKLNREDLLRKQRTFDNGSIPHQIHLGELHAILRRQEDFYPFLKDNREKIEKILTFRIPYYVGPLARGNSRFAWMTRKSEETITPWNFEEVVDKGASAQSFIERMTNFDKNLPNEKVLPKHSLLYEYFTVYNELTKVKYVTEGMRKPAFLSGEQKKAIVDLLFKTNRKVTVKQLKEDYFKKIECFDSVEISGVEDRFNASLGTYHDLLKIIKDKDFLDNEENEDILEDIVLTLTLFEDREMIEERLKTYAHLFDDKVMKQLKRRRYTGWGRLSRKLINGIRDKQSGKTILDFLKSDGFANRNFMQLIHDDSLTFKEDIQKAQVSGQGDSLHEHIANLAGSPAIKKGILQTVKVVDELVKVMGRHKPENIVIEMARENQTTQKGQKNSRERMKRIEEGIKELGSQILKEHPVENTQLQNEKLYLYYLQNGRDMYVDQELDINRLSDYDVDHIVPQSFLKDDSIDNKVLTRSDKARGKSDNVPSEEVVKKMKNYWRQLLNAKLITQRKFDNLTKAERGGLSELDKAGFIKRQLVETRQITKHVAQILDSRMNTKYDENDKLIREVKVITLKSKLVSDFRKDFQFYKVREINNYHHAHDAYLNAVVGTALIKKYPKLESEFVYGDYKVYDVRKMIAKSEQEIGKATAKYFFYSNIMNFFKTEITLANGEIRKRPLIETNGETGEIVWDKGRDFATVRKVLSMPQVNIVKKTEVQTGGFSKESILPKRNSDKLIARKKDWDPKKYGGFDSPTVAYSVLVVAKVEKGKSKKLKSVKELLGITIMERSSFEKNPIDFLEAKGYKEVKKDLIIKLPKYSLFELENGRKRMLASAGELQKGNELALPSKYVNFLYLASHYEKLKGSPEDNEQKQLFVEQHKHYLDEIIEQISEFSKRVILADANLDKVLSAYNKHRDKPIREQAENIIHLFTLTNLGAPAAFKYFDTTIDRKRYTSTKEVLDATLIHQSITGLYETRIDLSQLGGDGGGGGGGSGSSGGTVSLQDEHRLFDIPVTTSLPDVWLQDFPQAWAETGGLGRAKCQAPIIIDLKPTAVPVSIKQYPMSLEAHMGIRQHIIKFLELGVLRPCRSPWNTPLLPVKKPGTQDYRPVQDLREINKRTVDIHPTVPNPYNLLSTLKPDYSWYTVLDLKDAFFCLPLAPQSQELFAFEWKDPERGISGQLTWTRLPQGFKNSPTLFNEALHRDLTDFRTQHPEVTLLQYVDDLLLAAPTKKACTQGTRHLLQELGEKGYRASAKKAQICQTKVTYLGYILSEGKRWLTPGRIETVARIPPPRNPREVREFLGKAGFCRLFIPGFAELAAPLYALTKPSTPFTWQTEHQLAFEALKKALLSAPALGLPDTSKPFTLFLDERQGIAKGVLTQKLGPWKRPVAYLSKKLDPVAAGWPPCLRIMAATAMLVKDSAKLTLGQPLTVITPHTLEAIVRQPPDRWITNARLTHYQALLLDTDRVQFGPPVTLNPATLLPVPENQPSPHDCRQVLAETHGTREDLKDQELPDADHTWYTDGSSYLDSGTRRAGAAVVDGHNTIWAQSLPPGTSAQKAELIALTKALELSKGKKANIYTDSRYAFATAHTHGSIYERRGWLTSEGKEIKNKAEIIALLKALFLPQEVAIIHCPGHQKGQDPVAVGNRQADRVARQAAMAEVLTLATEPDNTSHITAGKRTADGSEFEKRTADGSEFESPKKKAKVE

SEQ ID NO: 2027 - protein, 2102 aa, synthetic construct
MPAAKRVKLDGGDKKYSIGLDIGTNSVGWAVITDEYKVPSKKFKVLGNTDRHSIKKNLIGALLFDSGETAEATRLKRTARRRYTRRKNRICYLQEIFSNEMAKVDDSFFHRLEESFLVEEDKKHERHPIFGNIVDEVAYHEKYPTIYHLRKKLVDSTDKADLRLIYLALAHMIKFRGHFLIEGDLNPDNSDVDKLFIQLVQTYNQLFEENPINASGVDAKAILSARLSKSRRLENLIAQLPGEKKNGLFGNLIALSLGLTPNFKSNFDLAEDAKLQLSKDTYDDDLDNLLAQIGDQYADLFLAAKNLSDAILLSDILRVNTEITKAPLSASMIKRYDEHHQDLTLLKALVRQQLPEKYKEIFFDQSKNGYAGYIDGGASQEEFYKFIKPILEKMDGTEELLVKLNREDLLRKQRTFDNGSIPHQIHLGELHAILRRQEDFYPFLKDNREKIEKILTFRIPYYVGPLARGNSRFAWMTRKSEETITPWNFEEVVDKGASAQSFIERMTNFDKNLPNEKVLPKHSLLYEYFTVYNELTKVKYVTEGMRKPAFLSGEQKKAIVDLLFKTNRKVTVKQLKEDYFKKIECFDSVEISGVEDRFNASLGTYHDLLKIIKDKDFLDNEENEDILEDIVLTLTLFEDREMIEERLKTYAHLFDDKVMKQLKRRRYTGWGRLSRKLINGIRDKQSGKTILDFLKSDGFANRNFMQLIHDDSLTFKEDIQKAQVSGQGDSLHEHIANLAGSPAIKKGILQTVKVVDELVKVMGRHKPENIVIEMARENQTTQKGQKNSRERMKRIEEGIKELGSQILKEHPVENTQLQNEKLYLYYLQNGRDMYVDQELDINRLSDYDVDHIVPQSFLKDDSIDNKVLTRSDKARGKSDNVPSEEVVKKMKNYWRQLLNAKLITQRKFDNLTKAERGGLSELDKAGFIKRQLVETRQITKHVAQILDSRMNTKYDENDKLIREVKVITLKSKLVSDFRKDFQFYKVREINNYHHAHDAYLNAVVGTALIKKYPKLESEFVYGDYKVYDVRKMIAKSEQEIGKATAKYFFYSNIMNFFKTEITLANGEIRKRPLIETNGETGEIVWDKGRDFATVRKVLSMPQVNIVKKTEVQTGGFSKESILPKRNSDKLIARKKDWDPKKYGGFDSPTVAYSVLVVAKVEKGKSKKLKSVKELLGITIMERSSFEKNPIDFLEAKGYKEVKKDLIIKLPKYSLFELENGRKRMLASAGELQKGNELALPSKYVNFLYLASHYEKLKGSPEDNEQKQLFVEQHKHYLDEIIEQISEFSKRVILADANLDKVLSAYNKHRDKPIREQAENIIHLFTLTNLGAPAAFKYFDTTIDRKRYTSTKEVLDATLIHQSITGLYETRIDLSQLGGDGGEAAAKGGSPAPGGTVSLQDEHRLFDIPVTTSLPDVWLQDFPQAWAETGGLGRAKCQAPIIIDLKPTAVPVSIKQYPMSLEAHMGIRQHIIKFLELGVLRPCRSPWNTPLLPVKKPGTQDYRPVQDLREINKRTVDIHPTVPNPYNLLSTLKPDYSWYTVLDLKDAFFCLPLAPQSQELFAFEWKDPERGISGQLTWTRLPQGFKNSPTLFNEALHRDLTDFRTQHPEVTLLQYVDDLLLAAPTKKACTQGTRHLLQELGEKGYRASAKKAQICQTKVTYLGYILSEGKRWLTPGRIETVARIPPPRNPREVREFLGKAGFCRLFIPGFAELAAPLYALTKPSTPFTWQTEHQLAFEALKKALLSAPALGLPDTSKPFTLFLDERQGIAKGVLTQKLGPWKRPVAYLSKKLDPVAAGWPPCLRIMAATAMLVKDSAKLTLGQPLTVITPHTLEAIVRQPPDRWITNARLTHYQALLLDTDRVQFGPPVTLNPATLLPVPENQPSPHDCRQVLAETHGTREDLKDQELPDADHTWYTDGSSYLDSGTRRAGAAVVDGHNTIWAQSLPPGTSAQKAELIALTKALELSKGKKANIYTDSRYAFATAHTHGSIYERRGWLTSEGKEIKNKAEIIALLKALFLPQEVAIIHCPGHQKGQDPVAVGNRQADRVARQAAMAEVLTLATEPDNTSHITAGKRTADGSEFEKRTADGSEFESPKKKAKVE

SEQ ID NO: 2028 - protein, 2102 aa, synthetic construct
MPAAKRVKLDGGDKKYSIGLDIGTNSVGWAVITDEYKVPSKKFKVLGNTDRHSIKKNLIGALLFDSGETAEATRLKRTARRRYTRRKNRICYLQEIFSNEMAKVDDSFFHRLEESFLVEEDKKHERHPIFGNIVDEVAYHEKYPTIYHLRKKLVDSTDKADLRLIYLALAHMIKFRGHFLIEGDLNPDNSDVDKLFIQLVQTYNQLFEENPINASGVDAKAILSARLSKSRRLENLIAQLPGEKKNGLFGNLIALSLGLTPNFKSNFDLAEDAKLQLSKDTYDDDLDNLLAQIGDQYADLFLAAKNLSDAILLSDILRVNTEITKAPLSASMIKRYDEHHQDLTLLKALVRQQLPEKYKEIFFDQSKNGYAGYIDGGASQEEFYKFIKPILEKMDGTEELLVKLNREDLLRKQRTFDNGSIPHQIHLGELHAILRRQEDFYPFLKDNREKIEKILTFRIPYYVGPLARGNSRFAWMTRKSEETITPWNFEEVVDKGASAQSFIERMTNFDKNLPNEKVLPKHSLLYEYFTVYNELTKVKYVTEGMRKPAFLSGEQKKAIVDLLFKTNRKVTVKQLKEDYFKKIECFDSVEISGVEDRFNASLGTYHDLLKIIKDKDFLDNEENEDILEDIVLTLTLFEDREMIEERLKTYAHLFDDKVMKQLKRRRYTGWGRLSRKLINGIRDKQSGKTILDFLKSDGFANRNFMQLIHDDSLTFKEDIQKAQVSGQGDSLHEHIANLAGSPAIKKGILQTVKVVDELVKVMGRHKPENIVIEMARENQTTQKGQKNSRERMKRIEEGIKELGSQILKEHPVENTQLQNEKLYLYYLQNGRDMYVDQELDINRLSDYDVDHIVPQSFLKDDSIDNKVLTRSDKARGKSDNVPSEEVVKKMKNYWRQLLNAKLITQRKFDNLTKAERGGLSELDKAGFIKRQLVETRQITKHVAQILDSRMNTKYDENDKLIREVKVITLKSKLVSDFRKDFQFYKVREINNYHHAHDAYLNAVVGTALIKKYPKLESEFVYGDYKVYDVRKMIAKSEQEIGKATAKYFFYSNIMNFFKTEITLANGEIRKRPLIETNGETGEIVWDKGRDFATVRKVLSMPQVNIVKKTEVQTGGFSKESILPKRNSDKLIARKKDWDPKKYGGFDSPTVAYSVLVVAKVEKGKSKKLKSVKELLGITIMERSSFEKNPIDFLEAKGYKEVKKDLIIKLPKYSLFELENGRKRMLASAGELQKGNELALPSKYVNFLYLASHYEKLKGSPEDNEQKQLFVEQHKHYLDEIIEQISEFSKRVILADANLDKVLSAYNKHRDKPIREQAENIIHLFTLTNLGAPAAFKYFDTTIDRKRYTSTKEVLDATLIHQSITGLYETRIDLSQLGGDGGEAAAKPAPGGSGGTVSLQDEHRLFDIPVTTSLPDVWLQDFPQAWAETGGLGRAKCQAPIIIDLKPTAVPVSIKQYPMSLEAHMGIRQHIIKFLELGVLRPCRSPWNTPLLPVKKPGTQDYRPVQDLREINKRTVDIHPTVPNPYNLLSTLKPDYSWYTVLDLKDAFFCLPLAPQSQELFAFEWKDPERGISGQLTWTRLPQGFKNSPTLFNEALHRDLTDFRTQHPEVTLLQYVDDLLLAAPTKKACTQGTRHLLQELGEKGYRASAKKAQICQTKVTYLGYILSEGKRWLTPGRIETVARIPPPRNPREVREFLGKAGFCRLFIPGFAELAAPLYALTKPSTPFTWQTEHQLAFEALKKALLSAPALGLPDTSKPFTLFLDERQGIAKGVLTQKLGPWKRPVAYLSKKLDPVAAGWPPCLRIMAATAMLVKDSAKLTLGQPLTVITPHTLEAIVRQPPDRWITNARLTHYQALLLDTDRVQFGPPVTLNPATLLPVPENQPSPHDCRQVLAETHGTREDLKDQELPDADHTWYTDGSSYLDSGTRRAGAAVVDGHNTIWAQSLPPGTSAQKAELIALTKALELSKGKKANIYTDSRYAFATAHTHGSIYERRGWLTSEGKEIKNKAEIIALLKALFLPQEVAIIHCPGHQKGQDPVAVGNRQADRVARQAAMAEVLTLATEPDNTSHITAGKRTADGSEFEKRTADGSEFESPKKKAKVE

SEQ ID NO: 2029 - protein, 2097 aa, synthetic construct
MPAAKRVKLDGGDKKYSIGLDIGTNSVGWAVITDEYKVPSKKFKVLGNTDRHSIKKNLIGALLFDSGETAEATRLKRTARRRYTRRKNRICYLQEIFSNEMAKVDDSFFHRLEESFLVEEDKKHERHPIFGNIVDEVAYHEKYPTIYHLRKKLVDSTDKADLRLIYLALAHMIKFRGHFLIEGDLNPDNSDVDKLFIQLVQTYNQLFEENPINASGVDAKAILSARLSKSRRLENLIAQLPGEKKNGLFGNLIALSLGLTPNFKSNFDLAEDAKLQLSKDTYDDDLDNLLAQIGDQYADLFLAAKNLSDAILLSDILRVNTEITKAPLSASMIKRYDEHHQDLTLLKALVRQQLPEKYKEIFFDQSKNGYAGYIDGGASQEEFYKFIKPILEKMDGTEELLVKLNREDLLRKQRTFDNGSIPHQIHLGELHAILRRQEDFYPFLKDNREKIEKILTFRIPYYVGPLARGNSRFAWMTRKSEETITPWNFEEVVDKGASAQSFIERMTNFDKNLPNEKVLPKHSLLYEYFTVYNELTKVKYVTEGMRKPAFLSGEQKKAIVDLLFKTNRKVTVKQLKEDYFKKIECFDSVEISGVEDRFNASLGTYHDLLKIIKDKDFLDNEENEDILEDIVLTLTLFEDREMIEERLKTYAHLFDDKVMKQLKRRRYTGWGRLSRKLINGIRDKQSGKTILDFLKSDGFANRNFMQLIHDDSLTFKEDIQKAQVSGQGDSLHEHIANLAGSPAIKKGILQTVKVVDELVKVMGRHKPENIVIEMARENQTTQKGQKNSRERMKRIEEGIKELGSQILKEHPVENTQLQNEKLYLYYLQNGRDMYVDQELDINRLSDYDVDHIVPQSFLKDDSIDNKVLTRSDKARGKSDNVPSEEVVKKMKNYWRQLLNAKLITQRKFDNLTKAERGGLSELDKAGFIKRQLVETRQITKHVAQILDSRMNTKYDENDKLIREVKVITLKSKLVSDFRKDFQFYKVREINNYHHAHDAYLNAVVGTALIKKYPKLESEFVYGDYKVYDVRKMIAKSEQEIGKATAKYFFYSNIMNFFKTEITLANGEIRKRPLIETNGETGEIVWDKGRDFATVRKVLSMPQVNIVKKTEVQTGGFSKESILPKRNSDKLIARKKDWDPKKYGGFDSPTVAYSVLVVAKVEKGKSKKLKSVKELLGITIMERSSFEKNPIDFLEAKGYKEVKKDLIIKLPKYSLFELENGRKRMLASAGELQKGNELALPSKYVNFLYLASHYEKLKGSPEDNEQKQLFVEQHKHYLDEIIEQISEFSKRVILADANLDKVLSAYNKHRDKPIREQAENIIHLFTLTNLGAPAAFKYFDTTIDRKRYTSTKEVLDATLIHQSITGLYETRIDLSQLGGDGGGGGGGSGGTVSLQDEHRLFDIPVTTSLPDVWLQDFPQAWAETGGLGRAKCQAPIIIDLKPTAVPVSIKQYPMSLEAHMGIRQHIIKFLELGVLRPCRSPWNTPLLPVKKPGTQDYRPVQDLREINKRTVDIHPTVPNPYNLLSTLKPDYSWYTVLDLKDAFFCLPLAPQSQELFAFEWKDPERGISGQLTWTRLPQGFKNSPTLFNEALHRDLTDFRTQHPEVTLLQYVDDLLLAAPTKKACTQGTRHLLQELGEKGYRASAKKAQICQTKVTYLGYILSEGKRWLTPGRIETVARIPPPRNPREVREFLGKAGFCRLFIPGFAELAAPLYALTKPSTPFTWQTEHQLAFEALKKALLSAPALGLPDTSKPFTLFLDERQGIAKGVLTQKLGPWKRPVAYLSKKLDPVAAGWPPCLRIMAATAMLVKDSAKLTLGQPLTVITPHTLEAIVRQPPDRWITNARLTHYQALLLDTDRVQFGPPVTLNPATLLPVPENQPSPHDCRQVLAETHGTREDLKDQELPDADHTWYTDGSSYLDSGTRRAGAAVVDGHNTIWAQSLPPGTSAQKAELIALTKALELSKGKKANIYTDSRYAFATAHTHGSIYERRGWLTSEGKEIKNKAEIIALLKALFLPQEVAIIHCPGHQKGQDPVAVGNRQADRVARQAAMAEVLTLATEPDNTSHITAGKRTADGSEFEKRTADGSEFESPKKKAKVE

SEQ ID NO: 2030 - protein, 2100 aa, synthetic construct
MPAAKRVKLDGGDKKYSIGLDIGTNSVGWAVITDEYKVPSKKFKVLGNTDRHSIKKNLIGALLFDSGETAEATRLKRTARRRYTRRKNRICYLQEIFSNEMAKVDDSFFHRLEESFLVEEDKKHERHPIFGNIVDEVAYHEKYPTIYHLRKKLVDSTDKADLRLIYLALAHMIKFRGHFLIEGDLNPDNSDVDKLFIQLVQTYNQLFEENPINASGVDAKAILSARLSKSRRLENLIAQLPGEKKNGLFGNLIALSLGLTPNFKSNFDLAEDAKLQLSKDTYDDDLDNLLAQIGDQYADLFLAAKNLSDAILLSDILRVNTEITKAPLSASMIKRYDEHHQDLTLLKALVRQQLPEKYKEIFFDQSKNGYAGYIDGGASQEEFYKFIKPILEKMDGTEELLVKLNREDLLRKQRTFDNGSIPHQIHLGELHAILRRQEDFYPFLKDNREKIEKILTFRIPYYVGPLARGNSRFAWMTRKSEETITPWNFEEVVDKGASAQSFIERMTNFDKNLPNEKVLPKHSLLYEYFTVYNELTKVKYVTEGMRKPAFLSGEQKKAIVDLLFKTNRKVTVKQLKEDYFKKIECFDSVEISGVEDRFNASLGTYHDLLKIIKDKDFLDNEENEDILEDIVLTLTLFEDREMIEERLKTYAHLFDDKVMKQLKRRRYTGWGRLSRKLINGIRDKQSGKTILDFLKSDGFANRNFMQLIHDDSLTFKEDIQKAQVSGQGDSLHEHIANLAGSPAIKKGILQTVKVVDELVKVMGRHKPENIVIEMARENQTTQKGQKNSRERMKRIEEGIKELGSQILKEHPVENTQLQNEKLYLYYLQNGRDMYVDQELDINRLSDYDVDHIVPQSFLKDDSIDNKVLTRSDKARGKSDNVPSEEVVKKMKNYWRQLLNAKLITQRKFDNLTKAERGGLSELDKAGFIKRQLVETRQITKHVAQILDSRMNTKYDENDKLIREVKVITLKSKLVSDFRKDFQFYKVREINNYHHAHDAYLNAVVGTALIKKYPKLESEFVYGDYKVYDVRKMIAKSEQEIGKATAKYFFYSNIMNFFKTEITLANGEIRKRPLIETNGETGEIVWDKGRDFATVRKVLSMPQVNIVKKTEVQTGGFSKESILPKRNSDKLIARKKDWDPKKYGGFDSPTVAYSVLVVAKVEKGKSKKLKSVKELLGITIMERSSFEKNPIDFLEAKGYKEVKKDLIIKLPKYSLFELENGRKRMLASAGELQKGNELALPSKYVNFLYLASHYEKLKGSPEDNEQKQLFVEQHKHYLDEIIEQISEFSKRVILADANLDKVLSAYNKHRDKPIREQAENIIHLFTLTNLGAPAAFKYFDTTIDRKRYTSTKEVLDATLIHQSITGLYETRIDLSQLGGDGGGGSGGSGGSGGTVSLQDEHRLFDIPVTTSLPDVWLQDFPQAWAETGGLGRAKCQAPIIIDLKPTAVPVSIKQYPMSLEAHMGIRQHIIKFLELGVLRPCRSPWNTPLLPVKKPGTQDYRPVQDLREINKRTVDIHPTVPNPYNLLSTLKPDYSWYTVLDLKDAFFCLPLAPQSQELFAFEWKDPERGISGQLTWTRLPQGFKNSPTLFNEALHRDLTDFRTQHPEVTLLQYVDDLLLAAPTKKACTQGTRHLLQELGEKGYRASAKKAQICQTKVTYLGYILSEGKRWLTPGRIETVARIPPPRNPREVREFLGKAGFCRLFIPGFAELAAPLYALTKPSTPFTWQTEHQLAFEALKKALLSAPALGLPDTSKPFTLFLDERQGIAKGVLTQKLGPWKRPVAYLSKKLDPVAAGWPPCLRIMAATAMLVKDSAKLTLGQPLTVITPHTLEAIVRQPPDRWITNARLTHYQALLLDTDRVQFGPPVTLNPATLLPVPENQPSPHDCRQVLAETHGTREDLKDQELPDADHTWYTDGSSYLDSGTRRAGAAVVDGHNTIWAQSLPPGTSAQKAELIALTKALELSKGKKANIYTDSRYAFATAHTHGSIYERRGWLTSEGKEIKNKAEIIALLKALFLPQEVAIIHCPGHQKGQDPVAVGNRQADRVARQAAMAEVLTLATEPDNTSHITAGKRTADGSEFEKRTADGSEFESPKKKAKVE

SEQ ID NO: 2031 - protein, 2097 aa, synthetic construct
MPAAKRVKLDGGDKKYSIGLDIGTNSVGWAVITDEYKVPSKKFKVLGNTDRHSIKKNLIGALLFDSGETAEATRLKRTARRRYTRRKNRICYLQEIFSNEMAKVDDSFFHRLEESFLVEEDKKHERHPIFGNIVDEVAYHEKYPTIYHLRKKLVDSTDKADLRLIYLALAHMIKFRGHFLIEGDLNPDNSDVDKLFIQLVQTYNQLFEENPINASGVDAKAILSARLSKSRRLENLIAQLPGEKKNGLFGNLIALSLGLTPNFKSNFDLAEDAKLQLSKDTYDDDLDNLLAQIGDQYADLFLAAKNLSDAILLSDILRVNTEITKAPLSASMIKRYDEHHQDLTLLKALVRQQLPEKYKEIFFDQSKNGYAGYIDGGASQEEFYKFIKPILEKMDGTEELLVKLNREDLLRKQRTFDNGSIPHQIHLGELHAILRRQEDFYPFLKDNREKIEKILTFRIPYYVGPLARGNSRFAWMTRKSEETITPWNFEEVVDKGASAQSFIERMTNFDKNLPNEKVLPKHSLLYEYFTVYNELTKVKYVTEGMRKPAFLSGEQKKAIVDLLFKTNRKVTVKQLKEDYFKKIECFDSVEISGVEDRFNASLGTYHDLLKIIKDKDFLDNEENEDILEDIVLTLTLFEDREMIEERLKTYAHLFDDKVMKQLKRRRYTGWGRLSRKLINGIRDKQSGKTILDFLKSDGFANRNFMQLIHDDSLTFKEDIQKAQVSGQGDSLHEHIANLAGSPAIKKGILQTVKVVDELVKVMGRHKPENIVIEMARENQTTQKGQKNSRERMKRIEEGIKELGSQILKEHPVENTQLQNEKLYLYYLQNGRDMYVDQELDINRLSDYDVDHIVPQSFLKDDSIDNKVLTRSDKARGKSDNVPSEEVVKKMKNYWRQLLNAKLITQRKFDNLTKAERGGLSELDKAGFIKRQLVETRQITKHVAQILDSRMNTKYDENDKLIREVKVITLKSKLVSDFRKDFQFYKVREINNYHHAHDAYLNAVVGTALIKKYPKLESEFVYGDYKVYDVRKMIAKSEQEIGKATAKYFFYSNIMNFFKTEITLANGEIRKRPLIETNGETGEIVWDKGRDFATVRKVLSMPQVNIVKKTEVQTGGFSKESILPKRNSDKLIARKKDWDPKKYGGFDSPTVAYSVLVVAKVEKGKSKKLKSVKELLGITIMERSSFEKNPIDFLEAKGYKEVKKDLIIKLPKYSLFELENGRKRMLASAGELQKGNELALPSKYVNFLYLASHYEKLKGSPEDNEQKQLFVEQHKHYLDEIIEQISEFSKRVILADANLDKVLSAYNKHRDKPIREQAENIIHLFTLTNLGAPAAFKYFDTTIDRKRYTSTKEVLDATLIHQSITGLYETRIDLSQLGGDGGGGSGSSGGTVSLQDEHRLFDIPVTTSLPDVWLQDFPQAWAETGGLGRAKCQAPIIIDLKPTAVPVSIKQYPMSLEAHMGIRQHIIKFLELGVLRPCRSPWNTPLLPVKKPGTQDYRPVQDLREINKRTVDIHPTVPNPYNLLSTLKPDYSWYTVLDLKDAFFCLPLAPQSQELFAFEWKDPERGISGQLTWTRLPQGFKNSPTLFNEALHRDLTDFRTQHPEVTLLQYVDDLLLAAPTKKACTQGTRHLLQELGEKGYRASAKKAQICQTKVTYLGYILSEGKRWLTPGRIETVARIPPPRNPREVREFLGKAGFCRLFIPGFAELAAPLYALTKPSTPFTWQTEHQLAFEALKKALLSAPALGLPDTSKPFTLFLDERQGIAKGVLTQKLGPWKRPVAYLSKKLDPVAAGWPPCLRIMAATAMLVKDSAKLTLGQPLTVITPHTLEAIVRQPPDRWITNARLTHYQALLLDTDRVQFGPPVTLNPATLLPVPENQPSPHDCRQVLAETHGTREDLKDQELPDADHTWYTDGSSYLDSGTRRAGAAVVDGHNTIWAQSLPPGTSAQKAELIALTKALELSKGKKANIYTDSRYAFATAHTHGSIYERRGWLTSEGKEIKNKAEIIALLKALFLPQEVAIIHCPGHQKGQDPVAVGNRQADRVARQAAMAEVLTLATEPDNTSHITAGKRTADGSEFEKRTADGSEFESPKKKAKVE

SEQ ID NO: 2032 - protein, 2097 aa, synthetic construct
MPAAKRVKLDGGDKKYSIGLDIGTNSVGWAVITDEYKVPSKKFKVLGNTDRHSIKKNLIGALLFDSGETAEATRLKRTARRRYTRRKNRICYLQEIFSNEMAKVDDSFFHRLEESFLVEEDKKHERHPIFGNIVDEVAYHEKYPTIYHLRKKLVDSTDKADLRLIYLALAHMIKFRGHFLIEGDLNPDNSDVDKLFIQLVQTYNQLFEENPINASGVDAKAILSARLSKSRRLENLIAQLPGEKKNGLFGNLIALSLGLTPNFKSNFDLAEDAKLQLSKDTYDDDLDNLLAQIGDQYADLFLAAKNLSDAILLSDILRVNTEITKAPLSASMIKRYDEHHQDLTLLKALVRQQLPEKYKEIFFDQSKNGYAGYIDGGASQEEFYKFIKPILEKMDGTEELLVKLNREDLLRKQRTFDNGSIPHQIHLGELHAILRRQEDFYPFLKDNREKIEKILTFRIPYYVGPLARGNSRFAWMTRKSEETITPWNFEEVVDKGASAQSFIERMTNFDKNLPNEKVLPKHSLLYEYFTVYNELTKVKYVTEGMRKPAFLSGEQKKAIVDLLFKTNRKVTVKQLKEDYFKKIECFDSVEISGVEDRFNASLGTYHDLLKIIKDKDFLDNEENEDILEDIVLTLTLFEDREMIEERLKTYAHLFDDKVMKQLKRRRYTGWGRLSRKLINGIRDKQSGKTILDFLKSDGFANRNFMQLIHDDSLTFKEDIQKAQVSGQGDSLHEHIANLAGSPAIKKGILQTVKVVDELVKVMGRHKPENIVIEMARENQTTQKGQKNSRERMKRIEEGIKELGSQILKEHPVENTQLQNEKLYLYYLQNGRDMYVDQELDINRLSDYDVDHIVPQSFLKDDSIDNKVLTRSDKARGKSDNVPSEEVVKKMKNYWRQLLNAKLITQRKFDNLTKAERGGLSELDKAGFIKRQLVETRQITKHVAQILDSRMNTKYDENDKLIREVKVITLKSKLVSDFRKDFQFYKVREINNYHHAHDAYLNAVVGTALIKKYPKLESEFVYGDYKVYDVRKMIAKSEQEIGKATAKYFFYSNIMNFFKTEITLANGEIRKRPLIETNGETGEIVWDKGRDFATVRKVLSMPQVNIVKKTEVQTGGFSKESILPKRNSDKLIARKKDWDPKKYGGFDSPTVAYSVLVVAKVEKGKSKKLKSVKELLGITIMERSSFEKNPIDFLEAKGYKEVKKDLIIKLPKYSLFELENGRKRMLASAGELQKGNELALPSKYVNFLYLASHYEKLKGSPEDNEQKQLFVEQHKHYLDEIIEQISEFSKRVILADANLDKVLSAYNKHRDKPIREQAENIIHLFTLTNLGAPAAFKYFDTTIDRKRYTSTKEVLDATLIHQSITGLYETRIDLSQLGGDGGPAPGGSGGTVSLQDEHRLFDIPVTTSLPDVWLQDFPQAWAETGGLGRAKCQAPIIIDLKPTAVPVSIKQYPMSLEAHMGIRQHIIKFLELGVLRPCRSPWNTPLLPVKKPGTQDYRPVQDLREINKRTVDIHPTVPNPYNLLSTLKPDYSWYTVLDLKDAFFCLPLAPQSQELFAFEWKDPERGISGQLTWTRLPQGFKNSPTLFNEALHRDLTDFRTQHPEVTLLQYVDDLLLAAPTKKACTQGTRHLLQELGEKGYRASAKKAQICQTKVTYLGYILSEGKRWLTPGRIETVARIPPPRNPREVREFLGKAGFCRLFIPGFAELAAPLYALTKPSTPFTWQTEHQLAFEALKKALLSAPALGLPDTSKPFTLFLDERQGIAKGVLTQKLGPWKRPVAYLSKKLDPVAAGWPPCLRIMAATAMLVKDSAKLTLGQPLTVITPHTLEAIVRQPPDRWITNARLTHYQALLLDTDRVQFGPPVTLNPATLLPVPENQPSPHDCRQVLAETHGTREDLKDQELPDADHTWYTDGSSYLDSGTRRAGAAVVDGHNTIWAQSLPPGTSAQKAELIALTKALELSKGKKANIYTDSRYAFATAHTHGSIYERRGWLTSEGKEIKNKAEIIALLKALFLPQEVAIIHCPGHQKGQDPVAVGNRQADRVARQAAMAEVLTLATEPDNTSHITAGKRTADGSEFEKRTADGSEFESPKKKAKVE

SEQ ID NO: 2033 - protein, 2094 aa, synthetic construct
MPAAKRVKLDGGDKKYSIGLDIGTNSVGWAVITDEYKVPSKKFKVLGNTDRHSIKKNLIGALLFDSGETAEATRLKRTARRRYTRRKNRICYLQEIFSNEMAKVDDSFFHRLEESFLVEEDKKHERHPIFGNIVDEVAYHEKYPTIYHLRKKLVDSTDKADLRLIYLALAHMIKFRGHFLIEGDLNPDNSDVDKLFIQLVQTYNQLFEENPINASGVDAKAILSARLSKSRRLENLIAQLPGEKKNGLFGNLIALSLGLTPNFKSNFDLAEDAKLQLSKDTYDDDLDNLLAQIGDQYADLFLAAKNLSDAILLSDILRVNTEITKAPLSASMIKRYDEHHQDLTLLKALVRQQLPEKYKEIFFDQSKNGYAGYIDGGASQEEFYKFIKPILEKMDGTEELLVKLNREDLLRKQRTFDNGSIPHQIHLGELHAILRRQEDFYPFLKDNREKIEKILTFRIPYYVGPLARGNSRFAWMTRKSEETITPWNFEEVVDKGASAQSFIERMTNFDKNLPNEKVLPKHSLLYEYFTVYNELTKVKYVTEGMRKPAFLSGEQKKAIVDLLFKTNRKVTVKQLKEDYFKKIECFDSVEISGVEDRFNASLGTYHDLLKIIKDKDFLDNEENEDILEDIVLTLTLFEDREMIEERLKTYAHLFDDKVMKQLKRRRYTGWGRLSRKLINGIRDKQSGKTILDFLKSDGFANRNFMQLIHDDSLTFKEDIQKAQVSGQGDSLHEHIANLAGSPAIKKGILQTVKVVDELVKVMGRHKPENIVIEMARENQTTQKGQKNSRERMKRIEEGIKELGSQILKEHPVENTQLQNEKLYLYYLQNGRDMYVDQELDINRLSDYDVDHIVPQSFLKDDSIDNKVLTRSDKARGKSDNVPSEEVVKKMKNYWRQLLNAKLITQRKFDNLTKAERGGLSELDKAGFIKRQLVETRQITKHVAQILDSRMNTKYDENDKLIREVKVITLKSKLVSDFRKDFQFYKVREINNYHHAHDAYLNAVVGTALIKKYPKLESEFVYGDYKVYDVRKMIAKSEQEIGKATAKYFFYSNIMNFFKTEITLANGEIRKRPLIETNGETGEIVWDKGRDFATVRKVLSMPQVNIVKKTEVQTGGFSKESILPKRNSDKLIARKKDWDPKKYGGFDSPTVAYSVLVVAKVEKGKSKKLKSVKELLGITIMERSSFEKNPIDFLEAKGYKEVKKDLIIKLPKYSLFELENGRKRMLASAGELQKGNELALPSKYVNFLYLASHYEKLKGSPEDNEQKQLFVEQHKHYLDEIIEQISEFSKRVILADANLDKVLSAYNKHRDKPIREQAENIIHLFTLTNLGAPAAFKYFDTTIDRKRYTSTKEVLDATLIHQSITGLYETRIDLSQLGGDGGGSSGGTVSLQDEHRLFDIPVTTSLPDVWLQDFPQAWAETGGLGRAKCQAPIIIDLKPTAVPVSIKQYPMSLEAHMGIRQHIIKFLELGVLRPCRSPWNTPLLPVKKPGTQDYRPVQDLREINKRTVDIHPTVPNPYNLLSTLKPDYSWYTVLDLKDAFFCLPLAPQSQELFAFEWKDPERGISGQLTWTRLPQGFKNSPTLFNEALHRDLTDFRTQHPEVTLLQYVDDLLLAAPTKKACTQGTRHLLQELGEKGYRASAKKAQICQTKVTYLGYILSEGKRWLTPGRIETVARIPPPRNPREVREFLGKAGFCRLFIPGFAELAAPLYALTKPSTPFTWQTEHQLAFEALKKALLSAPALGLPDTSKPFTLFLDERQGIAKGVLTQKLGPWKRPVAYLSKKLDPVAAGWPPCLRIMAATAMLVKDSAKLTLGQPLTVITPHTLEAIVRQPPDRWITNARLTHYQALLLDTDRVQFGPPVTLNPATLLPVPENQPSPHDCRQVLAETHGTREDLKDQELPDADHTWYTDGSSYLDSGTRRAGAAVVDGHNTIWAQSLPPGTSAQKAELIALTKALELSKGKKANIYTDSRYAFATAHTHGSIYERRGWLTSEGKEIKNKAEIIALLKALFLPQEVAIIHCPGHQKGQDPVAVGNRQADRVARQAAMAEVLTLATEPDNTSHITAGKRTADGSEFEKRTADGSEFESPKKKAKVE

SEQ ID NO: 2034 - protein, 2100 aa, synthetic construct
MPAAKRVKLDGGDKKYSIGLDIGTNSVGWAVITDEYKVPSKKFKVLGNTDRHSIKKNLIGALLFDSGETAEATRLKRTARRRYTRRKNRICYLQEIFSNEMAKVDDSFFHRLEESFLVEEDKKHERHPIFGNIVDEVAYHEKYPTIYHLRKKLVDSTDKADLRLIYLALAHMIKFRGHFLIEGDLNPDNSDVDKLFIQLVQTYNQLFEENPINASGVDAKAILSARLSKSRRLENLIAQLPGEKKNGLFGNLIALSLGLTPNFKSNFDLAEDAKLQLSKDTYDDDLDNLLAQIGDQYADLFLAAKNLSDAILLSDILRVNTEITKAPLSASMIKRYDEHHQDLTLLKALVRQQLPEKYKEIFFDQSKNGYAGYIDGGASQEEFYKFIKPILEKMDGTEELLVKLNREDLLRKQRTFDNGSIPHQIHLGELHAILRRQEDFYPFLKDNREKIEKILTFRIPYYVGPLARGNSRFAWMTRKSEETITPWNFEEVVDKGASAQSFIERMTNFDKNLPNEKVLPKHSLLYEYFTVYNELTKVKYVTEGMRKPAFLSGEQKKAIVDLLFKTNRKVTVKQLKEDYFKKIECFDSVEISGVEDRFNASLGTYHDLLKIIKDKDFLDNEENEDILEDIVLTLTLFEDREMIEERLKTYAHLFDDKVMKQLKRRRYTGWGRLSRKLINGIRDKQSGKTILDFLKSDGFANRNFMQLIHDDSLTFKEDIQKAQVSGQGDSLHEHIANLAGSPAIKKGILQTVKVVDELVKVMGRHKPENIVIEMARENQTTQKGQKNSRERMKRIEEGIKELGSQILKEHPVENTQLQNEKLYLYYLQNGRDMYVDQELDINRLSDYDVDHIVPQSFLKDDSIDNKVLTRSDKARGKSDNVPSEEVVKKMKNYWRQLLNAKLITQRKFDNLTKAERGGLSELDKAGFIKRQLVETRQITKHVAQILDSRMNTKYDENDKLIREVKVITLKSKLVSDFRKDFQFYKVREINNYHHAHDAYLNAVVGTALIKKYPKLESEFVYGDYKVYDVRKMIAKSEQEIGKATAKYFFYSNIMNFFKTEITLANGEIRKRPLIETNGETGEIVWDKGRDFATVRKVLSMPQVNIVKKTEVQTGGFSKESILPKRNSDKLIARKKDWDPKKYGGFDSPTVAYSVLVVAKVEKGKSKKLKSVKELLGITIMERSSFEKNPIDFLEAKGYKEVKKDLIIKLPKYSLFELENGRKRMLASAGELQKGNELALPSKYVNFLYLASHYEKLKGSPEDNEQKQLFVEQHKHYLDEIIEQISEFSKRVILADANLDKVLSAYNKHRDKPIREQAENIIHLFTLTNLGAPAAFKYFDTTIDRKRYTSTKEVLDATLIHQSITGLYETRIDLSQLGGDGGGGGGGSPAPGGTVSLQDEHRLFDIPVTTSLPDVWLQDFPQAWAETGGLGRAKCQAPIIIDLKPTAVPVSIKQYPMSLEAHMGIRQHIIKFLELGVLRPCRSPWNTPLLPVKKPGTQDYRPVQDLREINKRTVDIHPTVPNPYNLLSTLKPDYSWYTVLDLKDAFFCLPLAPQSQELFAFEWKDPERGISGQLTWTRLPQGFKNSPTLFNEALHRDLTDFRTQHPEVTLLQYVDDLLLAAPTKKACTQGTRHLLQELGEKGYRASAKKAQICQTKVTYLGYILSEGKRWLTPGRIETVARIPPPRNPREVREFLGKAGFCRLFIPGFAELAAPLYALTKPSTPFTWQTEHQLAFEALKKALLSAPALGLPDTSKPFTLFLDERQGIAKGVLTQKLGPWKRPVAYLSKKLDPVAAGWPPCLRIMAATAMLVKDSAKLTLGQPLTVITPHTLEAIVRQPPDRWITNARLTHYQALLLDTDRVQFGPPVTLNPATLLPVPENQPSPHDCRQVLAETHGTREDLKDQELPDADHTWYTDGSSYLDSGTRRAGAAVVDGHNTIWAQSLPPGTSAQKAELIALTKALELSKGKKANIYTDSRYAFATAHTHGSIYERRGWLTSEGKEIKNKAEIIALLKALFLPQEVAIIHCPGHQKGQDPVAVGNRQADRVARQAAMAEVLTLATEPDNTSHITAGKRTADGSEFEKRTADGSEFESPKKKAKVE

SEQ ID NO: 2035 - protein, 2109 aa, synthetic construct
MPAAKRVKLDGGDKKYSIGLDIGTNSVGWAVITDEYKVPSKKFKVLGNTDRHSIKKNLIGALLFDSGETAEATRLKRTARRRYTRRKNRICYLQEIFSNEMAKVDDSFFHRLEESFLVEEDKKHERHPIFGNIVDEVAYHEKYPTIYHLRKKLVDSTDKADLRLIYLALAHMIKFRGHFLIEGDLNPDNSDVDKLFIQLVQTYNQLFEENPINASGVDAKAILSARLSKSRRLENLIAQLPGEKKNGLFGNLIALSLGLTPNFKSNFDLAEDAKLQLSKDTYDDDLDNLLAQIGDQYADLFLAAKNLSDAILLSDILRVNTEITKAPLSASMIKRYDEHHQDLTLLKALVRQQLPEKYKEIFFDQSKNGYAGYIDGGASQEEFYKFIKPILEKMDGTEELLVKLNREDLLRKQRTFDNGSIPHQIHLGELHAILRRQEDFYPFLKDNREKIEKILTFRIPYYVGPLARGNSRFAWMTRKSEETITPWNFEEVVDKGASAQSFIERMTNFDKNLPNEKVLPKHSLLYEYFTVYNELTKVKYVTEGMRKPAFLSGEQKKAIVDLLFKTNRKVTVKQLKEDYFKKIECFDSVEISGVEDRFNASLGTYHDLLKIIKDKDFLDNEENEDILEDIVLTLTLFEDREMIEERLKTYAHLFDDKVMKQLKRRRYTGWGRLSRKLINGIRDKQSGKTILDFLKSDGFANRNFMQLIHDDSLTFKEDIQKAQVSGQGDSLHEHIANLAGSPAIKKGILQTVKVVDELVKVMGRHKPENIVIEMARENQTTQKGQKNSRERMKRIEEGIKELGSQILKEHPVENTQLQNEKLYLYYLQNGRDMYVDQELDINRLSDYDVDHIVPQSFLKDDSIDNKVLTRSDKARGKSDNVPSEEVVKKMKNYWRQLLNAKLITQRKFDNLTKAERGGLSELDKAGFIKRQLVETRQITKHVAQILDSRMNTKYDENDKLIREVKVITLKSKLVSDFRKDFQFYKVREINNYHHAHDAYLNAVVGTALIKKYPKLESEFVYGDYKVYDVRKMIAKSEQEIGKATAKYFFYSNIMNFFKTEITLANGEIRKRPLIETNGETGEIVWDKGRDFATVRKVLSMPQVNIVKKTEVQTGGFSKESILPKRNSDKLIARKKDWDPKKYGGFDSPTVAYSVLVVAKVEKGKSKKLKSVKELLGITIMERSSFEKNPIDFLEAKGYKEVKKDLIIKLPKYSLFELENGRKRMLASAGELQKGNELALPSKYVNFLYLASHYEKLKGSPEDNEQKQLFVEQHKHYLDEIIEQISEFSKRVILADANLDKVLSAYNKHRDKPIREQAENIIHLFTLTNLGAPAAFKYFDTTIDRKRYTSTKEVLDATLIHQSITGLYETRIDLSQLGGDGGGSSGSSGSSGSSGSSGSSGGTVSLQDEHRLFDIPVTTSLPDVWLQDFPQAWAETGGLGRAKCQAPIIIDLKPTAVPVSIKQYPMSLEAHMGIRQHIIKFLELGVLRPCRSPWNTPLLPVKKPGTQDYRPVQDLREINKRTVDIHPTVPNPYNLLSTLKPDYSWYTVLDLKDAFFCLPLAPQSQELFAFEWKDPERGISGQLTWTRLPQGFKNSPTLFNEALHRDLTDFRTQHPEVTLLQYVDDLLLAAPTKKACTQGTRHLLQELGEKGYRASAKKAQICQTKVTYLGYILSEGKRWLTPGRIETVARIPPPRNPREVREFLGKAGFCRLFIPGFAELAAPLYALTKPSTPFTWQTEHQLAFEALKKALLSAPALGLPDTSKPFTLFLDERQGIAKGVLTQKLGPWKRPVAYLSKKLDPVAAGWPPCLRIMAATAMLVKDSAKLTLGQPLTVITPHTLEAIVRQPPDRWITNARLTHYQALLLDTDRVQFGPPVTLNPATLLPVPENQPSPHDCRQVLAETHGTREDLKDQELPDADHTWYTDGSSYLDSGTRRAGAAVVDGHNTIWAQSLPPGTSAQKAELIALTKALELSKGKKANIYTDSRYAFATAHTHGSIYERRGWLTSEGKEIKNKAEIIALLKALFLPQEVAIIHCPGHQKGQDPVAVGNRQADRVARQAAMAEVLTLATEPDNTSHITAGKRTADGSEFEKRTADGSEFESPKKKAKVE

SEQ ID NO: 2036 - protein, 2097 aa, synthetic construct
MPAAKRVKLDGGDKKYSIGLDIGTNSVGWAVITDEYKVPSKKFKVLGNTDRHSIKKNLIGALLFDSGETAEATRLKRTARRRYTRRKNRICYLQEIFSNEMAKVDDSFFHRLEESFLVEEDKKHERHPIFGNIVDEVAYHEKYPTIYHLRKKLVDSTDKADLRLIYLALAHMIKFRGHFLIEGDLNPDNSDVDKLFIQLVQTYNQLFEENPINASGVDAKAILSARLSKSRRLENLIAQLPGEKKNGLFGNLIALSLGLTPNFKSNFDLAEDAKLQLSKDTYDDDLDNLLAQIGDQYADLFLAAKNLSDAILLSDILRVNTEITKAPLSASMIKRYDEHHQDLTLLKALVRQQLPEKYKEIFFDQSKNGYAGYIDGGASQEEFYKFIKPILEKMDGTEELLVKLNREDLLRKQRTFDNGSIPHQIHLGELHAILRRQEDFYPFLKDNREKIEKILTFRIPYYVGPLARGNSRFAWMTRKSEETITPWNFEEVVDKGASAQSFIERMTNFDKNLPNEKVLPKHSLLYEYFTVYNELTKVKYVTEGMRKPAFLSGEQKKAIVDLLFKTNRKVTVKQLKEDYFKKIECFDSVEISGVEDRFNASLGTYHDLLKIIKDKDFLDNEENEDILEDIVLTLTLFEDREMIEERLKTYAHLFDDKVMKQLKRRRYTGWGRLSRKLINGIRDKQSGKTILDFLKSDGFANRNFMQLIHDDSLTFKEDIQKAQVSGQGDSLHEHIANLAGSPAIKKGILQTVKVVDELVKVMGRHKPENIVIEMARENQTTQKGQKNSRERMKRIEEGIKELGSQILKEHPVENTQLQNEKLYLYYLQNGRDMYVDQELDINRLSDYDVDHIVPQSFLKDDSIDNKVLTRSDKARGKSDNVPSEEVVKKMKNYWRQLLNAKLITQRKFDNLTKAERGGLSELDKAGFIKRQLVETRQITKHVAQILDSRMNTKYDENDKLIREVKVITLKSKLVSDFRKDFQFYKVREINNYHHAHDAYLNAVVGTALIKKYPKLESEFVYGDYKVYDVRKMIAKSEQEIGKATAKYFFYSNIMNFFKTEITLANGEIRKRPLIETNGETGEIVWDKGRDFATVRKVLSMPQVNIVKKTEVQTGGFSKESILPKRNSDKLIARKKDWDPKKYGGFDSPTVAYSVLVVAKVEKGKSKKLKSVKELLGITIMERSSFEKNPIDFLEAKGYKEVKKDLIIKLPKYSLFELENGRKRMLASAGELQKGNELALPSKYVNFLYLASHYEKLKGSPEDNEQKQLFVEQHKHYLDEIIEQISEFSKRVILADANLDKVLSAYNKHRDKPIREQAENIIHLFTLTNLGAPAAFKYFDTTIDRKRYTSTKEVLDATLIHQSITGLYETRIDLSQLGGDGGPAPGSSGGTVSLQDEHRLFDIPVTTSLPDVWLQDFPQAWAETGGLGRAKCQAPIIIDLKPTAVPVSIKQYPMSLEAHMGIRQHIIKFLELGVLRPCRSPWNTPLLPVKKPGTQDYRPVQDLREINKRTVDIHPTVPNPYNLLSTLKPDYSWYTVLDLKDAFFCLPLAPQSQELFAFEWKDPERGISGQLTWTRLPQGFKNSPTLFNEALHRDLTDFRTQHPEVTLLQYVDDLLLAAPTKKACTQGTRHLLQELGEKGYRASAKKAQICQTKVTYLGYILSEGKRWLTPGRIETVARIPPPRNPREVREFLGKAGFCRLFIPGFAELAAPLYALTKPSTPFTWQTEHQLAFEALKKALLSAPALGLPDTSKPFTLFLDERQGIAKGVLTQKLGPWKRPVAYLSKKLDPVAAGWPPCLRIMAATAMLVKDSAKLTLGQPLTVITPHTLEAIVRQPPDRWITNARLTHYQALLLDTDRVQFGPPVTLNPATLLPVPENQPSPHDCRQVLAETHGTREDLKDQELPDADHTWYTDGSSYLDSGTRRAGAAVVDGHNTIWAQSLPPGTSAQKAELIALTKALELSKGKKANIYTDSRYAFATAHTHGSIYERRGWLTSEGKEIKNKAEIIALLKALFLPQEVAIIHCPGHQKGQDPVAVGNRQADRVARQAAMAEVLTLATEPDNTSHITAGKRTADGSEFEKRTADGSEFESPKKKAKVE

SEQ ID NO: 2037 - protein, 2102 aa, synthetic construct
MPAAKRVKLDGGDKKYSIGLDIGTNSVGWAVITDEYKVPSKKFKVLGNTDRHSIKKNLIGALLFDSGETAEATRLKRTARRRYTRRKNRICYLQEIFSNEMAKVDDSFFHRLEESFLVEEDKKHERHPIFGNIVDEVAYHEKYPTIYHLRKKLVDSTDKADLRLIYLALAHMIKFRGHFLIEGDLNPDNSDVDKLFIQLVQTYNQLFEENPINASGVDAKAILSARLSKSRRLENLIAQLPGEKKNGLFGNLIALSLGLTPNFKSNFDLAEDAKLQLSKDTYDDDLDNLLAQIGDQYADLFLAAKNLSDAILLSDILRVNTEITKAPLSASMIKRYDEHHQDLTLLKALVRQQLPEKYKEIFFDQSKNGYAGYIDGGASQEEFYKFIKPILEKMDGTEELLVKLNREDLLRKQRTFDNGSIPHQIHLGELHAILRRQEDFYPFLKDNREKIEKILTFRIPYYVGPLARGNSRFAWMTRKSEETITPWNFEEVVDKGASAQSFIERMTNFDKNLPNEKVLPKHSLLYEYFTVYNELTKVKYVTEGMRKPAFLSGEQKKAIVDLLFKTNRKVTVKQLKEDYFKKIECFDSVEISGVEDRFNASLGTYHDLLKIIKDKDFLDNEENEDILEDIVLTLTLFEDREMIEERLKTYAHLFDDKVMKQLKRRRYTGWGRLSRKLINGIRDKQSGKTILDFLKSDGFANRNFMQLIHDDSLTFKEDIQKAQVSGQGDSLHEHIANLAGSPAIKKGILQTVKVVDELVKVMGRHKPENIVIEMARENQTTQKGQKNSRERMKRIEEGIKELGSQILKEHPVENTQLQNEKLYLYYLQNGRDMYVDQELDINRLSDYDVDHIVPQSFLKDDSIDNKVLTRSDKARGKSDNVPSEEVVKKMKNYWRQLLNAKLITQRKFDNLTKAERGGLSELDKAGFIKRQLVETRQITKHVAQILDSRMNTKYDENDKLIREVKVITLKSKLVSDFRKDFQFYKVREINNYHHAHDAYLNAVVGTALIKKYPKLESEFVYGDYKVYDVRKMIAKSEQEIGKATAKYFFYSNIMNFFKTEITLANGEIRKRPLIETNGETGEIVWDKGRDFATVRKVLSMPQVNIVKKTEVQTGGFSKESILPKRNSDKLIARKKDWDPKKYGGFDSPTVAYSVLVVAKVEKGKSKKLKSVKELLGITIMERSSFEKNPIDFLEAKGYKEVKKDLIIKLPKYSLFELENGRKRMLASAGELQKGNELALPSKYVNFLYLASHYEKLKGSPEDNEQKQLFVEQHKHYLDEIIEQISEFSKRVILADANLDKVLSAYNKHRDKPIREQAENIIHLFTLTNLGAPAAFKYFDTTIDRKRYTSTKEVLDATLIHQSITGLYETRIDLSQLGGDGGGSSEAAAKPAPGGTVSLQDEHRLFDIPVTTSLPDVWLQDFPQAWAETGGLGRAKCQAPIIIDLKPTAVPVSIKQYPMSLEAHMGIRQHIIKFLELGVLRPCRSPWNTPLLPVKKPGTQDYRPVQDLREINKRTVDIHPTVPNPYNLLSTLKPDYSWYTVLDLKDAFFCLPLAPQSQELFAFEWKDPERGISGQLTWTRLPQGFKNSPTLFNEALHRDLTDFRTQHPEVTLLQYVDDLLLAAPTKKACTQGTRHLLQELGEKGYRASAKKAQICQTKVTYLGYILSEGKRWLTPGRIETVARIPPPRNPREVREFLGKAGFCRLFIPGFAELAAPLYALTKPSTPFTWQTEHQLAFEALKKALLSAPALGLPDTSKPFTLFLDERQGIAKGVLTQKLGPWKRPVAYLSKKLDPVAAGWPPCLRIMAATAMLVKDSAKLTLGQPLTVITPHTLEAIVRQPPDRWITNARLTHYQALLLDTDRVQFGPPVTLNPATLLPVPENQPSPHDCRQVLAETHGTREDLKDQELPDADHTWYTDGSSYLDSGTRRAGAAVVDGHNTIWAQSLPPGTSAQKAELIALTKALELSKGKKANIYTDSRYAFATAHTHGSIYERRGWLTSEGKEIKNKAEIIALLKALFLPQEVAIIHCPGHQKGQDPVAVGNRQADRVARQAAMAEVLTLATEPDNTSHITAGKRTADGSEFEKRTADGSEFESPKKKAKVE

SEQ ID NO: 2038 - protein, 2100 aa, synthetic construct
MPAAKRVKLDGGDKKYSIGLDIGTNSVGWAVITDEYKVPSKKFKVLGNTDRHSIKKNLIGALLFDSGETAEATRLKRTARRRYTRRKNRICYLQEIFSNEMAKVDDSFFHRLEESFLVEEDKKHERHPIFGNIVDEVAYHEKYPTIYHLRKKLVDSTDKADLRLIYLALAHMIKFRGHFLIEGDLNPDNSDVDKLFIQLVQTYNQLFEENPINASGVDAKAILSARLSKSRRLENLIAQLPGEKKNGLFGNLIALSLGLTPNFKSNFDLAEDAKLQLSKDTYDDDLDNLLAQIGDQYADLFLAAKNLSDAILLSDILRVNTEITKAPLSASMIKRYDEHHQDLTLLKALVRQQLPEKYKEIFFDQSKNGYAGYIDGGASQEEFYKFIKPILEKMDGTEELLVKLNREDLLRKQRTFDNGSIPHQIHLGELHAILRRQEDFYPFLKDNREKIEKILTFRIPYYVGPLARGNSRFAWMTRKSEETITPWNFEEVVDKGASAQSFIERMTNFDKNLPNEKVLPKHSLLYEYFTVYNELTKVKYVTEGMRKPAFLSGEQKKAIVDLLFKTNRKVTVKQLKEDYFKKIECFDSVEISGVEDRFNASLGTYHDLLKIIKDKDFLDNEENEDILEDIVLTLTLFEDREMIEERLKTYAHLFDDKVMKQLKRRRYTGWGRLSRKLINGIRDKQSGKTILDFLKSDGFANRNFMQLIHDDSLTFKEDIQKAQVSGQGDSLHEHIANLAGSPAIKKGILQTVKVVDELVKVMGRHKPENIVIEMARENQTTQKGQKNSRERMKRIEEGIKELGSQILKEHPVENTQLQNEKLYLYYLQNGRDMYVDQELDINRLSDYDVDHIVPQSFLKDDSIDNKVLTRSDKARGKSDNVPSEEVVKKMKNYWRQLLNAKLITQRKFDNLTKAERGGLSELDKAGFIKRQLVETRQITKHVAQILDSRMNTKYDENDKLIREVKVITLKSKLVSDFRKDFQFYKVREINNYHHAHDAYLNAVVGTALIKKYPKLESEFVYGDYKVYDVRKMIAKSEQEIGKATAKYFFYSNIMNFFKTEITLANGEIRKRPLIETNGETGEIVWDKGRDFATVRKVLSMPQVNIVKKTEVQTGGFSKESILPKRNSDKLIARKKDWDPKKYGGFDSPTVAYSVLVVAKVEKGKSKKLKSVKELLGITIMERSSFEKNPIDFLEAKGYKEVKKDLIIKLPKYSLFELENGRKRMLASAGELQKGNELALPSKYVNFLYLASHYEKLKGSPEDNEQKQLFVEQHKHYLDEIIEQISEFSKRVILADANLDKVLSAYNKHRDKPIREQAENIIHLFTLTNLGAPAAFKYFDTTIDRKRYTSTKEVLDATLIHQSITGLYETRIDLSQLGGDGGGGSGGGGSSGGTVSLQDEHRLFDIPVTTSLPDVWLQDFPQAWAETGGLGRAKCQAPIIIDLKPTAVPVSIKQYPMSLEAHMGIRQHIIKFLELGVLRPCRSPWNTPLLPVKKPGTQDYRPVQDLREINKRTVDIHPTVPNPYNLLSTLKPDYSWYTVLDLKDAFFCLPLAPQSQELFAFEWKDPERGISGQLTWTRLPQGFKNSPTLFNEALHRDLTDFRTQHPEVTLLQYVDDLLLAAPTKKACTQGTRHLLQELGEKGYRASAKKAQICQTKVTYLGYILSEGKRWLTPGRIETVARIPPPRNPREVREFLGKAGFCRLFIPGFAELAAPLYALTKPSTPFTWQTEHQLAFEALKKALLSAPALGLPDTSKPFTLFLDERQGIAKGVLTQKLGPWKRPVAYLSKKLDPVAAGWPPCLRIMAATAMLVKDSAKLTLGQPLTVITPHTLEAIVRQPPDRWITNARLTHYQALLLDTDRVQFGPPVTLNPATLLPVPENQPSPHDCRQVLAETHGTREDLKDQELPDADHTWYTDGSSYLDSGTRRAGAAVVDGHNTIWAQSLPPGTSAQKAELIALTKALELSKGKKANIYTDSRYAFATAHTHGSIYERRGWLTSEGKEIKNKAEIIALLKALFLPQEVAIIHCPGHQKGQDPVAVGNRQADRVARQAAMAEVLTLATEPDNTSHITAGKRTADGSEFEKRTADGSEFESPKKKAKVE

SEQ ID NO: 2039 - protein, 2102 aa, synthetic construct
MPAAKRVKLDGGDKKYSIGLDIGTNSVGWAVITDEYKVPSKKFKVLGNTDRHSIKKNLIGALLFDSGETAEATRLKRTARRRYTRRKNRICYLQEIFSNEMAKVDDSFFHRLEESFLVEEDKKHERHPIFGNIVDEVAYHEKYPTIYHLRKKLVDSTDKADLRLIYLALAHMIKFRGHFLIEGDLNPDNSDVDKLFIQLVQTYNQLFEENPINASGVDAKAILSARLSKSRRLENLIAQLPGEKKNGLFGNLIALSLGLTPNFKSNFDLAEDAKLQLSKDTYDDDLDNLLAQIGDQYADLFLAAKNLSDAILLSDILRVNTEITKAPLSASMIKRYDEHHQDLTLLKALVRQQLPEKYKEIFFDQSKNGYAGYIDGGASQEEFYKFIKPILEKMDGTEELLVKLNREDLLRKQRTFDNGSIPHQIHLGELHAILRRQEDFYPFLKDNREKIEKILTFRIPYYVGPLARGNSRFAWMTRKSEETITPWNFEEVVDKGASAQSFIERMTNFDKNLPNEKVLPKHSLLYEYFTVYNELTKVKYVTEGMRKPAFLSGEQKKAIVDLLFKTNRKVTVKQLKEDYFKKIECFDSVEISGVEDRFNASLGTYHDLLKIIKDKDFLDNEENEDILEDIVLTLTLFEDREMIEERLKTYAHLFDDKVMKQLKRRRYTGWGRLSRKLINGIRDKQSGKTILDFLKSDGFANRNFMQLIHDDSLTFKEDIQKAQVSGQGDSLHEHIANLAGSPAIKKGILQTVKVVDELVKVMGRHKPENIVIEMARENQTTQKGQKNSRERMKRIEEGIKELGSQILKEHPVENTQLQNEKLYLYYLQNGRDMYVDQELDINRLSDYDVDHIVPQSFLKDDSIDNKVLTRSDKARGKSDNVPSEEVVKKMKNYWRQLLNAKLITQRKFDNLTKAERGGLSELDKAGFIKRQLVETRQITKHVAQILDSRMNTKYDENDKLIREVKVITLKSKLVSDFRKDFQFYKVREINNYHHAHDAYLNAVVGTALIKKYPKLESEFVYGDYKVYDVRKMIAKSEQEIGKATAKYFFYSNIMNFFKTEITLANGEIRKRPLIETNGETGEIVWDKGRDFATVRKVLSMPQVNIVKKTEVQTGGFSKESILPKRNSDKLIARKKDWDPKKYGGFDSPTVAYSVLVVAKVEKGKSKKLKSVKELLGITIMERSSFEKNPIDFLEAKGYKEVKKDLIIKLPKYSLFELENGRKRMLASAGELQKGNELALPSKYVNFLYLASHYEKLKGSPEDNEQKQLFVEQHKHYLDEIIEQISEFSKRVILADANLDKVLSAYNKHRDKPIREQAENIIHLFTLTNLGAPAAFKYFDTTIDRKRYTSTKEVLDATLIHQSITGLYETRIDLSQLGGDGGEAAAKGSSPAPGGTVSLQDEHRLFDIPVTTSLPDVWLQDFPQAWAETGGLGRAKCQAPIIIDLKPTAVPVSIKQYPMSLEAHMGIRQHIIKFLELGVLRPCRSPWNTPLLPVKKPGTQDYRPVQDLREINKRTVDIHPTVPNPYNLLSTLKPDYSWYTVLDLKDAFFCLPLAPQSQELFAFEWKDPERGISGQLTWTRLPQGFKNSPTLFNEALHRDLTDFRTQHPEVTLLQYVDDLLLAAPTKKACTQGTRHLLQELGEKGYRASAKKAQICQTKVTYLGYILSEGKRWLTPGRIETVARIPPPRNPREVREFLGKAGFCRLFIPGFAELAAPLYALTKPSTPFTWQTEHQLAFEALKKALLSAPALGLPDTSKPFTLFLDERQGIAKGVLTQKLGPWKRPVAYLSKKLDPVAAGWPPCLRIMAATAMLVKDSAKLTLGQPLTVITPHTLEAIVRQPPDRWITNARLTHYQALLLDTDRVQFGPPVTLNPATLLPVPENQPSPHDCRQVLAETHGTREDLKDQELPDADHTWYTDGSSYLDSGTRRAGAAVVDGHNTIWAQSLPPGTSAQKAELIALTKALELSKGKKANIYTDSRYAFATAHTHGSIYERRGWLTSEGKEIKNKAEIIALLKALFLPQEVAIIHCPGHQKGQDPVAVGNRQADRVARQAAMAEVLTLATEPDNTSHITAGKRTADGSEFEKRTADGSEFESPKKKAKVE

SEQ ID NO: 2040 - protein, 2102 aa, synthetic construct
MPAAKRVKLDGGDKKYSIGLDIGTNSVGWAVITDEYKVPSKKFKVLGNTDRHSIKKNLIGALLFDSGETAEATRLKRTARRRYTRRKNRICYLQEIFSNEMAKVDDSFFHRLEESFLVEEDKKHERHPIFGNIVDEVAYHEKYPTIYHLRKKLVDSTDKADLRLIYLALAHMIKFRGHFLIEGDLNPDNSDVDKLFIQLVQTYNQLFEENPINASGVDAKAILSARLSKSRRLENLIAQLPGEKKNGLFGNLIALSLGLTPNFKSNFDLAEDAKLQLSKDTYDDDLDNLLAQIGDQYADLFLAAKNLSDAILLSDILRVNTEITKAPLSASMIKRYDEHHQDLTLLKALVRQQLPEKYKEIFFDQSKNGYAGYIDGGASQEEFYKFIKPILEKMDGTEELLVKLNREDLLRKQRTFDNGSIPHQIHLGELHAILRRQEDFYPFLKDNREKIEKILTFRIPYYVGPLARGNSRFAWMTRKSEETITPWNFEEVVDKGASAQSFIERMTNFDKNLPNEKVLPKHSLLYEYFTVYNELTKVKYVTEGMRKPAFLSGEQKKAIVDLLFKTNRKVTVKQLKEDYFKKIECFDSVEISGVEDRFNASLGTYHDLLKIIKDKDFLDNEENEDILEDIVLTLTLFEDREMIEERLKTYAHLFDDKVMKQLKRRRYTGWGRLSRKLINGIRDKQSGKTILDFLKSDGFANRNFMQLIHDDSLTFKEDIQKAQVSGQGDSLHEHIANLAGSPAIKKGILQTVKVVDELVKVMGRHKPENIVIEMARENQTTQKGQKNSRERMKRIEEGIKELGSQILKEHPVENTQLQNEKLYLYYLQNGRDMYVDQELDINRLSDYDVDHIVPQSFLKDDSIDNKVLTRSDKARGKSDNVPSEEVVKKMKNYWRQLLNAKLITQRKFDNLTKAERGGLSELDKAGFIKRQLVETRQITKHVAQILDSRMNTKYDENDKLIREVKVITLKSKLVSDFRKDFQFYKVREINNYHHAHDAYLNAVVGTALIKKYPKLESEFVYGDYKVYDVRKMIAKSEQEIGKATAKYFFYSNIMNFFKTEITLANGEIRKRPLIETNGETGEIVWDKGRDFATVRKVLSMPQVNIVKKTEVQTGGFSKESILPKRNSDKLIARKKDWDPKKYGGFDSPTVAYSVLVVAKVEKGKSKKLKSVKELLGITIMERSSFEKNPIDFLEAKGYKEVKKDLIIKLPKYSLFELENGRKRMLASAGELQKGNELALPSKYVNFLYLASHYEKLKGSPEDNEQKQLFVEQHKHYLDEIIEQISEFSKRVILADANLDKVLSAYNKHRDKPIREQAENIIHLFTLTNLGAPAAFKYFDTTIDRKRYTSTKEVLDATLIHQSITGLYETRIDLSQLGGDGGPAPEAAAKGSSGGTVSLQDEHRLFDIPVTTSLPDVWLQDFPQAWAETGGLGRAKCQAPIIIDLKPTAVPVSIKQYPMSLEAHMGIRQHIIKFLELGVLRPCRSPWNTPLLPVKKPGTQDYRPVQDLREINKRTVDIHPTVPNPYNLLSTLKPDYSWYTVLDLKDAFFCLPLAPQSQELFAFEWKDPERGISGQLTWTRLPQGFKNSPTLFNEALHRDLTDFRTQHPEVTLLQYVDDLLLAAPTKKACTQGTRHLLQELGEKGYRASAKKAQICQTKVTYLGYILSEGKRWLTPGRIETVARIPPPRNPREVREFLGKAGFCRLFIPGFAELAAPLYALTKPSTPFTWQTEHQLAFEALKKALLSAPALGLPDTSKPFTLFLDERQGIAKGVLTQKLGPWKRPVAYLSKKLDPVAAGWPPCLRIMAATAMLVKDSAKLTLGQPLTVITPHTLEAIVRQPPDRWITNARLTHYQALLLDTDRVQFGPPVTLNPATLLPVPENQPSPHDCRQVLAETHGTREDLKDQELPDADHTWYTDGSSYLDSGTRRAGAAVVDGHNTIWAQSLPPGTSAQKAELIALTKALELSKGKKANIYTDSRYAFATAHTHGSIYERRGWLTSEGKEIKNKAEIIALLKALFLPQEVAIIHCPGHQKGQDPVAVGNRQADRVARQAAMAEVLTLATEPDNTSHITAGKRTADGSEFEKRTADGSEFESPKKKAKVE

SEQ ID NO: 2041 - protein, 2102 aa, synthetic construct
MPAAKRVKLDGGDKKYSIGLDIGTNSVGWAVITDEYKVPSKKFKVLGNTDRHSIKKNLIGALLFDSGETAEATRLKRTARRRYTRRKNRICYLQEIFSNEMAKVDDSFFHRLEESFLVEEDKKHERHPIFGNIVDEVAYHEKYPTIYHLRKKLVDSTDKADLRLIYLALAHMIKFRGHFLIEGDLNPDNSDVDKLFIQLVQTYNQLFEENPINASGVDAKAILSARLSKSRRLENLIAQLPGEKKNGLFGNLIALSLGLTPNFKSNFDLAEDAKLQLSKDTYDDDLDNLLAQIGDQYADLFLAAKNLSDAILLSDILRVNTEITKAPLSASMIKRYDEHHQDLTLLKALVRQQLPEKYKEIFFDQSKNGYAGYIDGGASQEEFYKFIKPILEKMDGTEELLVKLNREDLLRKQRTFDNGSIPHQIHLGELHAILRRQEDFYPFLKDNREKIEKILTFRIPYYVGPLARGNSRFAWMTRKSEETITPWNFEEVVDKGASAQSFIERMTNFDKNLPNEKVLPKHSLLYEYFTVYNELTKVKYVTEGMRKPAFLSGEQKKAIVDLLFKTNRKVTVKQLKEDYFKKIECFDSVEISGVEDRFNASLGTYHDLLKIIKDKDFLDNEENEDILEDIVLTLTLFEDREMIEERLKTYAHLFDDKVMKQLKRRRYTGWGRLSRKLINGIRDKQSGKTILDFLKSDGFANRNFMQLIHDDSLTFKEDIQKAQVSGQGDSLHEHIANLAGSPAIKKGILQTVKVVDELVKVMGRHKPENIVIEMARENQTTQKGQKNSRERMKRIEEGIKELGSQILKEHPVENTQLQNEKLYLYYLQNGRDMYVDQELDINRLSDYDVDHIVPQSFLKDDSIDNKVLTRSDKARGKSDNVPSEEVVKKMKNYWRQLLNAKLITQRKFDNLTKAERGGLSELDKAGFIKRQLVETRQITKHVAQILDSRMNTKYDENDKLIREVKVITLKSKLVSDFRKDFQFYKVREINNYHHAHDAYLNAVVGTALIKKYPKLESEFVYGDYKVYDVRKMIAKSEQEIGKATAKYFFYSNIMNFFKTEITLANGEIRKRPLIETNGETGEIVWDKGRDFATVRKVLSMPQVNIVKKTEVQTGGFSKESILPKRNSDKLIARKKDWDPKKYGGFDSPTVAYSVLVVAKVEKGKSKKLKSVKELLGITIMERSSFEKNPIDFLEAKGYKEVKKDLIIKLPKYSLFELENGRKRMLASAGELQKGNELALPSKYVNFLYLASHYEKLKGSPEDNEQKQLFVEQHKHYLDEIIEQISEFSKRVILADANLDKVLSAYNKHRDKPIREQAENIIHLFTLTNLGAPAAFKYFDTTIDRKRYTSTKEVLDATLIHQSITGLYETRIDLSQLGGDGGEAAAKGGGPAPGGTVSLQDEHRLFDIPVTTSLPDVWLQDFPQAWAETGGLGRAKCQAPIIIDLKPTAVPVSIKQYPMSLEAHMGIRQHIIKFLELGVLRPCRSPWNTPLLPVKKPGTQDYRPVQDLREINKRTVDIHPTVPNPYNLLSTLKPDYSWYTVLDLKDAFFCLPLAPQSQELFAFEWKDPERGISGQLTWTRLPQGFKNSPTLFNEALHRDLTDFRTQHPEVTLLQYVDDLLLAAPTKKACTQGTRHLLQELGEKGYRASAKKAQICQTKVTYLGYILSEGKRWLTPGRIETVARIPPPRNPREVREFLGKAGFCRLFIPGFAELAAPLYALTKPSTPFTWQTEHQLAFEALKKALLSAPALGLPDTSKPFTLFLDERQGIAKGVLTQKLGPWKRPVAYLSKKLDPVAAGWPPCLRIMAATAMLVKDSAKLTLGQPLTVITPHTLEAIVRQPPDRWITNARLTHYQALLLDTDRVQFGPPVTLNPATLLPVPENQPSPHDCRQVLAETHGTREDLKDQELPDADHTWYTDGSSYLDSGTRRAGAAVVDGHNTIWAQSLPPGTSAQKAELIALTKALELSKGKKANIYTDSRYAFATAHTHGSIYERRGWLTSEGKEIKNKAEIIALLKALFLPQEVAIIHCPGHQKGQDPVAVGNRQADRVARQAAMAEVLTLATEPDNTSHITAGKRTADGSEFEKRTADGSEFESPKKKAKVE

SEQ ID NO: 2042 - protein, 2100 aa, synthetic construct
MPAAKRVKLDGGDKKYSIGLDIGTNSVGWAVITDEYKVPSKKFKVLGNTDRHSIKKNLIGALLFDSGETAEATRLKRTARRRYTRRKNRICYLQEIFSNEMAKVDDSFFHRLEESFLVEEDKKHERHPIFGNIVDEVAYHEKYPTIYHLRKKLVDSTDKADLRLIYLALAHMIKFRGHFLIEGDLNPDNSDVDKLFIQLVQTYNQLFEENPINASGVDAKAILSARLSKSRRLENLIAQLPGEKKNGLFGNLIALSLGLTPNFKSNFDLAEDAKLQLSKDTYDDDLDNLLAQIGDQYADLFLAAKNLSDAILLSDILRVNTEITKAPLSASMIKRYDEHHQDLTLLKALVRQQLPEKYKEIFFDQSKNGYAGYIDGGASQEEFYKFIKPILEKMDGTEELLVKLNREDLLRKQRTFDNGSIPHQIHLGELHAILRRQEDFYPFLKDNREKIEKILTFRIPYYVGPLARGNSRFAWMTRKSEETITPWNFEEVVDKGASAQSFIERMTNFDKNLPNEKVLPKHSLLYEYFTVYNELTKVKYVTEGMRKPAFLSGEQKKAIVDLLFKTNRKVTVKQLKEDYFKKIECFDSVEISGVEDRFNASLGTYHDLLKIIKDKDFLDNEENEDILEDIVLTLTLFEDREMIEERLKTYAHLFDDKVMKQLKRRRYTGWGRLSRKLINGIRDKQSGKTILDFLKSDGFANRNFMQLIHDDSLTFKEDIQKAQVSGQGDSLHEHIANLAGSPAIKKGILQTVKVVDELVKVMGRHKPENIVIEMARENQTTQKGQKNSRERMKRIEEGIKELGSQILKEHPVENTQLQNEKLYLYYLQNGRDMYVDQELDINRLSDYDVDHIVPQSFLKDDSIDNKVLTRSDKARGKSDNVPSEEVVKKMKNYWRQLLNAKLITQRKFDNLTKAERGGLSELDKAGFIKRQLVETRQITKHVAQILDSRMNTKYDENDKLIREVKVITLKSKLVSDFRKDFQFYKVREINNYHHAHDAYLNAVVGTALIKKYPKLESEFVYGDYKVYDVRKMIAKSEQEIGKATAKYFFYSNIMNFFKTEITLANGEIRKRPLIETNGETGEIVWDKGRDFATVRKVLSMPQVNIVKKTEVQTGGFSKESILPKRNSDKLIARKKDWDPKKYGGFDSPTVAYSVLVVAKVEKGKSKKLKSVKELLGITIMERSSFEKNPIDFLEAKGYKEVKKDLIIKLPKYSLFELENGRKRMLASAGELQKGNELALPSKYVNFLYLASHYEKLKGSPEDNEQKQLFVEQHKHYLDEIIEQISEFSKRVILADANLDKVLSAYNKHRDKPIREQAENIIHLFTLTNLGAPAAFKYFDTTIDRKRYTSTKEVLDATLIHQSITGLYETRIDLSQLGGDGGGSSGSSGSSGGTVSLQDEHRLFDIPVTTSLPDVWLQDFPQAWAETGGLGRAKCQAPIIIDLKPTAVPVSIKQYPMSLEAHMGIRQHIIKFLELGVLRPCRSPWNTPLLPVKKPGTQDYRPVQDLREINKRTVDIHPTVPNPYNLLSTLKPDYSWYTVLDLKDAFFCLPLAPQSQELFAFEWKDPERGISGQLTWTRLPQGFKNSPTLFNEALHRDLTDFRTQHPEVTLLQYVDDLLLAAPTKKACTQGTRHLLQELGEKGYRASAKKAQICQTKVTYLGYILSEGKRWLTPGRIETVARIPPPRNPREVREFLGKAGFCRLFIPGFAELAAPLYALTKPSTPFTWQTEHQLAFEALKKALLSAPALGLPDTSKPFTLFLDERQGIAKGVLTQKLGPWKRPVAYLSKKLDPVAAGWPPCLRIMAATAMLVKDSAKLTLGQPLTVITPHTLEAIVRQPPDRWITNARLTHYQALLLDTDRVQFGPPVTLNPATLLPVPENQPSPHDCRQVLAETHGTREDLKDQELPDADHTWYTDGSSYLDSGTRRAGAAVVDGHNTIWAQSLPPGTSAQKAELIALTKALELSKGKKANIYTDSRYAFATAHTHGSIYERRGWLTSEGKEIKNKAEIIALLKALFLPQEVAIIHCPGHQKGQDPVAVGNRQADRVARQAAMAEVLTLATEPDNTSHITAGKRTADGSEFEKRTADGSEFESPKKKAKVE

SEQ ID NO: 2043 - protein, 2106 aa, synthetic construct
MPAAKRVKLDGGDKKYSIGLDIGTNSVGWAVITDEYKVPSKKFKVLGNTDRHSIKKNLIGALLFDSGETAEATRLKRTARRRYTRRKNRICYLQEIFSNEMAKVDDSFFHRLEESFLVEEDKKHERHPIFGNIVDEVAYHEKYPTIYHLRKKLVDSTDKADLRLIYLALAHMIKFRGHFLIEGDLNPDNSDVDKLFIQLVQTYNQLFEENPINASGVDAKAILSARLSKSRRLENLIAQLPGEKKNGLFGNLIALSLGLTPNFKSNFDLAEDAKLQLSKDTYDDDLDNLLAQIGDQYADLFLAAKNLSDAILLSDILRVNTEITKAPLSASMIKRYDEHHQDLTLLKALVRQQLPEKYKEIFFDQSKNGYAGYIDGGASQEEFYKFIKPILEKMDGTEELLVKLNREDLLRKQRTFDNGSIPHQIHLGELHAILRRQEDFYPFLKDNREKIEKILTFRIPYYVGPLARGNSRFAWMTRKSEETITPWNFEEVVDKGASAQSFIERMTNFDKNLPNEKVLPKHSLLYEYFTVYNELTKVKYVTEGMRKPAFLSGEQKKAIVDLLFKTNRKVTVKQLKEDYFKKIECFDSVEISGVEDRFNASLGTYHDLLKIIKDKDFLDNEENEDILEDIVLTLTLFEDREMIEERLKTYAHLFDDKVMKQLKRRRYTGWGRLSRKLINGIRDKQSGKTILDFLKSDGFANRNFMQLIHDDSLTFKEDIQKAQVSGQGDSLHEHIANLAGSPAIKKGILQTVKVVDELVKVMGRHKPENIVIEMARENQTTQKGQKNSRERMKRIEEGIKELGSQILKEHPVENTQLQNEKLYLYYLQNGRDMYVDQELDINRLSDYDVDHIVPQSFLKDDSIDNKVLTRSDKARGKSDNVPSEEVVKKMKNYWRQLLNAKLITQRKFDNLTKAERGGLSELDKAGFIKRQLVETRQITKHVAQILDSRMNTKYDENDKLIREVKVITLKSKLVSDFRKDFQFYKVREINNYHHAHDAYLNAVVGTALIKKYPKLESEFVYGDYKVYDVRKMIAKSEQEIGKATAKYFFYSNIMNFFKTEITLANGEIRKRPLIETNGETGEIVWDKGRDFATVRKVLSMPQVNIVKKTEVQTGGFSKESILPKRNSDKLIARKKDWDPKKYGGFDSPTVAYSVLVVAKVEKGKSKKLKSVKELLGITIMERSSFEKNPIDFLEAKGYKEVKKDLIIKLPKYSLFELENGRKRMLASAGELQKGNELALPSKYVNFLYLASHYEKLKGSPEDNEQKQLFVEQHKHYLDEIIEQISEFSKRVILADANLDKVLSAYNKHRDKPIREQAENIIHLFTLTNLGAPAAFKYFDTTIDRKRYTSTKEVLDATLIHQSITGLYETRIDLSQLGGDGGEAAAKEAAAKEAAAKGGTVSLQDEHRLFDIPVTTSLPDVWLQDFPQAWAETGGLGRAKCQAPIIIDLKPTAVPVSIKQYPMSLEAHMGIRQHIIKFLELGVLRPCRSPWNTPLLPVKKPGTQDYRPVQDLREINKRTVDIHPTVPNPYNLLSTLKPDYSWYTVLDLKDAFFCLPLAPQSQELFAFEWKDPERGISGQLTWTRLPQGFKNSPTLFNEALHRDLTDFRTQHPEVTLLQYVDDLLLAAPTKKACTQGTRHLLQELGEKGYRASAKKAQICQTKVTYLGYILSEGKRWLTPGRIETVARIPPPRNPREVREFLGKAGFCRLFIPGFAELAAPLYALTKPSTPFTWQTEHQLAFEALKKALLSAPALGLPDTSKPFTLFLDERQGIAKGVLTQKLGPWKRPVAYLSKKLDPVAAGWPPCLRIMAATAMLVKDSAKLTLGQPLTVITPHTLEAIVRQPPDRWITNARLTHYQALLLDTDRVQFGPPVTLNPATLLPVPENQPSPHDCRQVLAETHGTREDLKDQELPDADHTWYTDGSSYLDSGTRRAGAAVVDGHNTIWAQSLPPGTSAQKAELIALTKALELSKGKKANIYTDSRYAFATAHTHGSIYERRGWLTSEGKEIKNKAEIIALLKALFLPQEVAIIHCPGHQKGQDPVAVGNRQADRVARQAAMAEVLTLATEPDNTSHITAGKRTADGSEFEKRTADGSEFESPKKKAKVE

SEQ ID NO: 2044 - protein, 2102 aa, synthetic construct
MPAAKRVKLDGGDKKYSIGLDIGTNSVGWAVITDEYKVPSKKFKVLGNTDRHSIKKNLIGALLFDSGETAEATRLKRTARRRYTRRKNRICYLQEIFSNEMAKVDDSFFHRLEESFLVEEDKKHERHPIFGNIVDEVAYHEKYPTIYHLRKKLVDSTDKADLRLIYLALAHMIKFRGHFLIEGDLNPDNSDVDKLFIQLVQTYNQLFEENPINASGVDAKAILSARLSKSRRLENLIAQLPGEKKNGLFGNLIALSLGLTPNFKSNFDLAEDAKLQLSKDTYDDDLDNLLAQIGDQYADLFLAAKNLSDAILLSDILRVNTEITKAPLSASMIKRYDEHHQDLTLLKALVRQQLPEKYKEIFFDQSKNGYAGYIDGGASQEEFYKFIKPILEKMDGTEELLVKLNREDLLRKQRTFDNGSIPHQIHLGELHAILRRQEDFYPFLKDNREKIEKILTFRIPYYVGPLARGNSRFAWMTRKSEETITPWNFEEVVDKGASAQSFIERMTNFDKNLPNEKVLPKHSLLYEYFTVYNELTKVKYVTEGMRKPAFLSGEQKKAIVDLLFKTNRKVTVKQLKEDYFKKIECFDSVEISGVEDRFNASLGTYHDLLKIIKDKDFLDNEENEDILEDIVLTLTLFEDREMIEERLKTYAHLFDDKVMKQLKRRRYTGWGRLSRKLINGIRDKQSGKTILDFLKSDGFANRNFMQLIHDDSLTFKEDIQKAQVSGQGDSLHEHIANLAGSPAIKKGILQTVKVVDELVKVMGRHKPENIVIEMARENQTTQKGQKNSRERMKRIEEGIKELGSQILKEHPVENTQLQNEKLYLYYLQNGRDMYVDQELDINRLSDYDVDHIVPQSFLKDDSIDNKVLTRSDKARGKSDNVPSEEVVKKMKNYWRQLLNAKLITQRKFDNLTKAERGGLSELDKAGFIKRQLVETRQITKHVAQILDSRMNTKYDENDKLIREVKVITLKSKLVSDFRKDFQFYKVREINNYHHAHDAYLNAVVGTALIKKYPKLESEFVYGDYKVYDVRKMIAKSEQEIGKATAKYFFYSNIMNFFKTEITLANGEIRKRPLIETNGETGEIVWDKGRDFATVRKVLSMPQVNIVKKTEVQTGGFSKESILPKRNSDKLIARKKDWDPKKYGGFDSPTVAYSVLVVAKVEKGKSKKLKSVKELLGITIMERSSFEKNPIDFLEAKGYKEVKKDLIIKLPKYSLFELENGRKRMLASAGELQKGNELALPSKYVNFLYLASHYEKLKGSPEDNEQKQLFVEQHKHYLDEIIEQISEFSKRVILADANLDKVLSAYNKHRDKPIREQAENIIHLFTLTNLGAPAAFKYFDTTIDRKRYTSTKEVLDATLIHQSITGLYETRIDLSQLGGDGGPAPEAAAKGGSGGTVSLQDEHRLFDIPVTTSLPDVWLQDFPQAWAETGGLGRAKCQAPIIIDLKPTAVPVSIKQYPMSLEAHMGIRQHIIKFLELGVLRPCRSPWNTPLLPVKKPGTQDYRPVQDLREINKRTVDIHPTVPNPYNLLSTLKPDYSWYTVLDLKDAFFCLPLAPQSQELFAFEWKDPERGISGQLTWTRLPQGFKNSPTLFNEALHRDLTDFRTQHPEVTLLQYVDDLLLAAPTKKACTQGTRHLLQELGEKGYRASAKKAQICQTKVTYLGYILSEGKRWLTPGRIETVARIPPPRNPREVREFLGKAGFCRLFIPGFAELAAPLYALTKPSTPFTWQTEHQLAFEALKKALLSAPALGLPDTSKPFTLFLDERQGIAKGVLTQKLGPWKRPVAYLSKKLDPVAAGWPPCLRIMAATAMLVKDSAKLTLGQPLTVITPHTLEAIVRQPPDRWITNARLTHYQALLLDTDRVQFGPPVTLNPATLLPVPENQPSPHDCRQVLAETHGTREDLKDQELPDADHTWYTDGSSYLDSGTRRAGAAVVDGHNTIWAQSLPPGTSAQKAELIALTKALELSKGKKANIYTDSRYAFATAHTHGSIYERRGWLTSEGKEIKNKAEIIALLKALFLPQEVAIIHCPGHQKGQDPVAVGNRQADRVARQAAMAEVLTLATEPDNTSHITAGKRTADGSEFEKRTADGSEFESPKKKAKVE

SEQ ID NO: 2045 - protein, 2124 aa, synthetic construct
MPAAKRVKLDGGDKKYSIGLDIGTNSVGWAVITDEYKVPSKKFKVLGNTDRHSIKKNLIGALLFDSGETAEATRLKRTARRRYTRRKNRICYLQEIFSNEMAKVDDSFFHRLEESFLVEEDKKHERHPIFGNIVDEVAYHEKYPTIYHLRKKLVDSTDKADLRLIYLALAHMIKFRGHFLIEGDLNPDNSDVDKLFIQLVQTYNQLFEENPINASGVDAKAILSARLSKSRRLENLIAQLPGEKKNGLFGNLIALSLGLTPNFKSNFDLAEDAKLQLSKDTYDDDLDNLLAQIGDQYADLFLAAKNLSDAILLSDILRVNTEITKAPLSASMIKRYDEHHQDLTLLKALVRQQLPEKYKEIFFDQSKNGYAGYIDGGASQEEFYKFIKPILEKMDGTEELLVKLNREDLLRKQRTFDNGSIPHQIHLGELHAILRRQEDFYPFLKDNREKIEKILTFRIPYYVGPLARGNSRFAWMTRKSEETITPWNFEEVVDKGASAQSFIERMTNFDKNLPNEKVLPKHSLLYEYFTVYNELTKVKYVTEGMRKPAFLSGEQKKAIVDLLFKTNRKVTVKQLKEDYFKKIECFDSVEISGVEDRFNASLGTYHDLLKIIKDKDFLDNEENEDILEDIVLTLTLFEDREMIEERLKTYAHLFDDKVMKQLKRRRYTGWGRLSRKLINGIRDKQSGKTILDFLKSDGFANRNFMQLIHDDSLTFKEDIQKAQVSGQGDSLHEHIANLAGSPAIKKGILQTVKVVDELVKVMGRHKPENIVIEMARENQTTQKGQKNSRERMKRIEEGIKELGSQILKEHPVENTQLQNEKLYLYYLQNGRDMYVDQELDINRLSDYDVDHIVPQSFLKDDSIDNKVLTRSDKARGKSDNVPSEEVVKKMKNYWRQLLNAKLITQRKFDNLTKAERGGLSELDKAGFIKRQLVETRQITKHVAQILDSRMNTKYDENDKLIREVKVITLKSKLVSDFRKDFQFYKVREINNYHHAHDAYLNAVVGTALIKKYPKLESEFVYGDYKVYDVRKMIAKSEQEIGKATAKYFFYSNIMNFFKTEITLANGEIRKRPLIETNGETGEIVWDKGRDFATVRKVLSMPQVNIVKKTEVQTGGFSKESILPKRNSDKLIARKKDWDPKKYGGFDSPTVAYSVLVVAKVEKGKSKKLKSVKELLGITIMERSSFEKNPIDFLEAKGYKEVKKDLIIKLPKYSLFELENGRKRMLASAGELQKGNELALPSKYVNFLYLASHYEKLKGSPEDNEQKQLFVEQHKHYLDEIIEQISEFSKRVILADANLDKVLSAYNKHRDKPIREQAENIIHLFTLTNLGAPAAFKYFDTTIDRKRYTSTKEVLDATLIHQSITGLYETRIDLSQLGGDGGSGGSSGGSSGSETPGTSESATPESSGGSSGGSSGGTVSLQDEHRLFDIPVTTSLPDVWLQDFPQAWAETGGLGRAKCQAPIIIDLKPTAVPVSIKQYPMSLEAHMGIRQHIIKFLELGVLRPCRSPWNTPLLPVKKPGTQDYRPVQDLREINKRTVDIHPTVPNPYNLLSTLKPDYSWYTVLDLKDAFFCLPLAPQSQELFAFEWKDPERGISGQLTWTRLPQGFKNSPTLFNEALHRDLTDFRTQHPEVTLLQYVDDLLLAAPTKKACTQGTRHLLQELGEKGYRASAKKAQICQTKVTYLGYILSEGKRWLTPGRIETVARIPPPRNPREVREFLGKAGFCRLFIPGFAELAAPLYALTKPSTPFTWQTEHQLAFEALKKALLSAPALGLPDTSKPFTLFLDERQGIAKGVLTQKLGPWKRPVAYLSKKLDPVAAGWPPCLRIMAATAMLVKDSAKLTLGQPLTVITPHTLEAIVRQPPDRWITNARLTHYQALLLDTDRVQFGPPVTLNPATLLPVPENQPSPHDCRQVLAETHGTREDLKDQELPDADHTWYTDGSSYLDSGTRRAGAAVVDGHNTIWAQSLPPGTSAQKAELIALTKALELSKGKKANIYTDSRYAFATAHTHGSIYERRGWLTSEGKEIKNKAEIIALLKALFLPQEVAIIHCPGHQKGQDPVAVGNRQADRVARQAAMAEVLTLATEPDNTSHITAGKRTADGSEFEKRTADGSEFESPKKKAKVE

SEQ ID NO: 2046 - protein, 2102 aa, synthetic construct
MPAAKRVKLDGGDKKYSIGLDIGTNSVGWAVITDEYKVPSKKFKVLGNTDRHSIKKNLIGALLFDSGETAEATRLKRTARRRYTRRKNRICYLQEIFSNEMAKVDDSFFHRLEESFLVEEDKKHERHPIFGNIVDEVAYHEKYPTIYHLRKKLVDSTDKADLRLIYLALAHMIKFRGHFLIEGDLNPDNSDVDKLFIQLVQTYNQLFEENPINASGVDAKAILSARLSKSRRLENLIAQLPGEKKNGLFGNLIALSLGLTPNFKSNFDLAEDAKLQLSKDTYDDDLDNLLAQIGDQYADLFLAAKNLSDAILLSDILRVNTEITKAPLSASMIKRYDEHHQDLTLLKALVRQQLPEKYKEIFFDQSKNGYAGYIDGGASQEEFYKFIKPILEKMDGTEELLVKLNREDLLRKQRTFDNGSIPHQIHLGELHAILRRQEDFYPFLKDNREKIEKILTFRIPYYVGPLARGNSRFAWMTRKSEETITPWNFEEVVDKGASAQSFIERMTNFDKNLPNEKVLPKHSLLYEYFTVYNELTKVKYVTEGMRKPAFLSGEQKKAIVDLLFKTNRKVTVKQLKEDYFKKIECFDSVEISGVEDRFNASLGTYHDLLKIIKDKDFLDNEENEDILEDIVLTLTLFEDREMIEERLKTYAHLFDDKVMKQLKRRRYTGWGRLSRKLINGIRDKQSGKTILDFLKSDGFANRNFMQLIHDDSLTFKEDIQKAQVSGQGDSLHEHIANLAGSPAIKKGILQTVKVVDELVKVMGRHKPENIVIEMARENQTTQKGQKNSRERMKRIEEGIKELGSQILKEHPVENTQLQNEKLYLYYLQNGRDMYVDQELDINRLSDYDVDHIVPQSFLKDDSIDNKVLTRSDKARGKSDNVPSEEVVKKMKNYWRQLLNAKLITQRKFDNLTKAERGGLSELDKAGFIKRQLVETRQITKHVAQILDSRMNTKYDENDKLIREVKVITLKSKLVSDFRKDFQFYKVREINNYHHAHDAYLNAVVGTALIKKYPKLESEFVYGDYKVYDVRKMIAKSEQEIGKATAKYFFYSNIMNFFKTEITLANGEIRKRPLIETNGETGEIVWDKGRDFATVRKVLSMPQVNIVKKTEVQTGGFSKESILPKRNSDKLIARKKDWDPKKYGGFDSPTVAYSVLVVAKVEKGKSKKLKSVKELLGITIMERSSFEKNPIDFLEAKGYKEVKKDLIIKLPKYSLFELENGRKRMLASAGELQKGNELALPSKYVNFLYLASHYEKLKGSPEDNEQKQLFVEQHKHYLDEIIEQISEFSKRVILADANLDKVLSAYNKHRDKPIREQAENIIHLFTLTNLGAPAAFKYFDTTIDRKRYTSTKEVLDATLIHQSITGLYETRIDLSQLGGDGGGGSEAAAKGSSGGTVSLQDEHRLFDIPVTTSLPDVWLQDFPQAWAETGGLGRAKCQAPIIIDLKPTAVPVSIKQYPMSLEAHMGIRQHIIKFLELGVLRPCRSPWNTPLLPVKKPGTQDYRPVQDLREINKRTVDIHPTVPNPYNLLSTLKPDYSWYTVLDLKDAFFCLPLAPQSQELFAFEWKDPERGISGQLTWTRLPQGFKNSPTLFNEALHRDLTDFRTQHPEVTLLQYVDDLLLAAPTKKACTQGTRHLLQELGEKGYRASAKKAQICQTKVTYLGYILSEGKRWLTPGRIETVARIPPPRNPREVREFLGKAGFCRLFIPGFAELAAPLYALTKPSTPFTWQTEHQLAFEALKKALLSAPALGLPDTSKPFTLFLDERQGIAKGVLTQKLGPWKRPVAYLSKKLDPVAAGWPPCLRIMAATAMLVKDSAKLTLGQPLTVITPHTLEAIVRQPPDRWITNARLTHYQALLLDTDRVQFGPPVTLNPATLLPVPENQPSPHDCRQVLAETHGTREDLKDQELPDADHTWYTDGSSYLDSGTRRAGAAVVDGHNTIWAQSLPPGTSAQKAELIALTKALELSKGKKANIYTDSRYAFATAHTHGSIYERRGWLTSEGKEIKNKAEIIALLKALFLPQEVAIIHCPGHQKGQDPVAVGNRQADRVARQAAMAEVLTLATEPDNTSHITAGKRTADGSEFEKRTADGSEFESPKKKAKVE

SEQ ID NO: 2047 - protein, 2097 aa, synthetic construct
MPAAKRVKLDGGDKKYSIGLDIGTNSVGWAVITDEYKVPSKKFKVLGNTDRHSIKKNLIGALLFDSGETAEATRLKRTARRRYTRRKNRICYLQEIFSNEMAKVDDSFFHRLEESFLVEEDKKHERHPIFGNIVDEVAYHEKYPTIYHLRKKLVDSTDKADLRLIYLALAHMIKFRGHFLIEGDLNPDNSDVDKLFIQLVQTYNQLFEENPINASGVDAKAILSARLSKSRRLENLIAQLPGEKKNGLFGNLIALSLGLTPNFKSNFDLAEDAKLQLSKDTYDDDLDNLLAQIGDQYADLFLAAKNLSDAILLSDILRVNTEITKAPLSASMIKRYDEHHQDLTLLKALVRQQLPEKYKEIFFDQSKNGYAGYIDGGASQEEFYKFIKPILEKMDGTEELLVKLNREDLLRKQRTFDNGSIPHQIHLGELHAILRRQEDFYPFLKDNREKIEKILTFRIPYYVGPLARGNSRFAWMTRKSEETITPWNFEEVVDKGASAQSFIERMTNFDKNLPNEKVLPKHSLLYEYFTVYNELTKVKYVTEGMRKPAFLSGEQKKAIVDLLFKTNRKVTVKQLKEDYFKKIECFDSVEISGVEDRFNASLGTYHDLLKIIKDKDFLDNEENEDILEDIVLTLTLFEDREMIEERLKTYAHLFDDKVMKQLKRRRYTGWGRLSRKLINGIRDKQSGKTILDFLKSDGFANRNFMQLIHDDSLTFKEDIQKAQVSGQGDSLHEHIANLAGSPAIKKGILQTVKVVDELVKVMGRHKPENIVIEMARENQTTQKGQKNSRERMKRIEEGIKELGSQILKEHPVENTQLQNEKLYLYYLQNGRDMYVDQELDINRLSDYDVDHIVPQSFLKDDSIDNKVLTRSDKARGKSDNVPSEEVVKKMKNYWRQLLNAKLITQRKFDNLTKAERGGLSELDKAGFIKRQLVETRQITKHVAQILDSRMNTKYDENDKLIREVKVITLKSKLVSDFRKDFQFYKVREINNYHHAHDAYLNAVVGTALIKKYPKLESEFVYGDYKVYDVRKMIAKSEQEIGKATAKYFFYSNIMNFFKTEITLANGEIRKRPLIETNGETGEIVWDKGRDFATVRKVLSMPQVNIVKKTEVQTGGFSKESILPKRNSDKLIARKKDWDPKKYGGFDSPTVAYSVLVVAKVEKGKSKKLKSVKELLGITIMERSSFEKNPIDFLEAKGYKEVKKDLIIKLPKYSLFELENGRKRMLASAGELQKGNELALPSKYVNFLYLASHYEKLKGSPEDNEQKQLFVEQHKHYLDEIIEQISEFSKRVILADANLDKVLSAYNKHRDKPIREQAENIIHLFTLTNLGAPAAFKYFDTTIDRKRYTSTKEVLDATLIHQSITGLYETRIDLSQLGGDGGGSSGGSGGTVSLQDEHRLFDIPVTTSLPDVWLQDFPQAWAETGGLGRAKCQAPIIIDLKPTAVPVSIKQYPMSLEAHMGIRQHIIKFLELGVLRPCRSPWNTPLLPVKKPGTQDYRPVQDLREINKRTVDIHPTVPNPYNLLSTLKPDYSWYTVLDLKDAFFCLPLAPQSQELFAFEWKDPERGISGQLTWTRLPQGFKNSPTLFNEALHRDLTDFRTQHPEVTLLQYVDDLLLAAPTKKACTQGTRHLLQELGEKGYRASAKKAQICQTKVTYLGYILSEGKRWLTPGRIETVARIPPPRNPREVREFLGKAGFCRLFIPGFAELAAPLYALTKPSTPFTWQTEHQLAFEALKKALLSAPALGLPDTSKPFTLFLDERQGIAKGVLTQKLGPWKRPVAYLSKKLDPVAAGWPPCLRIMAATAMLVKDSAKLTLGQPLTVITPHTLEAIVRQPPDRWITNARLTHYQALLLDTDRVQFGPPVTLNPATLLPVPENQPSPHDCRQVLAETHGTREDLKDQELPDADHTWYTDGSSYLDSGTRRAGAAVVDGHNTIWAQSLPPGTSAQKAELIALTKALELSKGKKANIYTDSRYAFATAHTHGSIYERRGWLTSEGKEIKNKAEIIALLKALFLPQEVAIIHCPGHQKGQDPVAVGNRQADRVARQAAMAEVLTLATEPDNTSHITAGKRTADGSEFEKRTADGSEFESPKKKAKVE
